United States Patent Application Publication US 2021/0260178 A1 - sequence listing, part 3

SEQ ID NO: 3281 - RNA, 1855 nt, Artificial Sequence
  mRNA product Design i-2 comprising derived and/or modified sequence from LASV(803213;Clade II)__AAF86703__GPC (opt11)
ggggcgcugccuacggagguggcagccaucuccuucucggcaucaagcuuaccaugggccaaaucauaacauucuuccaagaagucccccacgucaucgaagaagucaugaacaucguacucaucgcucucucacuccuagccauccucaaagguaucuacaauguagcgaccugcggccucuucggccucaucucauuccuucuccucugcggccgcuccugcuccgucaccuacaaaggcgucuacgagcuccagacccuagaacuaaacauggccaaccucaauaugaccaugccccucuccugcacuaaaaacaacagccaucacuacaucauggucggaaacgagaccggacucgaacucacacuuacuaacaccuccaucaucaaccacaaauucugcaaccucuccgacgcccacaagaaaaaucucuaugaccacgcccucauguccauuaucucaacguuccaccucuccaucccuaacuucaaccaauacgaagccaugucaugcgacuucaacggcggcaaaauaagcguccaauacaaccuaucccacuccuucgccguagacgccgccaaccacugcggcaccaucgccaacggcguucuccaaacauucaugcgcauggccugggguggcuccuacauugcccucgacucaggcaaaggcaacugggauugcaucaugacauccuaccaauaccucauuauccaaaacacaacuugggaagaccacugccaauucagccgcccaucccccauaggcuaccucggccuccucucccaacgcacacgcgacaucuacaucucccgccgccuacuaggaaccuucaccuggacccucagcgacucggaaggcaacgaagccccaggcggcuacugccucacuagauggaugcucaucgaagccgaacucaaaugcuucggcaacaccgccguggccaaauguaacgaaaaacacgacgaagaguucugcgacaugcuccgccucuucgacuucaacaagcaagccaucaaacgccucaaaaccgaagcgcaaaugucaauccagcucauaaacaaggcagucaacgcccucaucaaugaucaacuuaucaugaaaaaccaccuccgcgacauaaugggcauccccuacuguaacuacucucgcuacugguaccucaaccacacugugacaggcaaaaccucacuaccccgcuguuggcucguauccaacggcuccuaccucaacgaaacccacuucagcgacgacaucgaacaacaggccgacaauaugaucaccgaaaugcuacaaaaggaauacauggaccgacaaggcaaaacaccccuuggccucgucgaccuauucgucuucuccaccucauucuaccucaucuccaucuuccuccaccucgucaaaaucccaacccaccgccacaucgucggcaagcccugccccaaaccccaccgccucaaccauaugggcaucugcucaugcggccucuacaaacaccccggaguaccaguaaaauggaaacgcuaaggacuagugcaucacauuuaaaagcaucucagccuaccaugagaauaagagaaagaaaaugaagaucaauagcuuauucaucucuuuuucuuuuucguugguguaaagccaacacccugucuaaaaaacauaaauuucuuuaaucauuuugccucuuuucucugugcuucaauuaauaaaaaauggaaagaaccuagaucuaaaaaaaaaaaaaaaaaaaaaaaaaaaaaaaaaaaaaaaaaaaaaaaaaaaaaaaaaaaaaaaaugcaucccccccccccccccccccccccccccccccaaaggcucuuuucagagccaccagaauu

SEQ ID NO: 3282 - RNA, 1855 nt, Artificial Sequence
  mRNA product Design i-2 comprising derived and/or modified sequence from LASV(GA391;Clade III)__CAA36645__GPC (opt11)
ggggcgcugccuacggagguggcagccaucuccuucucggcaucaagcuuaccaugggucaaaucgucaccuucuuccaagaaguaccccacgucaucgaagaagucaugaacauaguccucaucgcccucuccauccucgcgauccucaaaggacuauauaacgucgcaaccugcggccucaucggccucgucaccuuccuccuccucagcggacguuccugcagccucaucuacaaaggcaccuacgaacuccagacucucgaacuuaacauggaaacacucaacaugaccaugccccucuccugcaccaagaacaacucccaccacuacauccgcguaggcaacgaaaccggccuagagcuaacccuaacaaacacaucaauccucaaccacaaauucugcaaccucuccgacgcccacaaacgcaaccuauacgaccacucccucauguccaucaucuccaccuuccaccucucaauccccaacuucaaccaauacgaagccauguccugcgacuuuaacggaggcaagaucaccguacaauacaaccucucccacuccuucgccgucgacgccgccggccacugcggcacccucgccaacggaguacuacaaaccuucaugcgcauggcauggggcggcucauacaucgcgcucgacuccggccgcggcaacugggacuguaucaugacauccuaucaauaccuuauaauccagaacaccaccugggacgaccacugccaauuuucccgccccucacccaucggauaucuaggccuccucucccaacgcacccgagacaucuacaucucccgacgacuccucggcacauucacauggacccucuccgacucagaaggcaacgaaacccccggcggauauugccuaacacgcuggaugcucaucgaagcugaacuuaagugcuuuggcaacaccgcaguagcuaaaugcaacgaaaaacacgacgaagaguucugcgacaugcuccgacucuucgacuucaacaaacaagcaauccgccgguuaaaaacugaagcacaaauguccauccaacucaucaacaaagcaguaaacgcucucaucaacgaucaacucauaaugaaaaaccaccuccgagacauaaugggcauacccuacugcaauuacucaagauacugguaccucaaccacaccucaaccgguaaaaccucccuaccccgcugcuggcuaaucucaaauggcucauaccucaacgaaacuaaauucuccgacgacaucgaacaacaagcagacaacaugauuaccgaaaugcugcaaaaagaauacaucgaccgacaaggcaagacccccuuaggccuugucgaccucuucgucuucuccaccucauucuaccucaucucaaucuuccuccaccucgucaaaaucccaacccaccgccacaucgucggcaaacccugccccaaaccccaccggcucaaucacaugggcaucugcagcugcggacucuacaaacaacccggcgucccaguccgcuggaaacgcuaaggacuagugcaucacauuuaaaagcaucucagccuaccaugagaauaagagaaagaaaaugaagaucaauagcuuauucaucucuuuuucuuuuucguugguguaaagccaacacccugucuaaaaaacauaaauuucuuuaaucauuuugccucuuuucucugugcuucaauuaauaaaaaauggaaagaaccuagaucuaaaaaaaaaaaaaaaaaaaaaaaaaaaaaaaaaaaaaaaaaaaaaaaaaaaaaaaaaaaaaaaaugcaucccccccccccccccccccccccccccccccaaaggcucuuuucagagccaccagaauu

SEQ ID NO: 3283 - RNA, 1858 nt, Artificial Sequence
  mRNA product Design i-2 comprising derived and/or modified sequence from LASV(AV;Clade V)__CCA30314__GPC (opt11)
ggggcgcugccuacggagguggcagccaucuccuucucggcaucaagcuuaccaugggacagaucguaacauucuuccaagaagucccccacguaaucgaagaagucaugaacaucguacuuaucgcccucuccauccucgccguccucaaaggccuauacaacaucgccacaugcggccuaaucggacuuauaaccuuccuccuccuuugcggccguucaugcucaagcaaccuuuacaaaggagucuacgaacuacaaagucucgaccucaacauggaaacacucaacaugaccaugccccucagcugcaccaaaaacaacucccaccacuacauccgcgucggcaacgacacaggacucgaacucacucucacaaacaccaguauccucaaccacaaguucugcaaccucuccgacgcccacaagaaagaccucuacgaccacgcacugauguccauaauuuccacuuuccaccuuuccauucccaacuucaaccaauacgaagccaugucaugcgacuuuaacggcggaaaaaucagcguacaauacaaccucucucacuccuaugccaucgacgcugcaaaccacugcggcaccgucgcaaacggcauccuccaaaccuucaugagaauggccuggggcggcucuuacaucgcccuagauucaggccgcggcaacugggacuguaucaugacauccuaccaauaccucaucauacaaaacaccaccugggaaaaccacugccaauuuucccgccccagcccaaucgguuaccucggccuccucucucaacggacccgcgacaucuacaucucccggcgacuauuagggacguucaccuggacccucucagacagcgaaggcaacgccacccccggcggauacugccuaacucgcuggaugcuuauagaagccgaacuuaaaugcuucggcaacacugcaguugccaaaugcaacgaaaaacacgacgaggaguucugcgacaugcuccgccucuucgacuucaacaagcaagccaucagccgccuuaaauccgaagcccaaauguccauucagcucaucaacaaagcuguaaacgcccucauaaacgaccaacucaucaugaaaaaucaccuccgcgacauaaugggcauacccuacugcaacuacuccaaauacugguaccuaaaucacaccaucaccggcaaaaccucucuccccaaaugcuggcucgucuccaacggcucauaccucaacgaaacccacuucucggacgacaucgaacaacaagccgacaacaugaucaccgaaaugcuccaaaaagaauacauggaacgccaaggcaaaacaccacuaggccuagucgaccuauucgucuucucgacuuccuucuaccuaauauccaucuuccuucgacucguaaaaauccccacacacagacacauugucggcaagcccugccccaaaccccaccgccuaaaccacaugggcaucugcucaugcggccucuacaaacaacccggcgucccaguccgcuggaaacgcuaaggacuagugcaucacauuuaaaagcaucucagccuaccaugagaauaagagaaagaaaaugaagaucaauagcuuauucaucucuuuuucuuuuucguugguguaaagccaacacccugucuaaaaaacauaaauuucuuuaaucauuuugccucuuuucucugugcuucaauuaauaaaaaauggaaagaaccuagaucuaaaaaaaaaaaaaaaaaaaaaaaaaaaaaaaaaaaaaaaaaaaaaaaaaaaaaaaaaaaaaaaaugcaucccccccccccccccccccccccccccccccaaaggcucuuuucagagccaccagaauu

SEQ ID NO: 3284 - RNA, 1855 nt, Artificial Sequence
  mRNA product Design i-2 comprising derived and/or modified sequence from LASV(Togo/2016/7082;Clade VI)__AMR44577__GPC (opt11)
ggggcgcugccuacggagguggcagccaucuccuucucggcaucaagcuuaccaugggacaaaucaucaccuuuuuccaagaagucccccacguuaucgaagaagucaugaacauaguccucaucgcacuuucacuccucgccauacucaaaggcguauacaacgucgcaaccugcggaauaaucggccuggucaccuuccuguuccuaugcggacgauccugcucccuaaucuacaagggguccuacgaacuacaaacccuagaacucaacauggaaacacuuaacaugacaaugccacucucaugcaccaaaaacucaucccaccacuacaucagaguuggcaacgaaacaggccucgagcuaacccucaccaauacaucaaucaucaaccacaaauucugcaaccucuccgacgcccacaaacgaaaccucuaugaccacgcacucauguccauccuuagcaccuuccaccuuagcauccccaacuucaaccaauacgaggccaugagcugcgacuucaacggaggaaaaaucuccguccaauacaaccuaucccacgccuacgccgucgacgcagccgaacacugcgguaccgucgcgaacggcguccuccaaaccuucaugcgcauggccuggggcggcagcuacaucgcccucgacagcggccgcgggaacugggacugcaucaugaccucauaucaauaccuaauuauccaaaacaccaccugggaggaucacugccaauucucccgcccauccccaaucggcuaccuuggccuccucucccaacgcacccgugacaucuacaucucccgcagacuacucgguaccuucacauggacccucuccgacuccgaaggcaacgaaaccccaggcggcuacugccugacacgcuggaugcucaucgaagccgagcucaaaugcuucggcaacaccgccgucgccaagugcaaugaaaaacacgacgaagaguucugcgacaugcuucgccucuucgacuuuaacaaacaggccauccaacgccuaaaaagugaagcccaaaugagcauccaguuaaucaacaaagccgucaaugccuuaaucaacgaccaacucaucaugaaaaaccaucuccgcgacaugaugggcauaccuuacugcaacuauuccaaauacugguaccuaaaccacacuuccucgggccgaacaagccucccaaaauguuggcucgucuccaacggaucauaccucaacgaaacccacuucuccgacgacaucgaacaacaagccgacaauaugauuaccgaaauguuacaaaaggaauacaucgaccgccaaggcaaaacaccccuaggccucgucgaccuuuucguauucucgacgucauucuaccuaaucaguaucuuccuccaccucaucaaaauccccacccaccgucacaucgucggcaaaccgugccccaaaccccaccgccugaaccacaugggaaucugcucuuguggccuauacaaacaacccggaguacccaccagguggaaacgguaaggacuagugcaucacauuuaaaagcaucucagccuaccaugagaauaagagaaagaaaaugaagaucaauagcuuauucaucucuuuuucuuuuucguugguguaaagccaacacccugucuaaaaaacauaaauuucuuuaaucauuuugccucuuuucucugugcuucaauuaauaaaaaauggaaagaaccuagaucuaaaaaaaaaaaaaaaaaaaaaaaaaaaaaaaaaaaaaaaaaaaaaaaaaaaaaaaaaaaaaaaaugcaucccccccccccccccccccccccccccccccaaaggcucuuuucagagccaccagaauu

SEQ ID NO: 3285 - RNA, 1855 nt, Artificial Sequence
  mRNA product Design i-2 comprising derived and/or modified sequence from LASV(KAK-428;Clade n.d. (VII))__ANH09740__GPC (opt11)
ggggcgcugccuacggagguggcagccaucuccuucucggcaucaagcuuaccaugggccaaaucgucaccuucuuccaagaagucccccacgucaucgaagaagucaugaacauaguccuaauagcccucucccuccuagccauccucaagggacuauauaacuucgccacaugcggcgucaucggccuuauaacuuuccuccuacucugcggccgcuccugcucugccaccuacaaaggccaauacgagcuucaaacucuugaacucaacauggaaucacuaaacaugaccaugccccuauccugcaccaaaaauaacucacaccacuacauccgcgccgggaacaacacaggccuagaacucacgcucaccaacaccuccaucaucucacauaaauucugcaaccuauccgacgcccacaagaaaaaccucuaugaccacacacucauguccaucauaacaaccuuccaccucuccaucccuaacuucaaccaguacgaagccaugagcugcgacuucaacggcggcaaaauauccauccaauacaaucugucccacuccuacgccggcgacgcagcccagcacugcggcaccgucgccaacggcguccuccagaccuucaugcguauggcauggggaggcuccuaccucgccuuagacagcggacgacguggaugggacugcauaaucuccuccuaccaauacuuaauaauccaaaacaccaccugggacgaucacugccaauucucacgccccucccccaucggcuaccucggauucgucucacagaaaacccgagacaucuacaucuccagacgccuacucggaacguucaccuggacacucagcgacuccgagggccacgacaugcccggcggauacugccucacccgcuggaugcucaucgaagccgaccugaaaugcuucggcaacacagccgucgccaaaugcaacgaaaaacacgacgaagaguucugcgacauguggcgacucuucgacuucaacaaacaagcaauccaaagacucaaagccgaagcccaaaugaacauccaacuaaucaacaaggccgucaacgcccugauaaacgaccaacucaugaugaaaaaccaccucagagacaucaugggcaucccauacugcaacuacuccaaauucugguaccucaacaacaccacaaccggccgcaccucccuaccgcgcugcuggcuaaucucaaaugguuccuaccucaacgaaacccauuuuagcgacgacaucgaacaacaagccgacaacaugaucaccgaaaugcugcaaaaggaauacauggaccgccaaggaaaaacaccccucggccucguagaccucuucgucuucuccaccagcuucuaccuaaucacaaucuuccuccaucuggucaaaauaccgacucacagacacaucgucggaaaacccugccccaaaccccaccgacucaaccacauggguaucugcuccugcggccucuacaaacaacccggagucccaguucgauggaaacgcuaaggacuagugcaucacauuuaaaagcaucucagccuaccaugagaauaagagaaagaaaaugaagaucaauagcuuauucaucucuuuuucuuuuucguugguguaaagccaacacccugucuaaaaaacauaaauuucuuuaaucauuuugccucuuuucucugugcuucaauuaauaaaaaauggaaagaaccuagaucuaaaaaaaaaaaaaaaaaaaaaaaaaaaaaaaaaaaaaaaaaaaaaaaaaaaaaaaaaaaaaaaaugcaucccccccccccccccccccccccccccccccaaaggcucuuuucagagccaccagaauu

SEQ ID NO: 3286 - RNA, 1855 nt, Artificial Sequence
  mRNA product Design i-2 comprising derived and/or modified sequence from LASV(Pinneo-NIG-1969;Clade I)__AIT17836__GPC (opt11)
ggggcgcugccuacggagguggcagccaucuccuucucggcaucaagcuuaccaugggccaaaucauaacuuucuuucaagaagucccacacgucaucgaagaagucaugaacauaguccucaucgcccuaucccuccuagcaauccuaaaaggccuauacaauaucgcaaccuguggcaucaucggccuugucgccuuccucuuccucugcggcaaauccuguucccuuacccuaaagggcggcuacgagcuccaaacccucgaacucaacauggaaacccucaacaugacuaugccccucuccugcaccaagaacuccucccaccacuacauccgcguuggcaaugaaaccggacucgaacugacccuaaccaacaccucaaucaucaaccacaaauuuugcaaccuuuccgacgcacacaagaaaaaccucuacgaccacgcccucaugagcaucaucucaaccuuccaccucucaauccccaacuucaaucaauacgaagccauguccugcgacuucaacggcggaaaaaucagcguccaguacaaccugucacacagcuacgccggcgacgccgccgaacacugcggaacagucgcuaacggagucuuacaaacauucaugcgcauggcauggggcggccgguacaucgcccucgacuccggcaaaggcaacugggacugcaucaugaccuccuaccaauaccucauaauccaaaacaccaccugggaagaccacugccaauucucccgcccuucccccaucggcuaccuaggccuccuaagccaacgaacccgagacaucuacaucucaagacgccuccucggcacuuucaccuggacccucuccgacucagagggaaacgaaacccccggaggcuacugccuuacccgcuggauguuaaucgaagccgaacucaaaugcuucggcaacaccgccguagccaaaugcaacgaaaaacacgacgaagaguucugcgacaugcuacgccucuucgacuucaacaaacaagccauacgccgacucaaagcagaagcccaaauguccauccaauuaaucaacaaggccgucaacgcccuaauaaacgaccagcuaauaaugaaaaaccaccuccgcgacaucauggguauccccuacugcaacuacuccaaauacugguaccuaaaccacaccucauccggccgaacaucccuccccaaaugcuggcucaucuccaacggcuccuaccucaacgaaacacaauucuccgacgacaucgaacaacaagccgacaacaugaucacugagaugcuacaaaaagaauacaucgaacgacaaggcaaaacaccccuaggacucgucgauaucuucauauucucaaccucuuucuaccucaucucuaucuuccuucaccucaucaaaauccccacucaccggcacauagucggcaaacccugccccaaaccacaccgccuaaaccacaugggugucugcuccugcggccucuacaaacaccccggcguccccacaaaauggaaacgauaaggacuagugcaucacauuuaaaagcaucucagccuaccaugagaauaagagaaagaaaaugaagaucaauagcuuauucaucucuuuuucuuuuucguugguguaaagccaacacccugucuaaaaaacauaaauuucuuuaaucauuuugccucuuuucucugugcuucaauuaauaaaaaauggaaagaaccuagaucuaaaaaaaaaaaaaaaaaaaaaaaaaaaaaaaaaaaaaaaaaaaaaaaaaaaaaaaaaaaaaaaaugcaucccccccccccccccccccccccccccccccaaaggcucuuuucagagccaccagaauu

SEQ ID NO: 3287 - RNA, 1855 nt, Artificial Sequence
  mRNA product Design i-2 comprising derived and/or modified sequence from LASV(ISTH0009-NIG-2011;Clade II)__AIT17404__GPC (opt11)
ggggcgcugccuacggagguggcagccaucuccuucucggcaucaagcuuaccaugggccaaaucaucaccuuuuuccaagaagucccccacgucaucgaagaagucaugaacaucguccuaaucgcacucucccuacucgccauccucaaaggaaucuacaacguugcuacaugcggacucuucggccucgucuccuuccuccuccucugcggccgcucaugcuccaccaccuacaaaggcgucuacgaacuccaaacacucgaacucgacauggccucccuaaacaugaccaugccccucuccugcaccaaaaacaacucccaccacuacaucaugguaggcaacgaaaccggccuagaacucacccucacaaacacaucaaucaucaaccacaaauucugcaaucucuccgacgcacacaagaaaaaccucuacgaccacgcccucaugucuaucaucuccacauuccaccucucaauccccaacuucaaccaauacgaagcaauguccugcgacuucaacggaggcaaaaucucggugcaauacaaccucucgcacgccuacgcuguagacgccgccaaccacugcggcacuaucgccaacggcguccuacagaccuucaugcgcauggccuggggcggcuccuacaucgcccucgacucgggcaaaggcuccugggacugcaucaugacguccuaccaauaccucaucauccaaaacacaaccugggaagaccacugccaauucucccgacccagccccaucggguaccucggccuucuaucacaacggacccgagauauauacaucucccgcagacuacucggcacuuucaccuggacacucucagacuccgaaggcaacgaaacccccggcggcuacugccucacacguuggaugcuuauagaagccgaacucaaaugcuucggcaacaccgccgucgccaaaugcaacgaaaaacacgacgaagaauuuugcgacaugcucagacucuucgacuucaacaaacaagccauaagacgcuuaaaaacagaagcacaaaugucuauacaacucaucaacaaagccgucaaugcacuaaucaacgaccagcuaaucaugaaaaaccaccuccgcgacaucaugggcauccccuacugcaacuacuccaaauacugguacuugaaccacaccgucaccggcaaaaccucccucccgcgcugcuggcuagucagcaacggcagcuaccucaacgaaacccacuucucugacgacauagaacaacaagccgacaacaugaucaccgaacuccugcaaaaagaauacauggaccgccaaggaaagacuccccucggccucguggaccuauucgucuucucaaccucauucuaccuuaucagcaucuuccuccaccuuaucaaaauaccuacacaccgccacaucacaggcaaaccaugccccaagccccaccgauuaaaccauaugggcauaugcuccugcggccucuacaaacaccccggaguaccagucaaauggaaacgaugaggacuagugcaucacauuuaaaagcaucucagccuaccaugagaauaagagaaagaaaaugaagaucaauagcuuauucaucucuuuuucuuuuucguugguguaaagccaacacccugucuaaaaaacauaaauuucuuuaaucauuuugccucuuuucucugugcuucaauuaauaaaaaauggaaagaaccuagaucuaaaaaaaaaaaaaaaaaaaaaaaaaaaaaaaaaaaaaaaaaaaaaaaaaaaaaaaaaaaaaaaaugcaucccccccccccccccccccccccccccccccaaaggcucuuuucagagccaccagaauu

SEQ ID NO: 3288 - RNA, 1855 nt, Artificial Sequence
  mRNA product Design i-2 comprising derived and/or modified sequence from LASV(ISTH2010-NIG-2012;Clade II)__AIT17482__GPC (opt11)
ggggcgcugccuacggagguggcagccaucuccuucucggcaucaagcuuaccaugggccaaaucaucaccuucuuccaagaagucccacacgucauagaagaaguaaugaacaucguccuaauugcucucucacuacucgcgauccucaaagguaucuacaacgucgcaaccugcggacuguuuggacucguaucauuccuccuccugugcggccgcagcugcucaaccacauacaaaggcguauacgaacuacaaacccucgaacucgacauggccagccucaacaugacaaugccccucagcugcaccaaaaauaacagccaccacuacaucauggucggcaacgaaaccggccuugaacucacccucacaaacaccucaaucauaaaccacaaauucugcaaccucagcgacgcccacaagaaaaaccuauacgaccaugcacuaauguccaucauaagcaccuuccaccucuccauacccaacuucaaccaguacgaggccaugucaugcgauuucaacggaggcaaaaucuccguccaauacaaccuaagccacgccuacgcagucgacgccgccaaccacugcggcaccauagcaaacggcguccuucaaaccuucaugcgaauggccuggggcggcucauacaucgcccuagacucaggcaaaggcuccugggacugcauaaugacaucauaccaauaucucaucauccaaaacauaacaugggaagaccacugccaauucucccguccaucgccaaucggauaccucggccuccuaucacaacgaacucgcgacaucuacauaucccgccgucuccuaggaacauucaccuggacacucagcgacuccgaaggaaacgaaacccccggcggcuacugccucacgcgcuggaugcugaucgaagcagaacucaaaugcuucggcaacacugccgucgccaaaugcaacgaaaaacacgacgaagaguucugcgacaugcuacgacucuucgacuucaacaaacaagccauccgucgccucaaaaccgaagcccaaaugucgauccaacucaucaacaaggcaguaaacgcccuaaucaacgaccaacucauaaugaagaaccaccuacgcgauaucaugggcauacccuacugcaacuacuccaaguacugguaccucaaccacaccgucacaggcaaaaccucccucccccgaugcuggcuagucuccaacggcucuuaucuaaacgaaacccacuucuccgacgacauagaacaacaagccgauaacaugauuaccgaacuccuacaaaaagaauacaucgaccgccaaggcaagaccccacucggacucgucgaccuauucgucuucucaaccucguucuaccucauuucuauauuccuccaccuaguaaaaauccccacacaccgccaugucgucggcaaacccugccccaaaccccaccgccuaaaccacaugggaauaugcagcugcggccucuacaaacaccccggcguacccgugaaauggaaacgauagggacuagugcaucacauuuaaaagcaucucagccuaccaugagaauaagagaaagaaaaugaagaucaauagcuuauucaucucuuuuucuuuuucguugguguaaagccaacacccugucuaaaaaacauaaauuucuuuaaucauuuugccucuuuucucugugcuucaauuaauaaaaaauggaaagaaccuagaucuaaaaaaaaaaaaaaaaaaaaaaaaaaaaaaaaaaaaaaaaaaaaaaaaaaaaaaaaaaaaaaaaugcaucccccccccccccccccccccccccccccccaaaggcucuuuucagagccaccagaauu

SEQ ID NO: 3289 - RNA, 1855 nt, Artificial Sequence
  mRNA product Design i-2 comprising derived and/or modified sequence from LASV(Lassa virus/H.sapiens-wt/NGA/2015/ISTH_0543;Clade II)__AVO03639__GPC (opt11)
ggggcgcugccuacggagguggcagccaucuccuucucggcaucaagcuuaccaugggccagauuaucacauucuuccaagaagucccccacgucaucgaagaagucaugaacauaguacuaaucgcccugucacuccucgcaauccuaaaagguaucuacaacguugcuaccugcggacucuucggccucguuucauuccuccuccucuguggccgauccugcuccacaacuuauaaaggcgucuacgaacuccaaacacucgaacuugacauggccaaccucaacaugaccaugccacucucaugcaccaaaaacaacucccaccacuacauuauggucggcaacgaaaccggccucgaacuaacucucaccaacacaucaauaaucaaccacaaauucugcaaccuaagcgacgcccacaagaaaaaccuauacgaccacgcccuaauguccaucauaagcaccuuccaccucuccauuccaaacuuuaaccaauacgaagcaauguccugcgacuucaacggaggcaaaaucucaguccaauauaaccucucccacaccuacgccgucgacgcggccaaccacugugguaccaucgccaacggaguccuccaaaccuucaugcgcauggcuuggggcggaagcuacaucgcccuagacuccggcaaaggaucaugggacugcaucaugaccuccuaucaguaucucguaauacaaaacacaacuugggaagaccacugucaauucucccgcccaucgcccaucggcuaccucggccuucuaucccaacgaacaagagacaucuacaucucucgccgacuucuuggcaccuucacauggacccucucagacucagaaggcaacgaaaccccugguggcuacugccucacccgcuggauguugaucgaagccgaacuaaaaugcuucggcaacacagccguugccaaaugcaacgagaaacacgacgaagaguucugcgacaugcuccgccuauucgacuucaacaaacaagccauccgccgccucaaaaccgaagcccagauguccauccagcucaucaacaaagccguaaacgcucuaauaaacgaccaacucaucaugaaaaaccaccuacgcgacaucaugggcauccccuacugcaacuacuccaaauacugguaccuaaaccacaccgucaccgguaaaaccucucuaccacgcugcuggcucgucuccaacggaucauaccucaacgaaacccacuucucagaugacaucgaacaacaagccgacaacaugauaaccgaacuccuacagaaagaauacaucgaucgacagggcaaaacaccccucggccucgucgaccucuucguuuucucaaccuccuucuaccuaaucuccauauuccuccaccucgucaaaauccccacccaucgacacaucaccggcaaaccaugcccaaaaccccaccgacucaaccacaugggcaucugcuccugcgguuuauacaaacacccuggcguccccgucaaauggaaacgguaaggacuagugcaucacauuuaaaagcaucucagccuaccaugagaauaagagaaagaaaaugaagaucaauagcuuauucaucucuuuuucuuuuucguugguguaaagccaacacccugucuaaaaaacauaaauuucuuuaaucauuuugccucuuuucucugugcuucaauuaauaaaaaauggaaagaaccuagaucuaaaaaaaaaaaaaaaaaaaaaaaaaaaaaaaaaaaaaaaaaaaaaaaaaaaaaaaaaaaaaaaaugcaucccccccccccccccccccccccccccccccaaaggcucuuuucagagccaccagaauu

SEQ ID NO: 3290 - RNA, 1855 nt, Artificial Sequence
  mRNA product Design i-2 comprising derived and/or modified sequence from LASV(Lassa virus/H.sapiens-wt/NGA/2016/ISTH_0009;Clade II)__AVO03571__GPC (opt11)
ggggcgcugccuacggagguggcagccaucuccuucucggcaucaagcuuaccaugggccaaaucaucaccuucuuccaagaagucccccacgucauugaagaaguaaugaacauaguccucaucgcccucucacuacuagcuauccuaaagggaaucuacaacgucgccaccuguggccuccucggccucguaucguuccuccuucuuuguggacgauccugcuccaccaccuacaaagguguauacgaacuccaaacccucgaguuagacauggccagccuaaacaugaccaugccccucuccugcaccaaaaauaauucccaccacuacaucauggucggcaacgaaaccggccucgaacucacacucacuaacacauccaucaucaaccacaaauucugcaacuuaucagaugcccacaagaaaaaccucuacgaccacgcacuaaugucaaucaucucaaccuuccaccucagcauccccaacuucaaccaguacgaggcaaugucuugcgacuucaacggcggacgcaucuccguccaauacaaccucucccacagcuaugccgucgacgccgccaaccacugcggcacgaucgccaacggcguccuacaaaccuucaugcgaauggccuggggcgguuccuauaucgcccucgacuccggcaaaggaagcugggacugcaucaugaccucauaccaauaccucauaauccaaaacaccacaugggaagaucacugccaauucucccguccaucccccaucggcuaccucggccuccucucacaacgcacacgcgacaucuacaucucaagacgccuacucggcaccuucacuuggacccucucagacuccgaaggcaacgaaacccccggaggcuacugccuuacccgcuggaugcuaaucgaagccgaacucaaaugcuucggcaacaccgccguagcaaaaugcaacgaaaaacacgacgaagaguucugcgacaugcuccgacuuuucgacuucaacaaacaggccauccgccgccucaaaaccgaagcacaaauguccauccaacucaucaacaaagcaguaaacgcccuuauaaacgaucaacuaaucaugaaaaaccaccuccgcgacaucaugggcauccccuacugcaacuacuccaaauacugguaccuaaaccacaccguaaccggaaaaaccagccuccccagaugcuggcuagucagcaacggaucauaccuuaacgaaacccacuucuccgaugacaucgaacaacaagccgacaacaugaucaccgaacuucuacagaaagaauacaucgaccgccaaggcaaaacgccccucggccuugucgaccucuucgucuucuccaccuccuucuaccucaucagcauauuccuacaccuugucaaaaucccaacccaccgucacaucaccggcaaacccugcccaaaaccccaccgacuaaaccacaugggcaucugcuccugcggccucuacaaccacccaggcguccccgucaaauggaaacguuagggacuagugcaucacauuuaaaagcaucucagccuaccaugagaauaagagaaagaaaaugaagaucaauagcuuauucaucucuuuuucuuuuucguugguguaaagccaacacccugucuaaaaaacauaaauuucuuuaaucauuuugccucuuuucucugugcuucaauuaauaaaaaauggaaagaaccuagaucuaaaaaaaaaaaaaaaaaaaaaaaaaaaaaaaaaaaaaaaaaaaaaaaaaaaaaaaaaaaaaaaaugcaucccccccccccccccccccccccccccccccaaaggcucuuuucagagccaccagaauu

SEQ ID NO: 3291 - RNA, 1855 nt, Artificial Sequence
  mRNA product Design i-2 comprising derived and/or modified sequence from LASV(Lassa virus/H.sapiens-wt/NGA/2016/ISTH_0017;Clade II)__AVO03567__GPC (opt11)
ggggcgcugccuacggagguggcagccaucuccuucucggcaucaagcuuaccaugggccaaauaaucacauuuuuccaagaagucccccacgucaucgaagaagucaugaauaucguccuuaucgcccucagccuccuugcaauccugaaaggcaucuacaacgucgccacaugcggccucuucggccuagucuccuucuuacuccuaugcggacgcuccugcucgacaaccuacaaaggcgucuacgaacuccaaacacuggaacucgacauggccucccuuaacaugaccaugccccuauccugcaccaaaaacaacagccaccauuacauaaugguaggaaacgaaaccggccucgaacuaacacucaccaacaccuccauaauaaaucacaaauucugcaaccucucagacgcccacaagaaaaaccuuuacgaccaugcacucauguccaucauaucaaccuuccaccucuccauacccaauuucaaccaauacgaagccaugucaugcgacuucaauggcggcaaaaucuccguccaguacaaccuuucccacacuuacgccaucgacgccgccaaccacugcggcaccauagccaacggcguacuccaaacauucaugcgcauggcgugggguggcuccuacaucgcacucgacucaggcaaaggaucaugggacugcauaaugaccucauaccaauaccucaucauccaaaacacaaccugggaagaccacugccaauucagccggccaucucccaucggcuaccucggccuacuaagccaacgcacgcgcgacaucuacaucucccgccgccuucuaggcaccuucaccuggacccucucagacuccgaagggaacgaaacgcccggcggauacugccucacccgcuggaugcucaucgaagccgaacucaaaugcuucggcaacacagcagucgccaaaugcaacgaaaaacacgacgaagaguucugcgacaugcuccgccuauucgacuucaacaaacaagcaauacgccgacuuaaaaccgaagcacaaaugucaauccaacuaaucaacaaagcagucaacgcucuaauuaacgaccaacuuaucaugaaaaaccaccuccgagacaucaugggcaucccauacugcaacuacucaaaauacugguaccucaaucacaccgucacgggcaaaaccucccucccacgcugcuggcuagucuccaacggcucauaccucaacgaaacgcacuuuucagaugacaucgaacaacaagcugacaauaugaucaccgaacuccuacaaaaagaauacauggaccgccaaggaaaaacaccccucggacucgucgaucucuucguauucuccaccucauucuaccuaaucuccauauuccuccaccuaguacgaauccccacccaccgccacgucauaggcaaacccugccccaaaccccaccgccuaaaccacaugggcauaugcuccugcggccucuacaaacacccuggcguccccgucaaauggaagcgcugaggacuagugcaucacauuuaaaagcaucucagccuaccaugagaauaagagaaagaaaaugaagaucaauagcuuauucaucucuuuuucuuuuucguugguguaaagccaacacccugucuaaaaaacauaaauuucuuuaaucauuuugccucuuuucucugugcuucaauuaauaaaaaauggaaagaaccuagaucuaaaaaaaaaaaaaaaaaaaaaaaaaaaaaaaaaaaaaaaaaaaaaaaaaaaaaaaaaaaaaaaaugcaucccccccccccccccccccccccccccccccaaaggcucuuuucagagccaccagaauu

SEQ ID NO: 3292 - RNA, 1855 nt, Artificial Sequence
  mRNA product Design i-2 comprising derived and/or modified sequence from LASV(Lassa virus/H.sapiens-wt/NGA/2018/ISTH_0959;Clade II)__AVV65099__GPC (opt11)
ggggcgcugccuacggagguggcagccaucuccuucucggcaucaagcuuaccaugggacaaaucaucaccuucuuccaagaagucccacacguuauagaagaagucaugaacaucguacucaucgcacuuucacuacuugccauccucaaaggaaucuauaacgugguaaccugcggccuauucggccucgucuccuuccuccuccucugcggccgcuccugcuccaccaccuacaaaggagucuacgaacuccaaacccucgagcuugacauggccucacuaaauaugacaaugccacuuucaugcacuaagaacaacucacaccacuacauaauggucggcaacgaaaccggccucgaacugacccucacaaacaccucuaucauaaaccauaaauucugcaaucucuccgacgcacacaagaagaaccucuacgaccacgcucucaugucaauaauauccaccuuccaccucuccauacccaacuucaaccaauacgaagcaauguccugcgacuucaacggcggaaaaaucuccguccaauacaaccuaucccacgccuaugccaucgacgccgccaaucacugcggaacaaucgccaauggaguccuccaaacauucaugcgcauggccuggggcggauccuacaucgcacucgacucaggcaaaggcucaugggacugcauaaugacauccuaccaauaccucaucauccaaaacaccaccugggaagaccacugccaauucucccgccccucgccaaucggcuaccucggacuccucucccagcgcacucgcgacaucuacaucucacgccgccugcuaggcacauucaccuggacccuauccgacuccgaagguaacgaaacccccggcggguauugccuaacucgcuggaugcuaauagaagccgaacuaaaaugcuucgguaacaccgccgucgccaaaugcaacgaaaaacacgacgaagaguucugcgacaugcuccgacucuucgacuucaacaaacaagccauccgccgacuaaagacagaagcacaaaugucaauccagcugaucaacaaagccgugaacgcccuaaucaacgaccaacucaucaugaaaaaccaccuccgagacaucaugggcaucccguacugcaacuacuccaaauacugguaccuuaaccacaccgucacuggaaaaaccucacucccccguugcuggcucguuuccaacggaagcuaucuaaacgaaacccacuucuccgacgacaucgaacaacaagcagacaauaugaucacugaacuccuccaaaaagaauacauagaccgccaaggcaaaaccccacucggccuagucgaccuauucgucuucucuaccuccuucuaucucaucucuaucuuccuccaccuaguuaaaauccccacacaucgacacgucaucggaaaaccaugcccaaaaccccaucgccugaaccauaugggcaucugcucauguggccuauacaaacaccccggcguccccguaaaauggaaacgcuaaggacuagugcaucacauuuaaaagcaucucagccuaccaugagaauaagagaaagaaaaugaagaucaauagcuuauucaucucuuuuucuuuuucguugguguaaagccaacacccugucuaaaaaacauaaauuucuuuaaucauuuugccucuuuucucugugcuucaauuaauaaaaaauggaaagaaccuagaucuaaaaaaaaaaaaaaaaaaaaaaaaaaaaaaaaaaaaaaaaaaaaaaaaaaaaaaaaaaaaaaaaugcaucccccccccccccccccccccccccccccccaaaggcucuuuucagagccaccagaauu

SEQ ID NO: 3293 - RNA, 1855 nt, Artificial Sequence
  mRNA product Design i-2 comprising derived and/or modified sequence from LASV(LASV003-NIG-2008;Clade II)__AIT17580__GPC (opt11)
ggggcgcugccuacggagguggcagccaucuccuucucggcaucaagcuuaccaugggacaaaucauaaccuuuuuccaagaagucccgcacguaaucgaagaagucaugaacauuguccucaucgcccucucacuccuugccauuuuaaaaggcaucuacaacgucgcaaccugcggacuauucggacucgucucuuuccuccuccuaugcggccgcuccugcuccaccaccuacaaaggagucuacgagcuucaaacccucgaacucgacauggccucacucaacaugacaaugccccucagcugcacuaaaaacaacucacaccacuacauaaugguuggaaacgaaaccggccucgaacucacccuaacaaacaccuccauuaucaaccauaaauucugcaaccucuccgacgcccacaaaaagaaccucuacgaccacgcccugaugucuaucaucuccacauuccaccucucaauccccaacuucaaccaauacgaggccauguccugcgacuucaaugguggcaaaaucuccguacaauacaaccucucccacaccuacgcagucgacgccgcaaaccacugcggcaccaucgccaacggaguacuucaaaccuucaugcgaauggccuggggcggcuccuacaucgcccucgacuccggaaaaggcagcugggacugcaucaugaccucauaccaauaccuaaucauccaaaacaccaccugggaagaccacugccaauucagccgcccaucccccaucggcuaccucggccuccucucccaacgcacacgcgacaucuacaucucccgccgccuacucggcaccuucacuuggacccuaucugacagcgaauccaacgaaacuccaggaggcuacugccuaacucgcuggaugcucaucgaagcagaacucaaaugcuucggcaacacugccguagcaaaaugcaacgaaaaacacgacgaagaguucugcgacaugcuccgccuauucgacuucaacaagcaggccauccgccgccucaaagccgaagcucaaauguccauccaacuaaucaacaaagccgucaacgcccucaucaacgaccaacucaucaugaaaaaccaccuccgcgacaucaugggcauccccuacugcaacuacucuaaauacugguaccucaaccacaccguaaccggccgcacaucccucccacgcugcuggcucgucagcaacggauccuaccuaaacgaaacccacuucucagacgacauugaacaacaagcagacaacaugaucaccgaacuccuccaaaaagaauacauggaccgccaagguaaaaccccacucggccuaguggaccuauucgucuucuccaccucauucuaccugauauccaucuuccuccaccucgucaaaauccccacacaccgccacgucaucggcaaacccugccccaaaccccaccgccuaaaccacaugggaauaugcucuugcggccucuacaaacacccaggaguccccguaaaauggaaacgauaaggacuagugcaucacauuuaaaagcaucucagccuaccaugagaauaagagaaagaaaaugaagaucaauagcuuauucaucucuuuuucuuuuucguugguguaaagccaacacccugucuaaaaaacauaaauuucuuuaaucauuuugccucuuuucucugugcuucaauuaauaaaaaauggaaagaaccuagaucuaaaaaaaaaaaaaaaaaaaaaaaaaaaaaaaaaaaaaaaaaaaaaaaaaaaaaaaaaaaaaaaaugcaucccccccccccccccccccccccccccccccaaaggcucuuuucagagccaccagaauu

SEQ ID NO: 3294 - RNA, 1855 nt, Artificial Sequence
  mRNA product Design i-2 comprising derived and/or modified sequence from LASV(LASV035-NIG-2009;Clade II)__AIT17588__GPC (opt11)
ggggcgcugccuacggagguggcagccaucuccuucucggcaucaagcuuaccaugggccaaaucaucaccuucuuccaggaagucccccacgucaucgaagaaguaaugaacauaguccuaaucgcccuaucccuccucgccauucuaaaaggcaucuacaacgucgcaaccugcggacucuucggacucgucuccuuccuucucuuaugcggccgaucaugcuccaccacuuauaaagggguuuacgaacuccaaacccucgaacucgacauggccucccucaacaugaccaugccccuauccugcaccaaaaacaauucacaccacuacaucaugguaggcaacgaaacaggccucgaacucacccucacaaacaccuccaucauaaaccacaaauucugcaaccugucagacgcacacaagaaaaaccuauaugaccacgcacucauguccaucaucuccaccuuccaccucagcaucccaaacuucaaccaauacgaagccaugucaugcgacuucaacggcggcaaaaucuccguacaauacaaccucucccacgccuacgccgucgacgcagcaaaccacugcggaaccaucgccaauggcguccuacaaacauucaugcguauggccuggggcgguuccuacauagcacucgacuccggaaaaggauccugggacugcaucaugaccuccuaccaauaucucaucauccaaaacaccaccugggaagaccacugccaauucucacgcccuucucccauaggcuaccucggccuacuaucgcaacgaacacgcgacaucuacauuucccgacgacuacucggcaccuucacauggacccuuucagauucugaaggcaacgaaaccccaggcggauacugccuaacccgcuggaugcuaaucgaagccgaacuuaaaugcuucggcaauacagccguagccaaaugcaacgaaaaacacgacgaagaguucugcgacaugcuccgccucuucgacuucaacaaacaagcaauccgccgccucaaagccgaagcccaaauguccauccaacucaucaacaaagccgucaacgcccucaucaacgaccaacuuauaaugaaaaaucaccuccgcgacaucaugggaauaccauacuguaacuacuccaaauacugguaccucaaccacacagucaccggcaaaacaucacucccucgcugcugguuagucuccaauggauccuaccucaacgaaacccacuucuccgacgacaucgaacaacaagcagacaacaugaucaccgaacuccugcaaaaagaauacaucgaccgccaaggcaaaacaccacucggccuugucgaccuauucguauucucaaccuccuucuaccugaucuccaucuuccuccaccucguaaaaauaccaacccaccgccacgucauagggaaacccugccccaaaccccaccgccugaaccacaugggaauaugcucaugcggccucuacaaacacccgggcguacccgucaaguggaaacgcuaaggacuagugcaucacauuuaaaagcaucucagccuaccaugagaauaagagaaagaaaaugaagaucaauagcuuauucaucucuuuuucuuuuucguugguguaaagccaacacccugucuaaaaaacauaaauuucuuuaaucauuuugccucuuuucucugugcuucaauuaauaaaaaauggaaagaaccuagaucuaaaaaaaaaaaaaaaaaaaaaaaaaaaaaaaaaaaaaaaaaaaaaaaaaaaaaaaaaaaaaaaaugcaucccccccccccccccccccccccccccccccaaaggcucuuuucagagccaccagaauu

SEQ ID NO: 3295 - RNA, 1855 nt, Artificial Sequence
  mRNA product Design i-2 comprising derived and/or modified sequence from LASV(LASV1000-NIG-2009;Clade II)__AIT17782__GPC (opt11)
ggggcgcugccuacggagguggcagccaucuccuucucggcaucaagcuuaccaugggacaaaucaucaccuucuuccaagaggucccccacgucauagaagaagucaugaacaucguccucaucgcacucucccuccucgccauccugaaaggcauauacaacgucgcgaccugcggccucuucggccucgucucuuuccuccuccucugcggcagaucgugcuccaccaccuacaaaggcgucuacgaacugcaaacccucgagcucgacauggccucccucaacaugacuaugccccuguccuguaccaaaaacaacucccaccauuauaucauggucggcaaugaaaccggacucgaacucacccucacuaacaccucaauaaucaaccacaaauucugcaaccucucagacgcccacaaaaagaaccucuacgaccacgcacuaauguccauaauaucaaccuuccaccucucaauccccaacuucaaccaauacgaggcgauguccugcgacuuuaacggcgggaaaaucuccguccaauacaaccuuucucacaccuacgccgucgacgcagccaaccacugcggcacaaucgccaacggcguccuccaaacauucaugcgaauggccuggggcggcuccuacauugcccucgacuccggcaaaggcuccugggacugcaucaugaccuccuaccaguaccucauaauucaaaacacaacuugggaagaccacugccaauuuucccgcccguccccaauuggauaccucggccuccuuagccaaaggacccgcgacaucuauauuucccgacgccuccucggcacauucaccuggacacuauccgacuccgaaggcaacgaaacccccggcggauacugccuaacccgcuggaugcucaucgaagccgaacucaaaugcuucggaaacaccgccgucgcuaaaugcaacgaaaaacacgacgaggaguucugcgacaugcuccgccuauucgacuucaacaagcaagcuaucaaacggcucaaaaccgaagcgcaaauguccauccaacucaucaacaaagcaguaaacgcccucaucaacgaccaacuaaucaugaagaaccaccuacgcgacaucaugggaauccccuacugcaacuacuccaaauauugguaccuaaaccacaccgucacaggcaaaaccucccuaccccgaugcuggcuaguuagcaacggcucauaccuaaaugaaacccacuucucagacgacaucgaacaacaggcggacaacaugaucaccgaacuccuccaaaaggaauacaucgacaggcaaggaaaaacgccccugggccuagucgaccuauucgucuucuccaccucauucuaccuaauaagcaucuuccuccaccucgucaaaauccccacccaccgacacgucgucggaaaacccugcccaaaaccccaccgacucaaccacauggguaucugcuccugcggccuauacaaacaucccggcguccccguaaaauggaaacgcuaaggacuagugcaucacauuuaaaagcaucucagccuaccaugagaauaagagaaagaaaaugaagaucaauagcuuauucaucucuuuuucuuuuucguugguguaaagccaacacccugucuaaaaaacauaaauuucuuuaaucauuuugccucuuuucucugugcuucaauuaauaaaaaauggaaagaaccuagaucuaaaaaaaaaaaaaaaaaaaaaaaaaaaaaaaaaaaaaaaaaaaaaaaaaaaaaaaaaaaaaaaaugcaucccccccccccccccccccccccccccccccaaaggcucuuuucagagccaccagaauu

SEQ ID NO: 3296 - RNA, 1855 nt, Artificial Sequence
  mRNA product Design i-2 comprising derived and/or modified sequence from LASV(LASV221-NIG-2010;Clade II)__AIT17624__GPC (opt11)
ggggcgcugccuacggagguggcagccaucuccuucucggcaucaagcuuaccaugggacaaaucaucaccuucuuccaggaaguaccacacguaauagaagaagucaugaacaucguucuaaucgcccucucacuacucgcaauacucaaaggcauauacaacgucgcaaccugcggccucuucggccucgucuccuuccuacuccuuugcggccgcuccugcuccacaaccuacaaaggcgucuacgaacuccaaacucucgaacuagacauggcuucccucaacaugaccaugccccuuucuugcaccaaaaacaacucccaccacuacaucauggucggcaacgaaaccggccuagaacucacccuaacaaacaccuccaucaucaaccacaaauucugcaaccucucagaugcccacaaaaagaaccucuacgaucacgccuuaaugaguaucaucuccaccuuccaccuaucaauacccaacuucaaccaguacgaagcaauguccugcgacuucaacggcggaaaaaucucgguccaauacaaccucucccacaccuacgccaucgacgccgcaaaccacugcggcaccaucgccaacggcguucuccaaacauucaugcgcauggccuggggcggcuccuacaucgcccucgacuccggaaaaggaagcugggacugcaucaugaccagcuaccaguaccuaaucauacaaaacaccaccugggaagaucacugccaauuuucucgccccucccccaucggcuaccucggccuacucucccaacgcacucgcgacaucuacaucagcagacgccuccuuggcaccuucaccuggacccuauccgacuccgaagguaacgaaacucccggcggcuacugccucacacgcuggaugcuuaucgaagccgaacucaaaugcuucggaaacacagccguagccaaaugcaacgaaaaacacgacgaagaauuuugcgacaugcuccgccuauucgacuucaacaagcaagccauccgccgcuuaaaaaccgaagcccaaaugucaauccaacucaucaacaaagccgucaacgcccucauaaacgaccaacucaucaugaaaaaccaccuccgugacaucaugggcauccccuacugcaacuacuccaaauacugguaccucaaccacacugucacgggaaaaacaagccuuccccgaugcuggcuagucuccaauggcucuuaccucaacgaaacacacuucucugacgacaucgaacaacaagccgacaacaugaucaccgaaaugcuacaaaaggaauacauggaccgacagggcaaaacaccccucggccucgucgaccucuucguguucucaaccuccuucuaccugaucuccaucuuccuucaccucguaaaaauccccacccacagacacguaaucggaaagccaugcccaaaaccccaccgccuaaaccacaugggaauuugcucaugcggccucuacaaacaccccggcgucccagucaaauggaaacgcuaaggacuagugcaucacauuuaaaagcaucucagccuaccaugagaauaagagaaagaaaaugaagaucaauagcuuauucaucucuuuuucuuuuucguugguguaaagccaacacccugucuaaaaaacauaaauuucuuuaaucauuuugccucuuuucucugugcuucaauuaauaaaaaauggaaagaaccuagaucuaaaaaaaaaaaaaaaaaaaaaaaaaaaaaaaaaaaaaaaaaaaaaaaaaaaaaaaaaaaaaaaaugcaucccccccccccccccccccccccccccccccaaaggcucuuuucagagccaccagaauu

SEQ ID NO: 3297 - RNA, 1855 nt, Artificial Sequence
  mRNA product Design i-2 comprising derived and/or modified sequence from LASV(LASV237-NIG-2010;Clade II)__AIT17638__GPC (opt11)
ggggcgcugccuacggagguggcagccaucuccuucucggcaucaagcuuaccaugggccagaucaucaccuucuuccaagaaguaccccacgucaucgaagaagucaugaacauaguccugaucgcacucucacuccuagccauacucaagggaaucuauaacguagccacaugcggacuauucggucucguaucauuccuacuacucugcggccguuccugcucgaccaccuauaaaggcgucuacgaacuccagacacucgaacucgacauggcaucccucaacaugaccaugccccuaucuugcaccaaaaacaacucccaccacuacaucauggucggaaacgaaaccggacucgaacucacacucaccaacaccucuauaaucaaccacaaauucugcaaccuaucagacgcucacaaaaaagaccucuacgaccacgcacucaugucaaucaucucaaccuuccaccucuccaucccaaacuucaaccaguacgaagccaugucuugcgacuucaauggaggaaaaaucucgguucaguacaaucucagccacaccuacgccgucgacgccgccaaccauugcggaaccaucgcaaacggcguccuacaaaccuucaugcgcauggccuggggcggcuccuacaucgcccucgacuccggcaaaggcuccugggacugcaucaugacuagcuaccaauaucuuaucauacaaaacacaaccugggaagaccacugccaauucucucgacccucaccaaucggcuaccucggacuacucucccagcggacacgcgacaucuacaucagccgccgacuccuaggcacauucaccuggacccuaagcgacagcgaaggcaacgaaacacccggaggcuacugccucacccgcuggaugcucaucgaagccgaacucaaaugcuucggaaacacagcagucgcaaaaugcaacgaaaaacacgacgaagaauucugcgacaugcuccgccucuucgacuucaacaaacaagccauucgcagacucaaaacggaagcccagaugucaauacaacuaauaaacaaagccgucaacgcccuaaucaacgaccaacucaucaugaaaaaccaccuccgcgacaucaugggcauccccuacugcaacuacagcaaauacugguaccucaaccacacagucaccggcaaaaccucacucccacgcuguuggcucgucuccaacgggucauaccucaacgaaacccacuucuccgacgacauugaacaacaagccgacaacaugauaaccgaacuccuccaaaaagaauacauggacagacaaggcaaaacuccccuaggccuagucgaccucuucgucuucagcaccucguucuaccucaucucaauauuccuccaccuaaucaaaauccccacccaccgacacauaaccggcaaacccugucccaaaccacaccgccucaaccacaugggaauaugcucauguggccucuacaaacaccccggcguccccgucaaguggaaacguuaaggacuagugcaucacauuuaaaagcaucucagccuaccaugagaauaagagaaagaaaaugaagaucaauagcuuauucaucucuuuuucuuuuucguugguguaaagccaacacccugucuaaaaaacauaaauuucuuuaaucauuuugccucuuuucucugugcuucaauuaauaaaaaauggaaagaaccuagaucuaaaaaaaaaaaaaaaaaaaaaaaaaaaaaaaaaaaaaaaaaaaaaaaaaaaaaaaaaaaaaaaaugcaucccccccccccccccccccccccccccccccaaaggcucuuuucagagccaccagaauu

SEQ ID NO: 3298 - RNA, 1855 nt, Artificial Sequence
  mRNA product Design i-2 comprising derived and/or modified sequence from LASV(LASV253-NIG-2011;Clade II)__AIT17670__GPC (opt11)
ggggcgcugccuacggagguggcagccaucuccuucucggcaucaagcuuaccaugggacaaaucaucacauucuuucaagaagucccccacgucaucgaagaaguaaugaacauaguccucaucgcacucagccuccucgcaauacucaaagguaucuacaacguggccacuugcggucucuuuggccuagucucauuccuucuucucugcgggcguucaugcuccaccacauacaaaggcgucuacgaacuccaaacccuagaacucgacauggccucccucaacaugaccaugccccucuccugcaccaaaaauaacucccaccacuacaucauggucggcaacgaaaccggccucgaacuaacccucaccaacaccuccaucaucaaccacaaauucugcaaccucuccgacgcacacaagaaaaaccuauacgaccacgcacuaaugucaaucaucucaaccuuccaccucuccauccccaacuucaaccaguacgaagccauguccugcgacuucaauggcggcaaaaucuccguccaauacaaccucucccacaccuacgccgucgacgccgccaaccacugcggcacgauagccaauggaguccuacaaaccuucaugcgcauggccuggggcggcucauauauagcccuagacuccggcaaaggcuccugggacugcaucaugacauccuaccaauaccucaucauucaaaacaccaccugggaagaccauugccaauucucccgacccagccccaucggauaccuaggacuccuaagccagcgcacccgcgacaucuacaucucccgacgccuccuaggaaccuucaccuggacacuauccgacuccgaaggaaacgaaaccccaggcggauacugucucacccgcuggaugcucauagaagccgaacucaaaugcuucggaaauaccgccgucgccaaauguaacgaaaaacaugacgaagaauuuugcgacaugcuccgccucuucgacuucaacaaacaagccauacgccgccucaaggccgaagcccagaugucaauccaacucaucaacaaagccgucaacgcccuaauaaacgaucaacuuaucaugaagaaccaccuacgagacaucaugggaauacccuacugcaacuacuccaaauauugguaucuaaaccauacagucacaggccgcaccucacuaccccgcugcuggcucguauccaacgguucauaccucaacgaaacccacuucagcgacgacaucgaacaacaagcagacaacaugaucaccgaacuucuccaaaaagaauacauagaccgacaaggcaaaacaccccucggccucgucgaccucuucgucuuuuccaccuccuucuaccucaucucaaucuuccugcaccuggucaagaucccaacccaccgacacaucaucggcaaacccugccccaaaccccaccgccucaaccacaugggcaucugcuccugcggccucuacaagcaccccggcguccccguaaaauggaaacgcuaaggacuagugcaucacauuuaaaagcaucucagccuaccaugagaauaagagaaagaaaaugaagaucaauagcuuauucaucucuuuuucuuuuucguugguguaaagccaacacccugucuaaaaaacauaaauuucuuuaaucauuuugccucuuuucucugugcuucaauuaauaaaaaauggaaagaaccuagaucuaaaaaaaaaaaaaaaaaaaaaaaaaaaaaaaaaaaaaaaaaaaaaaaaaaaaaaaaaaaaaaaaugcaucccccccccccccccccccccccccccccccaaaggcucuuuucagagccaccagaauu

SEQ ID NO: 3299 - RNA, 1855 nt, Artificial Sequence
  mRNA product Design i-2 comprising derived and/or modified sequence from LASV(LASV254-NIG-2011;Clade II)__AIT17674__GPC (opt11)
ggggcgcugccuacggagguggcagccaucuccuucucggcaucaagcuuaccaugggccaaauaaucaccuucuuucaagaagucccccauguaaucgaggaagucaugaacaucguacuaaucgcucucucccugcuagccauccuaaaaggcauauacaacgucgccacaugcggacucuucggacucguaucauuccuacuccuuugcggccgcuccugcucaaccaccuacaaaggcgucuacgaacuacaaacccuugagcucgacaugacaaaccucaacaugaccaugccccuaagcugcacuaaaaacaacucccaccacuacaucauggucggcaacgaaaccggacuggaacuuacccucacaaacacauccaucaucaaccacaaauucugcaaccuauccgacgcacacaagaaaaaucuuuacaaccaugcccucauguccaucaucuccacauuccaccuauccauccccaacuucaaccaauacgaggccaugucaugugacuucaacggcggcaaaaucuccguucaauacaaccuuucccacucauacgccguagacgccgccaaccacugcggcaccaucgcuaauggaguccuccaaacauucaugagaauggccuggggcggcuccuacaucgcccuagacuccggcaaaggcaacugggauugcaucaugaccucauaccaauaccucaucauccagaacacaaccugggaggaccacugccaauucucacgccccucucccaucggauaccucggccuacuaagccaacgcacccgggacaucuacaucucacgacgccuacuaggcaccuucaccuggacccucuccgacuccgaaggaaacgaaacacccggcggcuacugccuaacacgcuggaugcucaucgaagcagaacuaaaaugcuuugggaacaccgcaguagccaaauguaacgagaaacacgacgaagaguucugcgacaugcuacgccuguucgauuucaacaaacaggccauccgacgacucaaaaccgaagcacaagccaacauacaacucaucaacaaggccguuaacgcacuuaucaacgaccaacucaucaugaaaaaccaccuucgcgacaucaugggcauccccuacugcaacuacuccaaauacugguaccuaaaccacaccgucacaggaaaaaccucccucccccgcuguuggcuugucuccaacggcucauaucucaacgaaacccacuucuccgacgacaucgaacaacaagccgacaacaugaucacagaacuacuccagaaggaauacauggaccgacaaggcaaaaccccacucggacucgucgaccuauucgucuucucaaccuccuucuaccucauuagcaucuuccuacaucucguaaaaauccccacccaccgccacgucaucggcaaacccugccccaaaccccaucgccucaaccacaugggaaucugcagcugcggccucuacaaacaccccggcguucccgucaaauggaaacgcugaggacuagugcaucacauuuaaaagcaucucagccuaccaugagaauaagagaaagaaaaugaagaucaauagcuuauucaucucuuuuucuuuuucguugguguaaagccaacacccugucuaaaaaacauaaauuucuuuaaucauuuugccucuuuucucugugcuucaauuaauaaaaaauggaaagaaccuagaucuaaaaaaaaaaaaaaaaaaaaaaaaaaaaaaaaaaaaaaaaaaaaaaaaaaaaaaaaaaaaaaaaugcaucccccccccccccccccccccccccccccccaaaggcucuuuucagagccaccagaauu

SEQ ID NO: 3300 - RNA, 1855 nt, Artificial Sequence
  mRNA product Design i-2 comprising derived and/or modified sequence from LASV(Nig08-A19;Clade III)__ADU56618__GPC (opt11)
ggggcgcugccuacggagguggcagccaucuccuucucggcaucaagcuuaccaugggccaaaucgugaccuucuuccaagaaguaccucacgucaucgaagaaguaaugaacauaguccucaucgcccucaguauccucgccauccuaaaaggccuauacaacaucgcuaccugcggccucaucggccucguuaccuuccuccuccugagcgggcgcucaugcuccaugaccuacaaaggcgucuacgaacuccaaacccucgaacuaaacaugaacacacuaaacaugaccaugccccucucgugcaccaagaacaacucccaccacuacauaauggucggaaacgaaacaggccuagaacugacccuuaccaacacaucccuccuccaccacaaauucuguaaccucucagacgcccacaagaaaaaccucuacgaccauacacugaugucaaucauauccaccuuccaccucagcauacccaacuucaaccaauacgaagccaugucaugcgacuucaacggcggcaaaauaaccguccaauacaaccucucacacucauacgccauagacgccgccaaccacugugggaccguagcuaacggaguccuccaaacauucaugcgcauggccuggggaggcucauacauagcccuagacucuggccgcggaaaaugggacugcauaaugacaucauaccaauaccucaucauccaaaacaccaccugggaagaccacugccaauucucacgacccucacccaucggcuaccucggacuccuaucccagcgcaccagagacaucuacauaucccgccgacuccuaggcacauucaccuggacacuaucagacuccgaaggcaacgaaacccccggcggguacugccuaacccgcuggaugcuaaucgaagcagaacucaaaugcuucggcaacaccgccguggccaaaugcaacgaaaaacacgacgaagaguucugcgacaugcuccgacucuucgacuucaacaaacaagcaauccgccgacucaaagccgaagcccaaaugucaauacaacuaaucaacaaagccgucaacgcacuaaucaacgaccaacucaucaugaaaaaccaccuccgugacaucaugggaauccccuacugcaacuauucaaaauauugguaccuaaaccacaccuccaccggacgcaccuccuuaccccgcugcuggcuagucucaaaugguucauaccucaacgaaacccacuucuccgaugacaucgaacaacaagccgacaacaugaucaccgaaaugcugcaaaaagaauaccuugaccgacaaggcaaaacaccccucggacucgucgaccucuucgucuuuucaaccuccuuuuaccucaucucgaucuuucuacaccucgucaaaauccccacccacagacacaucgucggcaagcccugccccaaaccccaccggcuuaaucacaugggaaucugcuccugcggccuuuacaagcaaccaggaguccccguaagauggaaacgauaaggacuagugcaucacauuuaaaagcaucucagccuaccaugagaauaagagaaagaaaaugaagaucaauagcuuauucaucucuuuuucuuuuucguugguguaaagccaacacccugucuaaaaaacauaaauuucuuuaaucauuuugccucuuuucucugugcuucaauuaauaaaaaauggaaagaaccuagaucuaaaaaaaaaaaaaaaaaaaaaaaaaaaaaaaaaaaaaaaaaaaaaaaaaaaaaaaaaaaaaaaaugcaucccccccccccccccccccccccccccccccaaaggcucuuuucagagccaccagaauu

SEQ ID NO: 3301 - RNA, 1858 nt, Artificial Sequence
  mRNA product Design i-2 comprising derived and/or modified sequence from LASV(G1180-SLE-2010;Clade IV)__AIT17168__GPC (opt11)
ggggcgcugccuacggagguggcagccaucuccuucucggcaucaagcuuaccaugggccaaaucguaaccuucuuccaagaagucccccacgucauagaggaggucaugaacaucguccucauagcccucuccauccucgcaguucucaaaggacucuacaacuucgcaaccugcggccuagucggacuccucaccuuucuucuccucugcggccgcuccugcaccgccucccgcuacaaaggugucuacgaacuccaaacacucgaacucaacauggaaacacuaaacaugaccaugccccuauccugcaccaaaaacaauucccaccacuacaucauggugggcaacgaaaccggccucgagcucacgcuaacaaacaccuccaucaucaaccauaaauucugcaaccucuccgacgcucacaagaaaaaccucuacgaccaugcccucaugucaaucaucuccaccuuccaucuauccauccccaacuucaaccaauaugaagccauguccugcgacuucaacggaggcaaaaucuccguacaauacaaccucucccacuccuacgccggagacgccgccaaucacugcggcaccgucgccaacggcguccugcaaacauucaugcguauggccuggggcggcucauacaucgcccucgacuccggccacggcuccugggacugcauaaugacaagcuaccaauaccucaucauacaaaacacaaccugggaagaccacugccaauucagccgaccaucaccaaucgguuaccucggccugcuaucccaacgaacacgcgacaucuacauaucccgacgacugcucggaaccuucaccuggacccugagcgacucugaaggcaaagacacacccggcggcuacugccuaacccgcuggaugcuaaucgaagccgaacucaaaugcuucggaaacacagccguagccaaaugcaacgaaaaacacgacgaagaguucugcgacaugcuccgccuauucgacuucaacaaacaagccauucaacgacuaaaagccgaagcacaaauguccauacaacuaauaaacaaagccgucaacgcccuuaucaacgaccaacucaucaugaaaaaccaccuaagagacauaaugggcauccccuacugcaacuacagcaaauacugguaccucaaccacacgacaacaggaaaaaccucuuuacccaagugcuggcuaguaagcaacgguucauaccucaacgaaacccacuucuccgacgacaucgaacaacaagccgacaacaugaucaccgagaugcuacaaaaagaauacauggaacgacaaggcaaaacaccccucggacucgucgaccucuucgucuucuccaccuccuucuaccuaaucucaaucuuccuacaccuagucaaaauacccacccaccgccacaucgucggaaaauccugcccaaaaccccaucgacucaaccacaugggcaucugcuccuguggccuauacaaacagcccggagucccagucaaguggaaacgauaaggacuagugcaucacauuuaaaagcaucucagccuaccaugagaauaagagaaagaaaaugaagaucaauagcuuauucaucucuuuuucuuuuucguugguguaaagccaacacccugucuaaaaaacauaaauuucuuuaaucauuuugccucuuuucucugugcuucaauuaauaaaaaauggaaagaaccuagaucuaaaaaaaaaaaaaaaaaaaaaaaaaaaaaaaaaaaaaaaaaaaaaaaaaaaaaaaaaaaaaaaaugcaucccccccccccccccccccccccccccccccaaaggcucuuuucagagccaccagaauu

SEQ ID NO: 3302 - RNA, 1858 nt, Artificial Sequence
  mRNA product Design i-2 comprising derived and/or modified sequence from LASV(G1442-SLE-2011;Clade IV)__AIT17180__GPC (opt11)
ggggcgcugccuacggagguggcagccaucuccuucucggcaucaagcuuaccaugggccaaauugucaccuucuuccaagagguaccccacgucaucgaagagguaaugaacaucguccucaucgcccuauccauccucgcuguccuuaaaggccucuacaacguagcaacuugcggccuaauaggucuggucaccuuccuccuccucugcggccgcucuugcacaaccacccucuacaaaggagucuacgagcuccaaacgcuagaacuaaacauggaaacccucaacaugaccaugccacuauccugcaccaaaaauaacucacaccacuacauccgcguaggaaacgaaacuggacucgagcugacacucaccaacaccagcaucauuaaccacaaauucugcaaccucuccgacgcccacaagaaaaaccucuacgaccacgccuuaauguccaucaucuccaccuuccacuuauccauaccaaacuucaaccaguacgaagcaaugucaugcgacuucaacggcggcaaaauauccguccaauacaaccuaucccacuccuacgccggcgacgccgccaaccacugcgguaccgucgccaacggcgugcuccaaacauucaugcggauggcauggggcggcucguacaucgcacucgacuccggacgaggcaacugggacugcaucaugaccuccuaccaauaccuaauaauacaaaacaccaccugggacgaccacugccaauucucacgcccauccccaaucggcuaccuaggacuacucucccaacgcacccgcgacguauacauaucccgccgccuccuggggaccuucaccuggacacucagcgacuccgaaggcaaagauacccccggcggauacugccucacccgcuggaugcucaucgaagccgaacuaaaauguuucggcaacaccgccgucgcaaaauguaacgaaaaacacgacgaagaguucugcgacaugcuccgccuauucgacuucaacaaacaagccauccaacgccuuaaagcagaagcccagauguccauccaacucaucaacaaagcaguaaacgcccuaaucaacgaccaacucaucaugaaaaaccaccuccgugacaucaugggcauaccuuacuguaauuacuccaaguacugguaccucaacaacacagccaccggcaaaaccucccucccaaaaugcuggcucaucuccaacggcucuuaccucaacgaaacccacuucuccgacgacaucgaacaagaagccgacaacaugauaaccgaaaugcuacaaaaagaguacauggaaagacaaggcaaaacaccccuaggccuagucgaccucuucgucuucucuaccucauucuaccucauauccaucuuccuccacuuagucaaaaucccgacccaucgccauauagucggcaaauccugccccaaaccacaccgccuuaaccacaugggcauaugcagcugcggacucuacaaacagcccggcguccccguccgauggaaacgauaaggacuagugcaucacauuuaaaagcaucucagccuaccaugagaauaagagaaagaaaaugaagaucaauagcuuauucaucucuuuuucuuuuucguugguguaaagccaacacccugucuaaaaaacauaaauuucuuuaaucauuuugccucuuuucucugugcuucaauuaauaaaaaauggaaagaaccuagaucuaaaaaaaaaaaaaaaaaaaaaaaaaaaaaaaaaaaaaaaaaaaaaaaaaaaaaaaaaaaaaaaaugcaucccccccccccccccccccccccccccccccaaaggcucuuuucagagccaccagaauu

SEQ ID NO: 3303 - RNA, 1858 nt, Artificial Sequence
  mRNA product Design i-2 comprising derived and/or modified sequence from LASV(G3010-SLE-2013;Clade IV)__AIT17344__GPC (opt11)
ggggcgcugccuacggagguggcagccaucuccuucucggcaucaagcuuaccaugggccaaaucguaaccuuuuuccaagaagucccccauguaaucgaagaagucaugaauaucguccugaucgcccuaucaauccucgccguccucaagggccucuacaacuucgcaaccugcggccucguagggcuaguaaccuuccuccuccucugcggccgcucaugcaccaccucacucuacaaaggcgucuacgaacuacaaacccuagagcuuaacauggaaacccucaacaugaccaugccccuaagcugcaccaaaaacaacucacaccacuacaucauggucggcaacgaaaccggccucgaacucacacucaccaacacaucuaucaucaaccacaaauucugcaaccucuccgacgcacacaaaaagaaccucuacaaccacgcacuaauguccauaaucucaaccuuucaccucuccauccccaacuucaaccaauacgaagcaauguccugugacuuuaacggcggaaagaucucaguacaauacaaccucucccacagcuacgccggcgacgccgccucacacugcggcacgguagccaacggcguccugcaaacguucaugcgcauggccuggggcgguagcuacaucgcccucgacuccggcuacggaaaaugggacugcaucaugaccuccuaccaauaccucaucauccaaaacaccaccugggaagaccacugccaauucucccgccccucccccaucggcuaccucgggcuccuuucccaaagaacccgcgacaucuacaucucccgccgacuccuaggcaccuucacauggacccuaucugacuccgaaggaaaggacaccccagggggauacugccucacccgcuggaugcucauagaagcagaacucaaauguuucggcaacaccgccgucgcaaaaugcaacgaaaaacacgacgaagaguucugcgacaugcucagacucuucgacuucaacaaacaagccauacaacgccucaaaacagaagcccaaauguccauacagcucauuaacaaagccgucaacgcacucaucaacgaucaacuaaucaugaaaaaccaccuccgcgacauuaugggcauccccuacugcaacuacuccaaauacugguaccucaaccacaccacaacgggcaaaacuucacucccaaagugcuggcuuguauccaacggcuccuaccucaacgaaacccacuucagcgacgacaucgaacaacaggccgacaacaugaucacagagaugcugcagaaagaguacauggaacgccaaggcaaaacaccccucggccuggucgaccuuuucguauucagcaccuccuucuauuuaaucuccaucuuccuccaccucgucaaaaucccaacccacagacacaucgucggaaaaucaugccccaaaccccaccgacucaaccacaugggcaucugcuccugcggccucuacaagcaaccgggaguccccguacgauggaaaagaugaggacuagugcaucacauuuaaaagcaucucagccuaccaugagaauaagagaaagaaaaugaagaucaauagcuuauucaucucuuuuucuuuuucguugguguaaagccaacacccugucuaaaaaacauaaauuucuuuaaucauuuugccucuuuucucugugcuucaauuaauaaaaaauggaaagaaccuagaucuaaaaaaaaaaaaaaaaaaaaaaaaaaaaaaaaaaaaaaaaaaaaaaaaaaaaaaaaaaaaaaaaugcaucccccccccccccccccccccccccccccccaaaggcucuuuucagagccaccagaauu

SEQ ID NO: 3304 - RNA, 1858 nt, Artificial Sequence
  mRNA product Design i-2 comprising derived and/or modified sequence from LASV(G502-SLE-2009;Clade IV)__AIT17126__GPC (opt11)
ggggcgcugccuacggagguggcagccaucuccuucucggcaucaagcuuaccaugggacaaaucguuacguucuuccaagaaguaccacacgucaucgaagaaguaaugaacauaguacucaucgcccuauccauccucgccguacuaaaaggccucuacaacuucgcaaccugcggacucgucggccuacucaccuuccugcuccuaugcggucgcuccugcacaacgggacucuauaaaggcgucuacgaacuccaaacacucgaacuuaacauggaaacccuaaacaugaccaugccacucucaugcaccaaaaacaacucccaccacuacaucaugguaggcaacgaaacaggacucgaacugacccucacaaacacguccaucauaaaucacaaauucugcaaccucucagacgcccacaagaaaaaccuauaugaccacgcacuaaugagcaucauaagcacauuccaccucucaauacccaacuucaaccaauacgaagccaugucgugcgacuucaacggcggaaaaauuuccguccaauacaaccuuucccacucauacgccggcgaugcagccgaccacugcggcaccgucgccaacggaguacuccaaaccuucaugcgcauggccuggggcggcagcuacaucgcucucgacagcggacgaggucguugggacugcaucaugacaucuuaccaauaccucaucauccaaaacacaacuugggaagaccacugccaguucucccgcccuucacccaucggauaccucggccuccucucacaacgcacucgagacaucuacaucucccgacgccuacucggaaccuucaccuggacccucucagacuccgaaggaaaagacacccccggcggauacugccucacacgcuggaugcuaaucgaagcagaacucaaaugcuucggcaacacagccguagcaaaaugcaacgaaaaacacgacgaagaguucugcgauauguuacgacucuucgacuuuaacaaacaagccauccaacgacuuaaagccgaagcucaaauguccauacaacuaaucaacaaagccguaaacgcccuaaucaacgaccaacucguaaugaaaaaccaccuccgagacauaaugggaauaccauacugcaacuacucccgcuacugguaccuuaaccauaccaccaccggccgcaccagccuacccaaaugcuggcucguaagcaacggcucauaccucaacgaaacucacuucuccgaugacaucgaacaacaagccgauaacaugauuaccgaaaugcuacaaaaagaauacauggaacgccaaggcaaaacaccucuaggccuagucgaccuauucgucuucucaaccucuuucuaccucaucuccauauuccuccaccuaguaaaaauccccacccaccgccacauagucggcaaguccugccccaaaccccaccgccucaaccacauggguauuugcuccugcgggcuuuacaaacaaccaggcgucccaguaaaauggaaacgcuaaggacuagugcaucacauuuaaaagcaucucagccuaccaugagaauaagagaaagaaaaugaagaucaauagcuuauucaucucuuuuucuuuuucguugguguaaagccaacacccugucuaaaaaacauaaauuucuuuaaucauuuugccucuuuucucugugcuucaauuaauaaaaaauggaaagaaccuagaucuaaaaaaaaaaaaaaaaaaaaaaaaaaaaaaaaaaaaaaaaaaaaaaaaaaaaaaaaaaaaaaaaugcaucccccccccccccccccccccccccccccccaaaggcucuuuucagagccaccagaauu

SEQ ID NO: 3305 - RNA, 1858 nt, Artificial Sequence
  mRNA product Design i-2 comprising derived and/or modified sequence from LASV(G733-SLE-2010;Clade IV)__AIT17154__GPC (opt11)
ggggcgcugccuacggagguggcagccaucuccuucucggcaucaagcuuaccaugggccaaaucgucaccuucuuccaggaagucccccacgucaucgaagaagucaugaacauaguccucauagcccugucaauccucgccguccucaaaggacucuacaacuucgccacuugcggaauagucggccuagucuccuuucuacuucucugcggacgcucaugcacaaccagccuguacaaaggcguauacgaacuccaaacacuugaacugaacauggaaacccucaacaugaccaugccccucuccugcaccaaaaacaacucccaccacuacauaauggucggcaacgaaacaggccuagaacucacccucacaaacaccuccaucaucaaucacaaauucugcaaccuaucagacgcccauaagaaaaaccucuacgaccaugcccucaugagcaucaucucaacauuccaccucuccauccccaacuucaaccaauacgaagccauguccugcgauuucaacgguggcaaaaucagcguacaguacaaccuaucucacucauacgccggcgacgccgccaaccacugcggcaccauagccaacggcguacugcaaacauucaugcgcauggccuggggcggcuccuacaucgcgcucgauucaggccgcgaccgcugggacugcauaaugaccucauaccaguaccuaaucauccaaaacacaaccugggaagaccacugccaauucucccgacccucucccauaggcuaccucggccuucucucccaacgaacccgagacaucuacaucagccgccgacuucucggcaccuucaccuggacccucagcgacuccgaaggcaaagacaccccuggcggcuacugccucacacgguggaugcuaaucgaggccgaacuaaaaugcuucggaaacaccgcaguugccaaaugcaacgaaaaacacgacgaagaguucugugauaugcuccgccucuucgacuucaacaaacaagcuauacaacgccucaaagccgaagcacaaauguccauccaacuaaucaacaaagccgucaaugcccugaucaacgaccaacugaucaugaaaaaccaccuccgggacauaaugggcauccccuacugcaacuacucgaaguacugguaucuuaaccacaccaccaccggaaaaacaagccuccccaaaugcuggcucguauccaacggauccuaccucaacgaaacccacuucucagacgacaucgaacaacaagcggacaacaugauaacugaaaugcuccaaaaagaauacauggaacgccaaggaaagaccccacuaggcuuaguugaccuauucguauucuccaccuccuucuaucucaucuccaucuuccuacaccucgucaaaauccccacccaccgacacguagucggcaaaucaugccccaaaccccaccgccugaaccacaugggcauaugcagcugcggucuuuacggucaacccggaguacccgucaaauggaaacgcuaaggacuagugcaucacauuuaaaagcaucucagccuaccaugagaauaagagaaagaaaaugaagaucaauagcuuauucaucucuuuuucuuuuucguugguguaaagccaacacccugucuaaaaaacauaaauuucuuuaaucauuuugccucuuuucucugugcuucaauuaauaaaaaauggaaagaaccuagaucuaaaaaaaaaaaaaaaaaaaaaaaaaaaaaaaaaaaaaaaaaaaaaaaaaaaaaaaaaaaaaaaaugcaucccccccccccccccccccccccccccccccaaaggcucuuuucagagccaccagaauu

SEQ ID NO: 3306 - RNA, 1858 nt, Artificial Sequence
  mRNA product Design i-2 comprising derived and/or modified sequence from MOPV/LASV reassortant(IGS-1;Clade IV)__AFY05576__GPC (opt11)
ggggcgcugccuacggagguggcagccaucuccuucucggcaucaagcuuaccaugggccaaaucgucaccuucuuccaagagguaccccacgucaucgaagaagucaugaacaucguacucaucgcccuuuccguccucgcaguacuaaaaggacuauacaacuucgccacuugcggccuagucggacucgucaccuuccugcuccuauguggccgcagcugcaccacuucccuuuacaagggcgucuacgaacuccaaacccucgaacucaacauggaaacccucaacaugaccaugccccucuccuguaccaaaaacaacucucaccacuacauaauggucggcaacgaaacuggccucgaacucacacucaccaacacguccaucaucaaccacaaauucugcaaccucagcgacgcccacaaaaagaaccucuacgaucacgcccucauguccauaaucagcaccuuccaccucuccauccccaacuuuaaccaauacgaagcaauguccugcgauuucaacgguggcaaaaucuccguccaauacaaccuaucccacuccuacgccggagacgccgcgaaccacugcggcacagucgccaacggaguccuccaaacauucaugcgaauggccuggggagguagcuacauagcccucgauucaggcagaggcaacugggacugcaucaugaccucauaccaauaccucaucauccaaaacacaacaugggaagaccacugccaauucagccgacccagccccaucgguuaccuaggccuccucucccaacgcacacgagacaucuacaucucacgacgucuacucgguaccuucaccuggacacucuccgacuccgaaggugaagacacccccggcggcuacugccucacccgcuggaugcucaucgaagccgagcucaaaugcuucggaaacaccgccguagcaaaaugcaacgagaaacacgacgaagaguucugcgacaugcuucgccucuucgacuucaacaaacaagccauacaacgccuaaaagccgaagcccaaaugucaauccaacucaucaacaaagcuguaaacgcacuaaucaacgaccaacucaucaugaaaaaucaucuucgcgacaucauggguauccccuacugcaacuacuccaaauacugguaccucaaccacacaaccaccggacgaaccucccucccuaaaugcuggcucguaucaaacggcuccuaccuuaacgaaacccacuucucagacgacauagaacaacaagccgacaacaugaucacagaaaugcuucaaaaagaauacauggaacgccaaggaaaaacuccccuaggucucgucgaccucuucgucuucuccaccagcuucuaccuaaucucgauauuccuacaccuagucaaaauacccacccaccgccacaucguaggcaaaagcugccccaaaccccaccgccucaaccacaugggcauaugcuccugcggccuauacaagcagcccggugucccugucaaauggaaacgcugaggacuagugcaucacauuuaaaagcaucucagccuaccaugagaauaagagaaagaaaaugaagaucaauagcuuauucaucucuuuuucuuuuucguugguguaaagccaacacccugucuaaaaaacauaaauuucuuuaaucauuuugccucuuuucucugugcuucaauuaauaaaaaauggaaagaaccuagaucuaaaaaaaaaaaaaaaaaaaaaaaaaaaaaaaaaaaaaaaaaaaaaaaaaaaaaaaaaaaaaaaaugcaucccccccccccccccccccccccccccccccaaaggcucuuuucagagccaccagaauu

SEQ ID NO: 3307 - RNA, 1858 nt, Artificial Sequence
  mRNA product Design i-2 comprising derived and/or modified sequence from LASV(LM765-SLE-2012;Clade IV)__AIT17814__GPC (opt11)
ggggcgcugccuacggagguggcagccaucuccuucucggcaucaagcuuaccaugggccaaaucgucaccuucuuccaagaaguaccacacgucaucgaagaagucaugaacaucguacucauagcccuaagcauccucgccguacucaaaggacucuacaacuucgcaacuugcggccucgucggccucguaacauuccuucugcucugcggucgaagcugcaccaccucccuauacaaaggcgucuacgaacuccaaacacuagaacucaacauggaaacccucaacaugaccaugccccuaucaugcaccaaaaacaacucccaccacuacaucauggucgguaacgaaacaggccuagaacucacucuaacaaacaccuccaucaucgaucacaaauucugcaaccucucagacgcgcaccggaaaaaccucuacgaccacgcacucauguccaucauauccacguuccaccuuucaauccccaacuucaaccaauacgaagcuaugucaugcgacuucaacggcgguaagauaucaguccaguacaaccucucccacuccuacgccaaggacgccgcagaccacugcggcaccgucgccaacggcguccuccaaaccuucaugcgaauggccuggggcggcuccuauaucgcccucgacucaggccgaggccgcugggacugcaucaugaccagcuaccaauaccucaucauccaaaacacaaccugggaagaccacugccaauucucacgaccaucuccuaucggcuaccuaggcuuacucucccaacgcacccgagacaucuacauaagccgccgccuacuugguacauucaccuggacacuauccgacuccgaaggaaaagacaccccugguggauauugccuaacacgcuggaugcucaucgaagcagagcucaaaugcuucggcaacaccgccguagcaaaaugcaacgaaaaacacgacgaagaguucugcgacaugcuccgccucuucgacuucaacaaacaagccauccaacgccuaaaagccgaagcccaaauguccauacaacucaucaacaaagcagucaacgcccucaucaacgaccagcucaucaugaaaaaccaccuuagagacauaaugggcaucccauacugcaacuacucaaaauauugguaucucaaccacacaaccaccggaaaaaccagccuccccaaaugcuggcucgucaguaauggaucauaccucaacgaaacccacuucuccgacgacauugaacaacaagcagacaauaugaucacugaaaugcuucaaaaagaauacauggaacgacaaggcaaaacuccucucggccucgucgaccucuucgucuucagcaccagcuucuaccucaucucgaucuuccuacaccuugucaaaauccccacacaucgccacaucgucggaaaacccugccccaaaccccaccgccucaaccacaugggaaucugcucaugcggccucuauaaacaacccggcguccccgucaaauggaaacgcuaaggacuagugcaucacauuuaaaagcaucucagccuaccaugagaauaagagaaagaaaaugaagaucaauagcuuauucaucucuuuuucuuuuucguugguguaaagccaacacccugucuaaaaaacauaaauuucuuuaaucauuuugccucuuuucucugugcuucaauuaauaaaaaauggaaagaaccuagaucuaaaaaaaaaaaaaaaaaaaaaaaaaaaaaaaaaaaaaaaaaaaaaaaaaaaaaaaaaaaaaaaaugcaucccccccccccccccccccccccccccccccaaaggcucuuuucagagccaccagaauu

SEQ ID NO: 3308 - RNA, 1858 nt, Artificial Sequence
  mRNA product Design i-2 comprising derived and/or modified sequence from LASV(LM776-SLE-2012;Clade IV)__AIT17824__GPC (opt11)
ggggcgcugccuacggagguggcagccaucuccuucucggcaucaagcuuaccauggggcaaaucgucaccuucuuccaagaaguuccccacgucaucgaagaagucaugaacaucguacuaaucgcccucuccauccucgcaguacuaaaaggacucuacaacuucgccacaugcggccucgucggccucgucacauuccuacuccuaugcggccgcucaugcaccaccuccgucuacaaaggcgucuacgaacuccaaacccucgaacucaacauggaaacccucaacaugaccaugccucucuccugcaccaaaaacaacucccaucacuacaucauggucggcaacgagaccggacuagaacucacacucacaaacaccuccaucaucaaccacaaauucugcaaccuaucugacgcacacaagaaaaaccucuacgaccacgcccucaugucaauuaucuccaccuuccaccuauccauacccaacuucaaccaauacgaagccaugucaugcgacuucaacggcggcaaaaucuccguccaauacaaccucagccacucauacgcuggcgacgccgcuaaccacugcgguaccgucgccaacggcguccugcaaacauucaugcgcauggccuggggcggauccuacaucgcccucgacuccggacacgggaaaugggacugcaucaugacuuccuaccaauaccucauaauacaaaacaccaccugggaagaccacugccaguucucccgaccauccccaaucggauaccucggacuccuaucucaacgcacccgagacaucuacaucagccgacgccuccuuggcaccuucaccuggacccucucagacuccgagggcaaagacaccccgggcggcuacugccucacccgcuggaugcuaauagaagccgaacucaaaugcuucggcaacaccgccguagccaaauguaacgaaaaacacgacgaagaguucugcgauaugcuucgccucuucgacuucaacaaacaagcaauccaacgacucaaagcagaagcacagaugagcauucaacuuaucaauaaagccguaaacgcccugaucaacgaccaacucaucaugaaaaaccaccuucgcgacauaaugggcauccccuacugcaacuacuccaaauacugguacuugaaccacaccaccaccgguaaaacuagccuaccuaaaugcuggcuugucucuaacggauccuaccucaacgaaacacacuucagcgacgacaucgaacaacaagccgauaacaugaucacagaaaugcuccagaaagaguacauggagcgccaaggaaaaaccccgcucggccuagucgaccucuucguauucuccaccagcuucuaucucaucuccauauuccuccaccucgucaaaaucccuacccaccgccacauaguagguaaaucaugcccaaaaccccaccgacucaaccacaugggcaucugcuccugcggccucuacaaacaaccaggcguacccguucgauggaaacgaugaggacuagugcaucacauuuaaaagcaucucagccuaccaugagaauaagagaaagaaaaugaagaucaauagcuuauucaucucuuuuucuuuuucguugguguaaagccaacacccugucuaaaaaacauaaauuucuuuaaucauuuugccucuuuucucugugcuucaauuaauaaaaaauggaaagaaccuagaucuaaaaaaaaaaaaaaaaaaaaaaaaaaaaaaaaaaaaaaaaaaaaaaaaaaaaaaaaaaaaaaaaugcaucccccccccccccccccccccccccccccccaaaggcucuuuucagagccaccagaauu

SEQ ID NO: 3309 - RNA, 1858 nt, Artificial Sequence
  mRNA product Design i-2 comprising derived and/or modified sequence from LASV(Mad39;Clade IV)__ANH09722__GPC (opt11)
ggggcgcugccuacggagguggcagccaucuccuucucggcaucaagcuuaccaugggccaaaucguaacuuucuuccaagaagucccccacguaauugaagaagugaugaacaucguccucaucgcccucuccauccuagccguacugaagggccucuacaacguagcaacgugcggccucaucggccucgucaccuuccuacugcucugcggaagaucaugcaccaccacccucuacaagggagucuacgaacuccaagcccucgaacucaauauggaaacccuaaacaugaccaugccacuauccugcaccaaaaacaacagccaccacuacauucgcgucgguaacgaaacaggccucgaacuaacccuuaccaacaccucccucaucaaccacaaauuuugcaaucugucugacgcacacaagaaaaaccucuacgaccacgcacucaugucaaucaucuccacauuccaccuauccauaccaaacuucaaccaguacgaggcaauguccugcgacuuuaacgauggcaaaaucucaguccaauauaaccucucccacaccuacgccggagacacagccaaccacugcggaaccgucgcaaauggcguacuccaaacuuucaugcgaauggccuggggcggauccuacauagcccuagacuccggacgcggagguugggacuguaucaugaccuccuaucaauaccuaaucauacagaacaccaccugggaagaccacugccaauucucacgacccucuccgaucggcuaccucggccuccuaucacaacgaacccgggacauauacaucucacgccgacuauuaggcacguucaccuggacacucucagacucagaaggaaaagauacccccggaggcuacugccugacccgauggaugcucaucgaagcagaacucaaaugcuucggaaacaccgccguugccaaaugcaacgaaaaacacgacgaagaguucugcgacaugcuccgacuauuugacuucaacaaacaagccauccagcgccucaaagccgaagcccagaugucaauccaacuaauaaacaaagcagucaacgcccucaucaacgaccaacucaucaugaaaaaccaccuacgcgacauaaugggcaucccauacugcaacuacuccaaauacugguaccuaaaccacaccguaaccgguaaaacaucacuuccuaaaugcuggcucgucuccaacggaagcuaccuaaacgaaacacacuucucagacgacaucgaacaacaagcagacaacaugauuacagaaaugcuccaaaaagaauacauggaacgacaaggcaagacaccacucggccucgucgaccucuucgucuucagcaccucauucuaccucaucuccaucuuccuucaccucgugaagauacccacccaccgucacgucguagguaaacccugcccaaaaccccaccgacucaaccacaugggaauaugcuccugcggcuucuacaaacaacccggcguucccguccgauggaaacgcuaaggacuagugcaucacauuuaaaagcaucucagccuaccaugagaauaagagaaagaaaaugaagaucaauagcuuauucaucucuuuuucuuuuucguugguguaaagccaacacccugucuaaaaaacauaaauuucuuuaaucauuuugccucuuuucucugugcuucaauuaauaaaaaauggaaagaaccuagaucuaaaaaaaaaaaaaaaaaaaaaaaaaaaaaaaaaaaaaaaaaaaaaaaaaaaaaaaaaaaaaaaaugcaucccccccccccccccccccccccccccccccaaaggcucuuuucagagccaccagaauu

SEQ ID NO: 3310 - RNA, 1858 nt, Artificial Sequence
  mRNA product Design i-2 comprising derived and/or modified sequence from LASV(Z0947-SLE-2011;Clade IV)__AIT17840__GPC (opt11)
ggggcgcugccuacggagguggcagccaucuccuucucggcaucaagcuuaccaugggccaaauugucaccuucuuccaggaagucccucacgucaucgaagaagucaugaacaucguacugaucgcacucucgauccucgcuguccugaaaggccuauacaacuucgcaaccugcggacucgucggacucguaacauuucuccuccucuguggccgaucuugcacaaucucccuauacaaaggcgucuacgaacuucaaacccuagaacuaaauauggaaacccucaacaugacaaugccccucuccugcacuaaaaacaacucacaccacuacauaaugguagguaacgaaaccggccucgaacucacccucaccaacaccuccaucaucaaccacaaauucugcaaccuuuccgacgcccacaagaaaaaccuauacgaccacgcccucaugucaauaaucuccacauuccaccucuccauccccaauuucaaccaauacgaagccaugucaugcgacuucaacgguggaaaaauauccguacaauacaaccucucccacuccuacgccggcgacgcugccaaccacugcggcacagucgccaacggcguccuccaaaccuucaugagaauggcguggggcggcuccuacauagcccucgacagcggccgugaccgcugggacugcaucaugacuuccuaccaguaccucaucauccaaaauacgacaugggaagaccacugccaauucucccgcccgucccccaucggcuaccuuggccuccuaucacaaagaacacgcgacaucuacaucucccgccgccuccuggguaccuucacauggacccucuccgacagcgaaggcaaagacacccccggcggcuacugccucacccgauggaugcucaucgaagcagaacucaaaugcuucggcaauaccgccgucgccaaaugcaacgaaaaacacgacgaagaauuuugcgacaugcucagacucuucgacuucaacaaacaagcgauccaacggcuaaaagccgaagcccaaaugucuauccaacuaauaaacaaagccgucaacgcacuaauaaacgaccaacuaaucaugaaaaaccaucuacgugacaucaugggcaucccauacugcaacuacuccaaauauugguaccuaaaccacacaacaaccggaaaaaccucacuuccuaaaugcuggcucgucuccaauggcuccuaccucaacgaaacucacuucucugacgacaucgaacaacaagccgacaacaugauuacagaaaugcuccaaaaagaauauauggaacgccaaggaaaaaccccacucggccuaguagacuuauucgucuucuccaccagcuucuaccucaucucaaucuuccuccaccucgucaaaauccccacacaccgccacaucgucggcaaacccugccccaaaccccaccgccugaaccacaugggcaucugcagcugcggccucuacaaacaacccgguguuccaguaaaguggaaacgauagggacuagugcaucacauuuaaaagcaucucagccuaccaugagaauaagagaaagaaaaugaagaucaauagcuuauucaucucuuuuucuuuuucguugguguaaagccaacacccugucuaaaaaacauaaauuucuuuaaucauuuugccucuuuucucugugcuucaauuaauaaaaaauggaaagaaccuagaucuaaaaaaaaaaaaaaaaaaaaaaaaaaaaaaaaaaaaaaaaaaaaaaaaaaaaaaaaaaaaaaaaugcaucccccccccccccccccccccccccccccccaaaggcucuuuucagagccaccagaauu

SEQ ID NO: 3311 - RNA, 1693 nt, Artificial Sequence
  mRNA product Design i-3 comprising derived and/or modified sequence from LASV(Josiah;Clade IV)__NP_694870__GPC (wt)
gggagaaagcuuaccaugggacaaauagugacauucuuccaggaagugccucauguaauagaagaggugaugaacauuguucucauugcacugucuguacuagcagugcugaaaggucuguacaauuuugcaacguguggccuuguugguuuggucacuuuccuccuguugugugguaggucuugcacaaccagucuuuauaaagggguuuaugagcuucagacucuggaacuaaacauggagacacucaauaugaccaugccucucuccugcacaaagaacaacagucaucauuauauaauggugggcaaugagacaggacuagaacugaccuugaccaacacgagcauuauuaaucacaaauuuugcaaucugucugaugcccacaaaaagaaccucuaugaccacgcucuuaugagcauaaucucaacuuuccacuuguccauccccaacuucaaucaguaugaggcaaugagcugcgauuuuaaugggggaaagauuagugugcaguacaaccugagucacagcuaugcuggggaugcagccaaccauugugguacuguugcaaaugguguguuacagacuuuuaugaggauggcuuggggugggagcuacauugcucuugacucaggccguggcaacugggacuguauuaugacuaguuaucaauaucugauaauccaaaauacaaccugggaagaucacugccaauucucgagaccaucucccaucgguuaucucgggcuccucucacaaaggacuagagauauuuauauuaguagaagauugcuaggcacauucacauggacacugucagauucugaagguaaagacacaccagggggauauugucugaccagguggaugcuaauugaggcugaacuaaaaugcuucgggaacacagcuguggcaaaauguaaugagaagcaugaugaggaauuuugugacaugcugaggcuguuugacuucaacaaacaagccauucaaagguugaaagcugaagcacaaaugagcauucaguugaucaacaaagcaguaaaugcuuugauaaaugaccaacuuauaaugaagaaccaucuacgggacaucaugggaauuccauacuguaauuacagcaaguauugguaccucaaccacacaacuacugggagaacaucacugcccaaauguuggcuuguaucaaaugguucauacuugaacgagacccacuuuucugaugauauugaacaacaagcugacaauaugaucacugagauguuacagaaggaguauauggagaggcaggggaagacaccauugggucuaguugaccucuuuguguucaguacaaguuucuaucuuauuagcaucuuccuucaccuagucaaaauaccaacucauaggcauauuguaggcaagucgugucccaaaccucacagauugaaucauaugggcauuuguuccuguggacucuacaaacagccuggugugccugugaaauggaagagaugaggacuaguuauaagacugacuagcccgaugggccucccaacgggcccuccuccccuccuugcaccgagauuaauaaaaaaaaaaaaaaaaaaaaaaaaaaaaaaaaaaaaaaaaaaaaaaaaaaaaaaaaaaaaaaaaugcaucccccccccccccccccccccccccccccccaaaggcucuuuucagagccaccagaauu

SEQ ID NO: 3312 - RNA, 1690 nt, Artificial Sequence
  mRNA product Design i-3 comprising derived and/or modified sequence from LASV(LP;Clade I)__AAF86701__GPC (wt)
gggagaaagcuuaccauggggcagauuauuacauucuuucaagaagugccacauguaauagaggaagucaugaacauugugcuaauugcgcuuucucuauuggcaaucuugaagggcuuguauaacaucgcuacaugugggauuauuggauugguugccuuuuuauucuuguguggcaagucuuguucccuaacccuuaaagggggauaugagcugcaaaccuuagaauuaaauauggagacccuaaacaugaccaugcccuuaucaugcaccaagaacagcagucaucauuacauaagagugggcaaugagacuggauuagaauugacuuuaacuaacaccagcauuauaaaucacaaauuuugcaacuuauccgaugcucacaaaaagaaucuuuaugaucaugcucucaugagcaucaucucaacauuccaucuauccauuccaaacuucaaucaguaugaagccaugaguugugauuucaauggagggaaaaucagugugcaauacaaccucucucauuccuaugcuggggaugcggccgaacacugugggacaguugccaacggaguguugcaaacauuuaugagaauggccugggguggaagauacauugcauuagacucaggaaagggaaacugggacuguauaaugaccagcuaccaguaccugauaauucaaaauacaacaugggaggaccacugccaauucucaagaccgucuccuaucggguaccuuggccuuuugucacaaaggacaagagauauauauauaaguaggaggcucuuggggaccuucaccuggacauugucagauucugagggcaaugaaacaccaggugguuauuguuuaaccagguggaugcuaauugaagcagaacucaaguguuuugggaauacagcuguggcaaaaugcaaugagaagcaugaugaggaguuuugugacaugcugagauuguuugauuucaacaagcaagcaauccguagguugaaggcugaggcccagaugaguauucaauuaauaaauaaagccgugaaugccuuaaucaaugaucaauuaaucaugaagaaccauuuaagagacaucaugggcauucccuacugcaauuacagcaaguauugguaccuuaaucauacuaguagcgggagaacaucacuaccaaaguguuggcuuauauccaaugggucauaucuaaaugaaacccaguucucugaugacauagaacagcaagccgacaauaugaucacagagaugcuucagaaagaauacauugaaagacaagggaaaacgcccuugggacuaguggacauuuucaucuuuagcacaagcuuuuaucugaucagcauuuucuugcauuuaauuaaaaucccuacacaucgacacaucguugggaaacccugucccaaaccccauagacuaaaucacaugggaguauguuccuguggacuguacaaacacccugguguuccaacaaaguggaagagauagggacuaguuauaagacugacuagcccgaugggccucccaacgggcccuccuccccuccuugcaccgagauuaauaaaaaaaaaaaaaaaaaaaaaaaaaaaaaaaaaaaaaaaaaaaaaaaaaaaaaaaaaaaaaaaaugcaucccccccccccccccccccccccccccccccaaaggcucuuuucagagccaccagaauu

SEQ ID NO: 3313 - RNA, 1690 nt, Artificial Sequence
  mRNA product Design i-3 comprising derived and/or modified sequence from LASV(803213;Clade II)__AAF86703__GPC (wt)
gggagaaagcuuaccauggggcaaaucauaacauucuuccaagaggugccucaugucauagaggaggucaugaacauuguccuaauugcccucagucuccuggcgauacuaaaggggauuuacaauguugcuaccuguggucucuuuggguugaucuccuuucuucucuuauguggcagaucauguucaguaaccuauaaagguguuuaugagcuacaaacucuagaacugaacauggcaaaccuuaauaugacgaugcccuugucuuguacgaagaacaacagccaucauuacaucaugguuggaaaugaaacaggccuagagcugaccuuaacaaacacaagcaucauuaaccacaaguuuugcaaccuuucugaugcacauaaaaagaaucucuaugaccaugcucugaugagcaucaucucaacuuuccacuuaucuauuccaaacuuuaaucaguaugaagcaaugaguugugacuucaauggagggaaaauaaguguucaguacaaccucagucacuccuuugcuguggaugcagccaaccacugugggaccauugccaaugguguucugcagaccuuuaugaggauggcuugggguggcaguuacauagcacuugauuccggaaaagggaacugggauuguauaaugacuuccuaucaauacuugauaauucaaaacaccacuugggaagaucacugccaguuuucucgcccaucuccuauugguuacuuaggacuauugucacagagaacuagagauaucuauaucagucgaagacuucucggaacuuucacuuggacccuuucugauucugaagguaaugaagcaccugguggguauugucuaacuagauggauguuaauugaagcagaacugaaaugcuuugggaacacagcaguugcaaagugcaacgaaaaacaugaugaagaauuuugugacauguugagauuguuugauuucaacaaacaagcuauaaagaggcugaaaacagaagcacagaugaguauucagcugauaaacaaggcagugaaugcauuaaucaaugaccaacugauuaugaagaaccaucuaagggacaucaugggaauuccuuauugcaacuacaguagauauugguaucuaaaucacacugugacagggaagacaucacugccaagauguuggcuugugucaaaugguuccuaccuaaacgaaacacauuuuucugaugacauugaacaacaagcagacaacaugauaacagaaauguugcagaaagaguacauggacaggcaggggaaaacaccuuuaggguuaguggaccuuuuugucuuuagcacuagcuuuuaccucauaagcaucuuucuccaucuggucaagaucccaacucacaggcacaucguggggaaaccuugcccuaagccacacagacucaaccacaugggcaucugcucauguggucuguauaaacaucccgguguuccaguaaaauggaagagauaaggacuaguuauaagacugacuagcccgaugggccucccaacgggcccuccuccccuccuugcaccgagauuaauaaaaaaaaaaaaaaaaaaaaaaaaaaaaaaaaaaaaaaaaaaaaaaaaaaaaaaaaaaaaaaaaugcaucccccccccccccccccccccccccccccccaaaggcucuuuucagagccaccagaauu

SEQ ID NO: 3314 - RNA, 1690 nt, Artificial Sequence
  mRNA product Design i-3 comprising derived and/or modified sequence from LASV(GA391;Clade III)__CAA36645__GPC (wt)
gggagaaagcuuaccaugggacagauugugacauucuuccaagaaguuccucauguuauugaggaagugaugaauauuguccuuauugcacuauccauccuagcaauucugaagggacuauacaauguugccacguguggcuugauagggcuugucacauuccuucuacuuucaggaaggucaugcucacugaucuacaaagggacuuacgagcugcaaacccuugaguugaauauggagacucuuaauaugaccaugccgcuauccugcacaaagaacaacagucaucauuauauaaggguggggaaugagacaggacuugagcucaccuugaccaacaccagcauucuuaaucacaaauucuguaaccucucugaugcccacaaaaggaaucuuuaugaucacagccucaugaguaucaucucuaccuuucaucuguccauucccaacuucaaucaauaugaggcaaugagcugcgauuucaauggggggaaaaucacugugcaauacaaccugagucauagcuucgcaguggaugcagcaggucacugcggcacacuugcaaauggugucuuacaaacauuuaugagaauggcuuggggagggaguuauauugcucuugauucuggacgcgguaacugggacuguauaaugaccaguuaccaauaucuaaucauucagaauacaaccugggaugaccacugccaauuuuccagaccaucaccuauuggcuaccuugggcuucucucacaaagaacuagagacauauacauuagcagaagguuguuggggacauucaccuggacacuaucagacucagagggaaaugaaacaccagggggauacugccuuacuagauggauguugauugaggccgaauuaaagugcuuuggaaacacugcaguagccaagugcaaugagaaacaugaugaagaauuuugugacaugcuaagguuguucgauuucaacaaacaggccauaaggaggcucaaaacagaggcccaaaugagcauacagcugaucaacaaggcugucaaugcuuuaauaaaugaucagcucaucaugaagaaccacuugagagacaucaugggcauaccauauuguaacuacagcagauauugguaccuuaaccacacaucaacaggaaagaccucacuaccaagguguuggcuuaucucaaauggaucauaucucaaugagaccaaguuuucagaugacaucgaacaacaagcugacaacaugauaacagagaugcuacaaaaggaauacauagauagacagggcaaaacuccacugggguuaguugaccuauuuguuuuuagcacaaguuucuaucugauaagcaucuuucuccaccuggucaaaauaccaacccauagacacauuguagguaaaccuugcccaaaaccccacaggcugaaccacaugggcaucugcuccuguggucuauacaaacagccaggugugccugucagauggaagaggugaggacuaguuauaagacugacuagcccgaugggccucccaacgggcccuccuccccuccuugcaccgagauuaauaaaaaaaaaaaaaaaaaaaaaaaaaaaaaaaaaaaaaaaaaaaaaaaaaaaaaaaaaaaaaaaaugcaucccccccccccccccccccccccccccccccaaaggcucuuuucagagccaccagaauu

SEQ ID NO: 3315 - RNA, 1693 nt, Artificial Sequence
  mRNA product Design i-3 comprising derived and/or modified sequence from LASV(AV;Clade V)__CCA30314__GPC (wt)
gggagaaagcuuaccauggggcaaauagugacauucuuucaagaggugccucaugugauagaagaggugaugaacauuguucuuauagcauugucuauauuggcaguguugaaaggucucuacaacauugccacaugcggccucaucggcuugaucacuuuccucuuauuauguggaaggucuugcucauccaaccucuacaagggggucuaugaacuucaaucucuggaccugaacauggagacacucaacaugaccaugccccucuccugcacaaagaacaauagucaucacuacauaaggguuggcaaugacacagggcuggaacugaccuugaccaacacgagcauacucaaucacaaauucugcaaccuaucagaugcucacaagaaagaccuauaugaucacgcacucaugagcauaaucucaacuuuccaccugucuauacccaauuucaaccaauacgaagcaaugaguugugacuucaaugggggcaaaaucagugugcaguacaaucuaagccauucuuaugcuauagaugcagcuaaucauugcggcacagucgcgaauggcaucuugcagacuuucaugagaauggcauggggugggagcuauauugcucuugacucaggccguggaaacugggacuguauuaugacuagcuaucaauaucugauuauucagaacacaaccugggaaaaucacugucaguucucaagaccaucuccuauugguuaucuuggucuccucucacagaggacuagagacauuuacauuagcaggagguugcugggcacauucacguggacacugucagacucugaggguaaugcuacaccaggagguuauugucugaccagguggauguuaauugaagcugaguugaaaugcuuuggaaacacagcaguagcaaaguguaaugaaaagcaugaugaagaauuuugcgacaugcucagacuuuuugauuuuaauaagcaggcuauaaguagauugaaaucugaagcacaaaugagcauccaacugaucaacaaagcagugaaugcuuugaucaacgaucaauuaauuaugaagaaccacuugcgagacaucauggggauuccauauuguaauuacagcaaguauugguaccucaaucauacaauaacuggcaaaaccucauuaccuaaauguuggcuuguaucuaaugguucauacuugaaugaaacccauuuuucugacgacaucgagcaacaagcugacaauaugaucacagagaugcuacaaaaggaauacauggagaggcaagggaaaacgccuuuggguuuaguugaucuguuuguguuuagcacaaguuuuuaucuaauuaguaucuuccuccgacuagucaagauuccaacccauagacacauugugggcaaaccauguccuaagccccacagguugaaccacaugggcauuuguucuugcggcuuauacaagcagccuggcguccccgugagauggaagagauagggacuaguuauaagacugacuagcccgaugggccucccaacgggcccuccuccccuccuugcaccgagauuaauaaaaaaaaaaaaaaaaaaaaaaaaaaaaaaaaaaaaaaaaaaaaaaaaaaaaaaaaaaaaaaaaugcaucccccccccccccccccccccccccccccccaaaggcucuuuucagagccaccagaauu

SEQ ID NO: 3316 - RNA, 1690 nt, Artificial Sequence
  mRNA product Design i-3 comprising derived and/or modified sequence from LASV(Togo/2016/7082;Clade VI)__AMR44577__GPC (wt)
gggagaaagcuuaccauggggcaaauaauaaccuucuuccaggagguuccucauguuauagaggaggugaugaacauuguucugauagcacucucacuccuagcuauccugaaaggggucuacaauguggcaacaugugggauaauugggcuugugaccuuccucuuucucuguggaagaucuuguucacugaucuacaaaggcaguuaugagcugcaaacauuggaguuaaauauggagacccuaaacaugaccaugccucugucaugcacuaaaaauaguagccaccauuauauucgaguugggaacgagacuggcuuagagcugacauugaccaacaccagcauuauaaaucacaaauucuguaaccugucagaugcucacaaacguaaucuguaugaccacgcacucaugagcauccuuuccacauuccaucuguccaucccaaacuucaaccaguaugaggcgaugaguugugacuucaauggaggcaaaaucagugugcaauauaaucucagccaugcuuaugcaguugaugcugccgaacacugcggaacaguugcaaauggugugcuacaaacauucaugaggauggcuuggggaggaaguuacauugcacuugacucugggagaggcaauugggacuguauuaugacaagcuaccaauacuuaaucauucagaauacaacaugggaagaucacugccaauuuucaagaccuucuccuauugguuaucucggcuuauugucacaaagaacaagagacauuuauaucaguaggaggcugcuggguacauucaccuggacacuuucugacucagagggaaaugagacaccaggcggauacuguuuaacaagauggaugcugauagaggcugagcuaaaauguuuuggaaacacagcuguugcaaaguguaaugagaagcaugaugaggaauucugcgacauguuaagguuguuugacuucaacaaacaggcaauucagaggcucaaaucagaggcacaaaugagcauccaguuaauaaauaaagcagugaaugcauugauaaaugaucagcucauuaugaagaaccacuuaagggauaugauggguauaccguauugcaacuacaguaaguauugguaucucaaucacaccucaucagggagaacaucguugccuaaaugcuggcuuguuuccaauggaaguuaucugaaugagacccacuucucagaugauauugaacaacaggcagacaacaugauaacugaaauguuacaaaaggaauauaucgauaggcaggguaaaacaccuuuaggacuuguugaccuuuuuguuuucagcacgaguuuuuaccuuauaaguauauucuuacacuugauaaagauaccuacucauaggcacauaguuggaaagccaugccccaagccacaccgccucaaccacauggggaucugcucuuguggacuauacaagcagccuggugucccaaccagauggaagagauaaggacuaguuauaagacugacuagcccgaugggccucccaacgggcccuccuccccuccuugcaccgagauuaauaaaaaaaaaaaaaaaaaaaaaaaaaaaaaaaaaaaaaaaaaaaaaaaaaaaaaaaaaaaaaaaaugcaucccccccccccccccccccccccccccccccaaaggcucuuuucagagccaccagaauu

SEQ ID NO: 3317 - RNA, 1690 nt, Artificial Sequence
  mRNA product Design i-3 comprising derived and/or modified sequence from LASV(KAK-428;Clade n.d. (VII))__ANH09740__GPC (wt)
gggagaaagcuuaccaugggucaaauagugaccuucuuccaggaaguaccucauguuauagaggaagugaugaacauaguucugauagcacuuucucucuuagccauccugaagggccucuacaauuuugccaccuguggaguaauuggacugauaacauuccuuuuacuuuguggaagauccuguucagcgaccuacaaaggccaauaugaacuccaaacuuuagaacuaaauauggagucccuaaacaugaccaugccacugucuugcacaaaaaacaacagucaucauuauaucagagcuggcaacaacacaggccuggaguugacccucaccaacaccagcauuauaucucauaaauucugcaaccuuucugaugcucacaagaagaaccuuuaugaccacacucuuaugaguauaauaacuaccuuucauuuguccaucccaaauuucaaccaguaugaggcaaugaguugugacuuuaacggugggaaaaucagcauacaguacaaccucagucacuccuacgcuggugaugcugcgcaacacuguggaacaguugcaaauggggugcugcaaaccuuuaugagaauggcuuggggagguaguuaucuggcccuugauucaggaagaagagguugggacugcauaauuuccaguuaccaauacuugaucauccaaaacacaacuugggaugaccauugccaguuuucaaggccauccccgaucggguaucuuggguuuguaucgcagaagaccagggacaucuauauaaguagaagacuccuuggaacuuuuacauggacacuuucagacuccgagggacaugacaugccaggugguuacugcuugaccagauggaugcucauugaagcugauuuaaaguguuuuggaaacacagcugucgcuaaguguaaugagaaacaugacgaggaguucugugacauguggagguuguuugacuuuaauaagcaagccauucaaaggcucaaagcagaggcccagaugaacauccagcucauaaauaaagcugucaaugcucucauaaaugaccaauugaugaugaaaaaccauuuaagggauaucaugggcauucccuauugcaauuacaguaaauucugguaucucaauaacaccacgacugggagaaccucacugccaagaugcuggcugauuucaaauggguccuacuuaaaugagacucacuucucagaugauauugaacagcaagcugacaauaugauaacugagauguugcagaaagaauacauggacagacaaggaaaaacaccgcuaggacugguugaucucuuuguauucaguacaagcuuuuaccucauuaccauuuucuuacaucuugugaaaauaccaacccacagacacauaguuggcaagccgugcccuaaaccacacagacugaaucacaugggcaucugcuccugugggcucuacaaacagccuggugugccaguacgauggaagagaugaggacuaguuauaagacugacuagcccgaugggccucccaacgggcccuccuccccuccuugcaccgagauuaauaaaaaaaaaaaaaaaaaaaaaaaaaaaaaaaaaaaaaaaaaaaaaaaaaaaaaaaaaaaaaaaaugcaucccccccccccccccccccccccccccccccaaaggcucuuuucagagccaccagaauu

SEQ ID NO: 3318 - RNA, 1690 nt, Artificial Sequence; identical to SEQ ID NO: 3312
  mRNA product Design i-3 comprising derived and/or modified sequence from LASV(Pinneo-NIG-1969;Clade I)__AIT17836__GPC (wt)

SEQ ID NO: 3319 - RNA, 1690 nt, Artificial Sequence
  mRNA product Design i-3 comprising derived and/or modified sequence from LASV(ISTH0009-NIG-2011;Clade II)__AIT17404__GPC (wt)
gggagaaagcuuaccaugggacaaaucauaacauuuuuccaggaaguaccucaugucauagaggaagugaugaacauuguccugauugcucucagccuucuggcaauacugaaggggaucuacaauguugccaccuguggccuauuuggacugguguccuuucuccucuuaugugggagaucaugcucaacaacuuauaaggguguuuaugagcuacaaacucuagagcuggacauggcaagccuuaauaugacaaugccccuaucuugcacaaagaacaacagucaccauuacaucauggucggaaaugagacuggcuuggagcugacuuuaacaaauacaaguauuaucaaccacaaguuuuguaaccuuucugaugcacauaaaaagaaucucuaugaccaugcuuuaaugaguaucaucucaaccuuccacuuaucuauuccuaauuuuaaucaguaugaagcaaugaguugugacuucaauggggggaagauaaguguucaguacaaccuuagccacgcuuaugcuguagaugcagccaaucacugugggacuaucgccaauggcguucuucagacuuuuaugaggauggcuugggguggcaguuacauagcacuugauuccggaaaggggaguugggauuguauaaugacuuccuaccaauauuugauaauccagaacaccacuugggaagaucacugccaguuuucucgcccauccccuaucgguuaucuggggcuacugucacaaaggaccagagacauuuacaucagucgaagacuucuugggacuuuuacuuggacucucucugauucugaagguaaugaaacaccggguggguacugucuaacaagauggaugcugauugaggccgaguugaagugcuuugggaacacagcaguugcgaaaugcaaugagaaacaugaugaagaguuuugugacauguuaagacuguuugauuucaacaaacaagcuauaaggaggcuaaagacagaagcacagaugaguauccaacugauaaacaaagcagugaaugcauugaucaaugaccagcuuauuaugaagaaucacuugagagauaucaugggaauuccuuacugcaauuacagcaaguacugguaucuaaaucacacuguaacagggaagacaucguugccaaggugcuggcuugugucaaaugguuccuaccugaaugagacacauuuuucugaugacauugaacaacaggcagacaacaugauaacagaacuguugcaaaaggaguacauggacaggcaagggaaaacacccuuaggguuaguagaucuuuuugucuucagcaccagcuuuuaucucauuagcaucuuccuccaccugaucaaaaucccaacccacagacauaucacagggaaacccugcccuaaaccacacagacuuaaccacaugggcauaugcucauguggucuauacaaacauccugguguaccagucaaguggaaaagauagggacuaguuauaagacugacuagcccgaugggccucccaacgggcccuccuccccuccuugcaccgagauuaauaaaaaaaaaaaaaaaaaaaaaaaaaaaaaaaaaaaaaaaaaaaaaaaaaaaaaaaaaaaaaaaaugcaucccccccccccccccccccccccccccccccaaaggcucuuuucagagccaccagaauu

SEQ ID NO: 3320 - RNA, 1690 nt, Artificial Sequence
  mRNA product Design i-3 comprising derived and/or modified sequence from LASV(ISTH2010-NIG-2012;Clade II)__AIT17482__GPC (wt)
gggagaaagcuuaccaugggacaaaucauaacauuuuuccaggaaguaccucaugucauagaggaagugaugaacauuguccugauugcucucagccuucuggcaauauugaaggggaucuacaauguugcuaccuguggccucuuuggauugguguccuuccuccucuuauguggaaggucauguucaacaacuuacaaggguguuuaugagcuacaaacucuggagcuagacauggcaagccuuaauaugacaaugcccuuaucuugcacgaagaacaacagccaccauuacaucauggucggaaaugaaacuggcuuggagcuaacuuuaacaaauacaaguaucaucaaccacaaauuuuguaaccucucugaugcacauaagaagaaucuuuaugaucaugcuuuaaugaguaucauuucaaccuuccacuuauccauuccuaacuuuaaucaguaugaagcaaugagcugugacuucaaugggggaaagauaaguguucaguacaaccuuagccacgcuuaugcuguagaugcagccaaccacugugggaccaucgccaauggcguucuucagacuuuuaugaggauggcuugggguggcagcuauauagcacuugauuccggaaaggggaguugggauuguauaaugacuuccuaccaauauuugauaauccaaaacaucacuugggaagaucacugccaguuuucucgcccauccccuaucgguuaccuagggcuacugucacaaaggaccagggacauuuacaucagucgaagacuucuugggacuuuuacuuggacucucucugauucugaagguaaugaaacaccggguggguauugccuaacaagauggaugcugauugaagccgaguugaaaugcuuugggaacacagcaguugcgaaaugcaaugagaaacaugaugaagaguuuugugacauguuaagauuguuugacuuuaacaaacaggcuauaaggaggcuaaagacagaagcacagaugaguauccaacugauaaacaaagcagugaacgcacugaucaaugaccagcugauuaugaagaaucauuugagagauaucauggggauuccuuacugcaauuacagcaaguacugguaucuaaaucauacuguaacagggaagacaucguugccaaggugcuggcuugugucaaaugguuccuaccugaaugagacacauuuuucugaugacauugaacaacaggcagacaacaugauaacagaacugcugcaaaaggaguacauagacaggcaagggaaaacaccuuuaggguuaguagaucuuuuugucuucagcaccagcuuuuaucucauuagcaucuuccuccaccugguuaaaaucccaacccacagacaugucguaggaaaacccugcccuaaaccacacagacucaaccacaugggcauauguucauguggucuauacaaacauccuggugugccagucaaguggaaaagauagggacuaguuauaagacugacuagcccgaugggccucccaacgggcccuccuccccuccuugcaccgagauuaauaaaaaaaaaaaaaaaaaaaaaaaaaaaaaaaaaaaaaaaaaaaaaaaaaaaaaaaaaaaaaaaaugcaucccccccccccccccccccccccccccccccaaaggcucuuuucagagccaccagaauu

SEQ ID NO: 3321 - RNA, 1690 nt, Artificial Sequence
  mRNA product Design i-3 comprising derived and/or modified sequence from LASV(Lassa virus/H.sapiens-wt/NGA/2015/ISTH_0543;Clade II)__AVO03639__GPC (wt)
gggagaaagcuuaccaugggacaaaucauaacauuuuuccaggaagugccucaugucauagaggaaguaaugaacauuguccugauugcucucagccuucuggcaauauugaaggggaucuacaauguagccaccuguggccuuuuuggacugguguccuuucuccucuuauguggaagaucaugcucaacaacuuauaagggugucuacgagcuacaaacucuagagcuggacauggcaaaccuuaauaugacaaugccccuaucuugcacaaagaacaacagucaccauuacaucauggucggaaaugaaacuggcuuggagcugacuuuaacaaauacaaguauuaucaaccacaaguuuugcaaccuuucugaugcacauaaaaagaaucucuaugaccaugcuuuaaugaguaucaucucaaccuuccacuuaucuauuccuaauuuuaaucaguaugaagcaaugaguugugacuucaauggagggaagauaaguguucaguacaaccuuagccacacuuaugcuguagaugcagccaaucacugugggacuaucgccaauggcguucuucagacuuuuaugaggauggcuugggguggcaguuacauagcacuugauucuggaaaggggaguugggauuguauaaugacuuccuaccaauaucugguaauccagaacaccacuugggaagaucacugccaauuuucucgcccauccccuaucgguuaucuggggcuacugucacaaaggaccagagacauuuacaucagucgaagacuucuugggacuuucacuuggacucucucugauucugaagguaaugaaacaccggguggguacugucuaacaagauggaugcugauugaggccgaguugaagugcuuugggaacacagcaguugcgaaaugcaaugagaaacaugaugaagaguuuugugacauguuaagacuguucgauuuuaacaaacaagcuauaaggaggcugaagacagaagcacagaugaguauccaacuaauaaacaaagcagugaaugcauugaucaaugaccagcuuauuaugaagaaucacuuaagagauaucaugggaauuccuuacugcaauuacagcaaguacugguaucuaaaucacacugugacagggaagacaucguugccaaggugcuggcuuguaucaaaugguuccuaccugaaugagacacauuuuucugaugauauugaacaacaggcagacaacaugauaacagaacuguugcaaaaggaauacauagacaggcaagggaaaacacccuuaggguuaguagaucuuuuugucuucagcaccagcuuuuaucucauuagcauuuuccuccaccuggucaaaaucccaacucacagacauaucacagggaaacccugcccuaaaccacacagacuuaaccacaugggcauaugcucauguggucuauacaaacauccugguguaccagucaaguggaaaagauagggacuaguuauaagacugacuagcccgaugggccucccaacgggcccuccuccccuccuugcaccgagauuaauaaaaaaaaaaaaaaaaaaaaaaaaaaaaaaaaaaaaaaaaaaaaaaaaaaaaaaaaaaaaaaaaugcaucccccccccccccccccccccccccccccccaaaggcucuuuucagagccaccagaauu

SEQ ID NO: 3322 - RNA, 1690 nt, Artificial Sequence
  mRNA product Design i-3 comprising derived and/or modified sequence from LASV(Lassa virus/H.sapiens-wt/NGA/2016/ISTH_0009;Clade II)__AVO03571__GPC (wt)
gggagaaagcuuaccaugggacaaaucauaacauuuuuccaggaaguaccucaugucauagaggaagugaugaacauuguccugauugcucucagccuucuggcaauacugaaggggaucuacaauguugccaccuguggccuccuuggacugguguccuuucuccucuuauguggaaggucaugcucaacaacuuauaaggguguuuaugagcuacaaacucuagagcuggacauggcaagccuuaauaugacaaugccccugucuugcacaaagaacaacagucaccauuacaucauggucggaaaugagacuggcuuggagcugacuuuaacaaauacaaguauuaucaaccacaaguuuuguaaccuuucugaugcacauaaaaagaaucucuaugaccaugcucuaaugaguaucaucucaaccuuccacuuaucuauuccuaauuuuaaccaguaugaagcaaugaguugugacuucaauggggggaggauaaguguucaguacaaccuuagccacucuuaugcuguagaugcagccaaucacugugggacuaucgccaauggcguucuucagacuuucaugaggauggcuugggguggcaguuacauagcacuugauuccggaaaggggaguugggauuguauaaugacuuccuaccaauacuugauaauccagaacaccacuugggaagaucacugccaguuuucucgcccauccccuaucgguuauuuggggcuacugucacagaggaccagagacauuuacaucagucgaagacuucuugggacuuuuacuuggacucucucugauucugaagguaaugaaacaccggguggguacugucuaacaagauggaugcugauugaggccgaguugaagugcuuugggaacacagcaguugcgaaaugcaaugagaaacaugaugaagaguucugugacauguuaagacuguuugauuuuaauaaacaagccauaaggaggcugaagacagaagcacagaugaguauccaacugauaaacaaagcagugaaugcauugaucaaugaccagcuuauuaugaagaaccacuugagagauaucaugggaauuccuuacugcaauuacagcaaguacugguaucuaaaucacacuguaacagggaagacaucguugccaaggugcuggcuugugucaaaugguuccuaccugaaugagacacauuuuuccgaugacauugaacaacaggcagacaacaugauaacagaauuguugcagaaggaguacauagacaggcaagggaaaacacccuugggguuaguagaucuuuuugucuucagcaccagcuuuuaucucauuagcaucuuccuccaccuggucaaaauuccaacccacagacauaucacagggaaacccugccccaaaccacacagacuuaaccacaugggcauaugcucauguggucuauacaaccauccuggugugccagucaaguggaaaagauagggacuaguuauaagacugacuagcccgaugggccucccaacgggcccuccuccccuccuugcaccgagauuaauaaaaaaaaaaaaaaaaaaaaaaaaaaaaaaaaaaaaaaaaaaaaaaaaaaaaaaaaaaaaaaaaugcaucccccccccccccccccccccccccccccccaaaggcucuuuucagagccaccagaauu

SEQ ID NO: 3323 - RNA, 1690 nt, Artificial Sequence
  mRNA product Design i-3 comprising derived and/or modified sequence from LASV(Lassa virus/H.sapiens-wt/NGA/2016/ISTH_0017;Clade II)__AVO03567__GPC (wt)
gggagaaagcuuaccaugggacaaaucauaacauuuuuccaggaaguaccucaugucauagaggaagugaugaacauuguccugauugcucucagccuucuggcaauacugaaagggaucuacaauguugcuaccuguggccucuuuggguugguguccuuccuccucuuaugugggagaucaugcucaacaacuuacaaggguguuuaugagcuacaaacucuagagcuagacauggcaagccuuaauaugacaaugcccuuaucuugcacgaagaacaauucccaccauuacaucauggucggaaaugagacuggcuuggagcugacuuuaacaaauacaagcauuaucaaccacaaguuuuguaaccuuucugaugcacauaaaaagaaucuuuaugaccaugccuuaaugagcaucauuucaaccuuccacuuauccauuccuaacuuuaaucaguaugaagcaaugaguugugacuucaaugggggaaaaauaaguguucaguacaaccuuagccauacuuaugcuauagaugcagcuaaccacugugggaccauugccaauggcguucuucagacuuuuaugaggauggcuugggguggcaguuacauagcacuugauuccggaaagggcagcugggacugcauuaugacuuccuaccaauauuugauaauccagaacaccacuugggaagaucacugccaguuuucucgcccaucccccaucgguuaucuggggcuacugucacaaaggaccagagacauuuacaucagucgaagacuucuugggacuuuuacauggacccucucugacucugaagguaaugaaacaccagguggguacugucuaacgagauggaugcugauugaggccgaguugaagugcuuugggaacacagcaguugcaaaaugcaaugagaaacaugaugaagaguuuugugauauguuaagauuauuugacuuuaacaaacaagcuauaaggaggcugaagacagaagcgcagaugaguauccaacugauaaacaaagcagugaacgcacugaucaaugaccagcugauuaugaagaaucauuuaagagauaucaugggaauuccuuacugcaauuacagcaaguauugguaucuaaaucacacuguaacagggaagacaucauuaccaagaugcuggcuugugucgaaugguuccuaccugaaugagacacauuuuucugaugacauugaacaacaagcagauaacaugauaacagaacuuuugcaaaaggaauauauggauaggcaagggaaaacacccuuaggguuaguagaucuuuuugucuucagcaccagcuuuuaucucauuagcaucuuccuccaccuggucagaaucccaacucacagacaugucauagggaaacccugcccuaaaccacacagacucaaccacaugggcauaugcucauguggucuguacaaacauccuggugugccagucaaauggaaaagauagggacuaguuauaagacugacuagcccgaugggccucccaacgggcccuccuccccuccuugcaccgagauuaauaaaaaaaaaaaaaaaaaaaaaaaaaaaaaaaaaaaaaaaaaaaaaaaaaaaaaaaaaaaaaaaaugcaucccccccccccccccccccccccccccccccaaaggcucuuuucagagccaccagaauu

SEQ ID NO: 3324 - RNA, 1690 nt, Artificial Sequence
  mRNA product Design i-3 comprising derived and/or modified sequence from LASV(Lassa virus/H.sapiens-wt/NGA/2018/ISTH_0959;Clade II)__AVV65099__GPC (wt)
gggagaaagcuuaccaugggacaaaucauaacauuuuuccaggaaguaccucaugucauagaggaagugaugaacauuguccugauugcucucagccuuuuggcaauacugaaggggaucuacaauguuguuaccuguggccucuuuggauugguguccuuccuccucuuauguggaagaucauguucaacaacuuacaaggguguuuaugagcuacaaacucuggagcuggacauggcaagccuuaauaugacaaugcccuuaucuugcacgaagaacaacagccaccauuacaucauggucggaaaugagacuggcuuggagcugacuuuaacaaauacaaguaucaucaaccauaaauuuuguaaccucucugaugcacauaaaaagaaucuuuaugaucaugcuuuaaugaguaucauuucaaccuuccacuuauccauuccaaacuuuaaucaguaugaagcaaugagcugugacuucaaugggggaaagauaaguguucaguacaaccuuagccacgccuaugcuauagaugcagccaaccacugcgggacuauugccaauggcguucuucaaacuuuuaugaggauggcuugggguggcagcuauauagcacuugauuccggaaaggggaguugggacuguauaaugacuuccuaccaguauuugauaauccaaaacaccacuugggaagaucauugucaguuuucucgcccauccccuaucgguuaccuagggcuacugucacaaaggaccagggacauuuacaucagucgaagacuucuugggacuuuuacuuggacucucucugauucugaagguaaugaaacaccggguggguauugucuaacaagauggaugcugauugaggccgaguugaaaugcuuugggaacacagcaguugcgaaaugcaaugagaaacaugaugaagaguuuugugacauguuaagauuguuugacuuuaacaaacaagcuauaaggaggcuaaagacagaagcacagaugaguauccagcugauaaacaaagcagugaacgcacugaucaaugaccagcugauuaugaaaaaucauuugagagauaucauggggauuccuuacugcaauuacagcaaguacugguaucuaaaucauacuguaacagggaagacaucguugccaaggugcuggcuugugucaaaugguuccuaccugaaugagacacauuuuucugaugacauugaacaacaagcagacaauaugauaacagaacugcugcaaaaggaguacauagacaggcaagggaaaacaccuuuaggguuaguagaucuuuuugucuucagcaccagcuuuuaucucauuagcaucuuccuccaccugguuaaaaucccaacccacagacaugucauaggaaaacccugcccuaaaccacacagacuuaaucacaugggcauauguucauguggucuauacaaacauccuggugugccagucaaguggaaaagauagggacuaguuauaagacugacuagcccgaugggccucccaacgggcccuccuccccuccuugcaccgagauuaauaaaaaaaaaaaaaaaaaaaaaaaaaaaaaaaaaaaaaaaaaaaaaaaaaaaaaaaaaaaaaaaaugcaucccccccccccccccccccccccccccccccaaaggcucuuuucagagccaccagaauu

SEQ ID NO: 3325 - RNA, 1690 nt, Artificial Sequence
  mRNA product Design i-3 comprising derived and/or modified sequence from LASV(LASV003-NIG-2008;Clade II)__AIT17580__GPC (wt)
gggagaaagcuuaccauggggcaaaucauaacauuuuuccaggaagugccucaugucauagaagaagugaugaacauuguccugauugcccucagccuuuuggcaauauugaaagggaucuacaauguugcuacuuguggccucuuuggacugguguccuuucuucucuuauguggaagaucaugcucaacaacuuacaaagguguuuaugagcuacaaacucuagagcuagacauggcaagccuuaauaugacaaugcccuuaucuugcacaaagaauaauagccaccauuacaucauggucggaaaugaaacuggcuuagagcugacuuuaacaaauacaaguaucaucaaccacaaguuuuguaaccuuucugaugcacauaaaaagaaucuuuaugaccaugcuuuaaugagcaucaucucaaccuuccacuuauccauuccuaacuuuaaucaauaugaagcaaugaguugugacuucaauggggggaagauaaguguucaguacaaccuuagccacacuuaugcuguagaugcagcuaaccacugugggacuauugccaauggcguucuucagacuuucaugaggauggcuugggguggcagcuacauagcacuugauuccggaaaagggaguugggauuguauaaugacuuccuaccaauaucugauaauccagaacaccacuugggaagaucauugccaguuuucucgcccaucccccaucgguuaucuggggcuacugucacaaaggaccagggacauuuacaucagucgaagacuccuugggacuuuuacuuggacccucucugauucugaaagcaaugaaacuccagguggguauugucuaacaagguggauguugauugaggccgagcugaagugcuuugggaacacagcaguugcgaaaugcaaugaaaaacaugaugaagaguuuugugacaugcuaagauuguuugacuuuaacaaacaagcuauaaggaggcugaaagcagaagcacagaugagcauccaacuaauaaacaaagcagugaaugcacugaucaaugaccagcugauaaugaagaaucauuuaagagauaucaugggaauuccuuacugcaauuacagcaaauauugguacuugaaucacacuguaacagggaggacaucguuaccaagaugcuggcuugugucaaaugguuccuaccugaaugagacacauuuuucugacgacauugaacaacaagcagacaauaugauaacagaacuguugcagaaggaguacauggacaggcaagggaaaacaccuuuaggguuaguagaucuuuuugucuucagcaccagcuuuuaucucaucagcaucuuccuccaccugguuaaaaucccaacccacagacaugucauagggaaacccugcccuaaaccacacagacucaaccacaugggcauaugcucauguggucuguacaaacauccuggugugccagucaaguggaaaagauagggacuaguuauaagacugacuagcccgaugggccucccaacgggcccuccuccccuccuugcaccgagauuaauaaaaaaaaaaaaaaaaaaaaaaaaaaaaaaaaaaaaaaaaaaaaaaaaaaaaaaaaaaaaaaaaugcaucccccccccccccccccccccccccccccccaaaggcucuuuucagagccaccagaauu

SEQ ID NO: 3326 - RNA, 1690 nt, Artificial Sequence
  mRNA product Design i-3 comprising derived and/or modified sequence from LASV(LASV035-NIG-2009;Clade II)__AIT17588__GPC (wt)
gggagaaagcuuaccauggggcaaaucauaacauuuuuccaggaagugccucaugucauugaggaggugaugaacauugucuuaauugcucucagucuucuagcaauacugaaagggauuuacaauguugcuaccuguggccucuuuggguugguguccuuucuucucuuauguggaaggucaugcucaacaacuuacaaggguguuuaugagcuucaaacucuagagcuggauauggcaagccuuaauaugacaaugcccuuauccugcacgaagaacaacagccaccacuacaucaugguuggaaaugagacuggcuuggagcugacuuugacaaacacaaguaucaucaaccacaaguucugcaaccuuuccgaugcacauaaaaagaaucucuaugaccaugcuuuaaugagcaucaucucaacuuuccaccuauccaucccuaacuuuaaucaguaugaagcaaugaguugugacuucaauggggggaagauaaguguucaguacaaccucagccacgcuuaugcuguagaugcagcuaaccauugugggaccauugccaauggaguucuucaaacuuuuaugaggauggcuugggguggcaguuacauagcacuugauucuggaaaggggaguugggauuguauaaugacuuccuaccaauauuugauaauccaaaacaccacuugggaagaucacugccaguuuucucgcccauccccuauugguuaucuggggcuacugucacaaagaaccagggauauuuacaucagccgaagacuccuuggaacuuuuacuuggacucucucugauucugaaggcaaugaaacaccggguggauauuguuuaacaagauggaugcugauugaggccgaauuaaagugcuuugggaacacagcaguugcgaaaugcaaugagaaacaugaugaagaguuuugugacauguuaagguuguuugacuuuaacaaacaggcuauaaggaggcuaaaggcagaagcacagaugagcauccaacuaauaaacaaagcagugaacgcacugaucaaugaccagcucauuaugaagaaucauuuaagagauaucaugggaauuccuuacugcaauuacagcaaguauugguauuuaaaucacacuguaacagggaagacaucguugccaagaugcuggcuuguaucaaaugguuccuaccugaaugaaacacauuuuucugaugacauugaacaacaagcagauaacaugauaacagaauuguuacagaaagaguacauugacaggcaagggaaaacacccuuaggguugguggaucuuuuugucuucagcacuagcuucuaccuuauuagcaucuuccuccaccugguuaaaaucccaacccacagacaugucauagggaagcccugccccaagccacacagacucaaccacaugggcauaugcucauguggucuguacaaacauccugguguaccagucaaguggaaaagauagggacuaguuauaagacugacuagcccgaugggccucccaacgggcccuccuccccuccuugcaccgagauuaauaaaaaaaaaaaaaaaaaaaaaaaaaaaaaaaaaaaaaaaaaaaaaaaaaaaaaaaaaaaaaaaaugcaucccccccccccccccccccccccccccccccaaaggcucuuuucagagccaccagaauu

SEQ ID NO: 3327 - RNA, 1690 nt, Artificial Sequence
  mRNA product Design i-3 comprising derived and/or modified sequence from LASV(LASV1000-NIG-2009;Clade II)__AIT17782__GPC (wt)
gggagaaagcuuaccaugggacaaaucauaacauuuuuccaggaaguuccucaugucauagaggaagugaugaacauuguccugauugcucucagccuccuggcaauacuaaaagggaucuacaauguugcuaccuguggccucuuuggauugguguccuuccuccucuuauguggaagaucaugcucaacaacuuacaaggguguuuaugagcugcaaacucuagagcuagacauggcaagccuuaauaugacaaugccucuaucuugcacgaagaauaacagccaccauuacaucauggucggaaaugagacuggcuuggagcugacuuuaacaaacacaaguauuaucaaucacaaguuuuguaaccuuucugaugcacacaaaaagaaucuuuaugaccaugcuuuaaugagcaucaucucaaccuuccauuuaucuauucccaacuucaaucaguaugaagcaaugaguugugacuucaaugggggaaagauaaguguucaguacaaccuuagccacacuuaugcuguagaugcagccaaccacugugggacuaucgccaauggcguccuucagaccuuuaugaggauggcuugggguggcaguuacauagcacuugauuccggaaaggggaguugggacuguauaaugacuuccuaucaauaucugauaauccaaaacaccacuugggaagaucacugccaguuuucucgcccaucuccuaucgguuaucuggggcuacugucacaaaggaccagagacauuuacaucagucgaagacuucuugggacuuucacuuggacucucucugauucugaagguaaugaaacaccggguggguacugucuaacaagguggaugcugauugaggccgaguugaagugcuuugggaacacagcaguugcgaaaugcaaugagaaacaugaugaagaguuuugugacauguuaagauuguuugacuuuaacaaacaagcuauaaagaggcugaagacagaagcacagaugaguauucaacugauaaacaaagcagugaacgcacugaucaaugaccagcugauuaugaagaaucauuugagagacaucaugggaauuccuuacuguaauuacagcaaguauugguaucuaaaucacaccguaacagggaagacaucguugccaaggugcuggcuugugucaaaugguuccuaccugaaugagacacacuuuucugaugacauugaacaacaagcagauaacaugauaacagaacuauugcaaaaggaguacauagacaggcaagggaaaacacccuuaggguuaguagaccuuuuugucuuuagcaccagcuuuuaucucauuagcaucuuccuccaccuggucaaaaucccaacccauagacaugucguagggaaacccugcccuaaaccacacagacucaaccacaugggcauaugcucauguggucuauacaaacauccugguguaccagucaaauggaaaagauagggacuaguuauaagacugacuagcccgaugggccucccaacgggcccuccuccccuccuugcaccgagauuaauaaaaaaaaaaaaaaaaaaaaaaaaaaaaaaaaaaaaaaaaaaaaaaaaaaaaaaaaaaaaaaaaugcaucccccccccccccccccccccccccccccccaaaggcucuuuucagagccaccagaauu

SEQ ID NO: 3328 - RNA, 1690 nt, Artificial Sequence
  mRNA product Design i-3 comprising derived and/or modified sequence from LASV(LASV221-NIG-2010;Clade II)__AIT17624__GPC (wt)
gggagaaagcuuaccaugggacaaaucauaacauuuuuccaggaaguaccucaugucauagaggaagugaugaacauuguccugauugcucucagccuucuggcaauacugaaagggaucuacaauguugcuaccuguggccucuuuggauugguguccuuccuccucuuauguggaagaucaugcucaacaacuuacaaggguguuuaugagcuacaaacucuagagcuagacauggcaagccuuaauaugacaaugcccuuaucuugcacgaagaacaacucccaccauuacaucauggucggaaaugagacuggcuuggagcugacuuugacaaauacaagcauuaucaaccacaaguuuuguaaccuuucugaugcgcauaaaaagaaucuuuaugaccaugcuuuaaugaguaucaucucaaccuuccacuuguccauuccuaacuuuaaucaguaugaagcaaugaguugugauuucaaugggggaaagauaaguguucaguacaaccuuagccacacuuaugcuauagaugcagccaaccacugugggaccauugccaauggcguucuucagacuuucaugagaauggcuugggguggcaguuacauagcacuugauuccggaaaggggagcugggauugcauaaugacuuccuaccaauauuugauaauccaaaacaccacaugggaagaucacugccaguuuucucgcccaucccccaucgguuaucuggggcuacuaucacaaagaaccagggacauuuacauuagucgaagacuucuugggacuuucacuuggacucucucugacucugaagguaaugaaacaccggguggguauugucuaacaagauggaugcugauugaggccgaguugaagugcuuuggaaacacagcaguugcaaaaugcaaugaaaaacaugaugaagaguuuugugauauguugagauuguuugacuucaacaaacaagcuauaaggaggcuaaagacagaagcacagaugaguauccaacugauaaacaaagcggugaacgcacugaucaaugaccagcugaucaugaagaaucauuugagagauaucaugggaauuccuuacugcaauuacagcaaguauugguaucuaaaucacacuguaacagggaagacaucguugccaagaugcuggcuugugucgaaugguucuuaccugaaugagacacauuuuucugaugacauugaacaacaagcagacaacaugauaacagaaauguugcaaaaggaguacauggacaggcaagggaaaacacccuuaggguuaguagaucuuuuugucuucagcaccagcuuuuaucucauuagcaucuuccuccaccuaguuaaaauuccaacccacagacaugucauagggaaacccugcccuaaaccacacagacucaaccacaugggcauauguucauguggucuguauaagcauccuggcgugccagucaaguggaaaagauagggacuaguuauaagacugacuagcccgaugggccucccaacgggcccuccuccccuccuugcaccgagauuaauaaaaaaaaaaaaaaaaaaaaaaaaaaaaaaaaaaaaaaaaaaaaaaaaaaaaaaaaaaaaaaaaugcaucccccccccccccccccccccccccccccccaaaggcucuuuucagagccaccagaauu

SEQ ID NO: 3329 - RNA, 1690 nt, Artificial Sequence
  mRNA product Design i-3 comprising derived and/or modified sequence from LASV(LASV237-NIG-2010;Clade II)__AIT17638__GPC (wt)
gggagaaagcuuaccaugggacaaaucauaacauuuuuccaggaaguaccucaugucauagaggaagugaugaacauuguccugauugcucucagccuucuggcaauacugaaggggaucuacaauguugccaccuguggccuauuuggacugguguccuuucuccucuuauguggaagaucaugcucaacaacuuauaaggguguuuaugagcuacaaacucuagagcuggauauggcaagccuuaauaugacaaugccccuaucuugcacaaagaacaacagucaccauuacaucauggucggaaaugagacuggcuuggagcugacuuuaacaaauacaaguauuaucaaccacaaguuuuguaaccuuucugaugcacauaaaaaggaucucuaugaccaugcuuuaaugaguaucaucucaaccuuccacuuaucuauuccuaauuuuaaucaguaugaagcaaugaguugugacuucaauggggggaagauaaguguucaguacaaccuuagccacacuuaugcuguagaugcagccaaucacugugggacuaucgccaauggcguucuucagacuuuuaugaggauggcuugggguggcaguuacauagcacuugauuccggaaaggggaguugggauuguauaaugacuuccuaccaauauuugauaauccagaacaccacuugggaagaucacugccaguuuucucgcccauccccuaucgguuaucuggggcuacugucacaaaggaccagagacauuuacaucagucgaagacuucuugggacuuuuacuuggacucucucugauucugaagguaaugaaacaccggguggguacugucuaacaagauggaugcugauugaggccgaguugaagugcuuugggaacacagcaguugcgaaaugcaaugagaaacaugaugaagaguuuugugacauguuaagacuguuugauuucaacaaacaagcuauaaggaggcuaaagacagaagcacagaugaguauccaacugauaaacaaagcagugaaugcauugaucaaugaccagcuuauuaugaagaaucacuugagagauaucaugggaauuccuuacugcaauuacagcaaguacugguaucugaaucacacuguaacagggaagacaucguugccgaggugcuggcuugugucaaaugguuccuaccugaaugagacacauuuuucugaugacauugaacaacaggcagacaacaugauaacagaacuguugcaaaaggaguacauggacaggcaagggaaaacacccuuaggguuaguagaccuuuuugucuucagcaccagcuuuuaucucauuagcaucuuccuccaccugaucaaaaucccaacccacagacauaucacagggaaacccugcccuaaaccacacagacuuaaccacaugggcauaugcucauguggucuauacaaacauccugguguaccagucaaguggaaaagauagggacuaguuauaagacugacuagcccgaugggccucccaacgggcccuccuccccuccuugcaccgagauuaauaaaaaaaaaaaaaaaaaaaaaaaaaaaaaaaaaaaaaaaaaaaaaaaaaaaaaaaaaaaaaaaaugcaucccccccccccccccccccccccccccccccaaaggcucuuuucagagccaccagaauu

SEQ ID NO: 3330 - RNA, 1690 nt, Artificial Sequence
  mRNA product Design i-3 comprising derived and/or modified sequence from LASV(LASV253-NIG-2011;Clade II)__AIT17670__GPC (wt)
gggagaaagcuuaccauggggcaaaucauaacauuuuuucaggaagugccucaugucauagaagaagugaugaacauuguccugauugcccucagccuucuggcaauauugaaagggaucuacaauguugcuacuuguggccucuuuggacugguguccuuucuucucuuauguggaagaucaugcucaacaacuuacaaagguguuuaugagcuacaaacucuagagcuagacauggcaagccuuaauaugacaaugcccuuaucuugcacaaagaauaauagccaccauuacaucauggucggaaaugaaacuggcuuagagcugacuuuaacaaauacaaguaucaucaaccacaaguuuuguaaccuuucugaugcacauaaaaagaaucuuuaugaccaugcuuuaaugagcaucaucucaaccuuccacuuauccauuccuaacuucaaucaauaugaagcaaugaguugugacuucaauggggggaagauaaguguucaguacaaccuuagccacacuuaugcuguagaugcagcuaaccacugugggacuauugccaauggcguucuucagacuuuuaugaggauggcuugggguggcagcuacauagcacuugauuccggaaaagggagcugggauuguauaaugacuuccuaccaauauuugauaauccagaacaccacuugggaggaucacugccaguuuucucgcccaucccccaucgguuaucuggggcuacugucacaaaggaccagggacauuuacaucagucgaagacuccuuggaacuuuuacuuggacccucucugauucugaaggcaaugaaacuccagguggguauugucuaacaagguggauguugauugaggccgaguugaagugcuuugggaacacagcaguugcgaaaugcaaugagaaacaugaugaagaguuuugugacaugcuaagauuguuugacuuuaauaaacaagcuauaaggagacugaaagcagaagcacagaugaguauucaacuaauaaacaaagcagugaaugcacugaucaaugaccagcugauaaugaagaaucauuuaagagauaucauggggauuccuuacugcaauuacagcaaguauugguaucugaaucacacuguaacaggaaggacaucguuaccaagaugcuggcuugugucaaaugguuccuaccugaaugagacacauuuuucugacgacauugaacaacaagcagacaacaugauaacagaacuguugcagaaggaguacauagacaggcaagggaaaacaccuuuaggguuaguggaucuuuuugucuucagcaccagcuuuuaucucaucagcaucuuccuccaccugguuaaaaucccaacccacagacauaucauagggaaacccugcccuaaaccacacagacucaaccacaugggcauaugcucauguggucuguacaaacauccuggugugccaguuaaguggaaaagauagggacuaguuauaagacugacuagcccgaugggccucccaacgggcccuccuccccuccuugcaccgagauuaauaaaaaaaaaaaaaaaaaaaaaaaaaaaaaaaaaaaaaaaaaaaaaaaaaaaaaaaaaaaaaaaaugcaucccccccccccccccccccccccccccccccaaaggcucuuuucagagccaccagaauu

SEQ ID NO: 3331 - RNA, 1690 nt, Artificial Sequence
  mRNA product Design i-3 comprising derived and/or modified sequence from LASV(LASV254-NIG-2011;Clade II)__AIT17674__GPC (wt)
gggagaaagcuuaccaugggacaaaucauaacauuuuuccaggaaguaccucaugucauagaggaagugaugaacauuguucugauugcucucagccuucuggcaauauugaaagggaucuacaauguugcuaccuguggccucuuuggauugguguccuuucuucucuuauguggaagaucaugcucaacaacuuacaaggguguuuaugagcuacaaacucuagagcuagacaugacaaaccucaauaugacaaugccuuuauccugcacgaaaaacaacagccaccauuacaucauggucggaaaugagacuggucuggagcugacuuuaacaaauacaagcaucaucaaccacaaguuuuguaaccuuucugaugcacauaaaaagaaucuuuauaaccaugcuuuaaugaguauuauuucaacuuuccacuuauccauuccuaacuuuaaucaguaugaagcaaugaguugugacuucaaugggggcaagauaaguguccaguacaaccuuagccauaguuaugcuguggaugcagcuaaccacugugggaccauugccaauggcgugcuucagacuuuuaugaggauggcuugggguggcaguuacauagcacuugauuccggaaaggggaauugggauuguauaaugaccuccuaccaauauuugauaauccaaaacaccacuugggaagaucacugucaguuuucucgcccauccccuauugguuaucugggguuacugucacaaaggaccagggacauuuacaucagucgaagacuucuugggacuuuuacuuggacucucucugauucugaagguaaugaaacaccagguggguauugucuaacaagauggaugcugauugaggccgaguugaagugcuuugggaacacagcaguugcgaaauguaaugagaaacaugaugaggaguuuugugacauguuaagauuguuugacuuuaacaaacaagcuauaaggaggcugaagacagaggcacaggcgaauauccaacugauaaauaaagcagugaacgcacugaucaaugaccagcugaucaugaagaaucauuugagagauaucaugggaauuccuuacugcaauuacagcaaguauugguacuuaaaucacacuguaacagggaagacaucguugccaagaugcuggcuugugucaaauggcuccuacuugaaugagacacauuuuucugaugacauugaacaacaagcagacaauaugauaacagaacuguugcagaaggaguacauggacaggcaagggaaaacacccuuaggguugguagaucuuuuugucuucagcaccagcuuuuaucucauuagcaucuuccuccaccugguuaaaaucccaacccacagacaugucauagggaaacccugcccuaaaccacacagacucaaccacaugggcauaugcucauguggucuguacaaacauccugguguaccagucaaguggaaaagauagggacuaguuauaagacugacuagcccgaugggccucccaacgggcccuccuccccuccuugcaccgagauuaauaaaaaaaaaaaaaaaaaaaaaaaaaaaaaaaaaaaaaaaaaaaaaaaaaaaaaaaaaaaaaaaaugcaucccccccccccccccccccccccccccccccaaaggcucuuuucagagccaccagaauu

SEQ ID NO: 3332 - RNA, 1690 nt, Artificial Sequence
  mRNA product Design i-3 comprising derived and/or modified sequence from LASV(Nig08-A19;Clade III)__ADU56618__GPC (wt)
gggagaaagcuuaccaugggacaaauugugacauucuuccaggaagucccucauguuaucgaggaagugaugaauaucguccucauagcauugucaauuuuggcaauccuaaaaggacucuacaacauugcuacauguggcuugauaggccuugucacauuccucuuacuuucuggaaggucauguucaaugaccuacaaaggaguuuaugaacuacagacccuugaacugaacaugaacacucugaauaugacuaugccgcuaucuuguacaaagaacaauagucaccacuacaucauggugggaaacgagacagggcuugagcucaccuuaaccaacacaagcuugcuccaucacaaauucugcaaccuaucagaugcucauaagaaaaaucuuuaugaucacacucucaugagcauuaucuccacauuccauuuguccauuccuaacuuuaaucaguaugaggcaaugaguugugauuuuaaugguggcaagaucacugugcaauacaaucugagucauagcuaugcaauugaugcagcaaaccauuguggcacaguggcaaacgguguguugcaaacauuuaugaggauggcuuggggagguaguuacauugcccuugauuccggacgugggaaaugggauuguauaaugaccaguuaucaauacuuaaucauccagaacacaaccugggaagaucauugucaauuuuccagaccauccccaauuggauaucuugggcuccucucacagagaacuagagacauauacauuaguagaagacuacuaggaacauuuacuuggacacuuucugacucagaaggaaaugagacaccaggagguuacugucucacuagauggauguugauugaggcugaacuaaaguguuucgggaauacagcuguagcuaagugcaaugaaaaacacgaugaagaguuuugugacaugcuaaggcuauuugacuucaauaagcaagcuauaaggagguuaaaggcagaggcccaaaugagcauacagcugaucaacaaagcaguuaaugcucuaauaaacgaucagcugaucaugaagaaucaucuaagggacaucaugggaauaccauacugcaauuacagcaaguacugguaucucaaucacaccucaacagggaggaccucauuaccgagauguuggcuuguuucaaaugggucauaucucaaugaaacucacuuuucagaugacauugagcagcaagcugauaacaugauaacugaaauguugcaaaaagaauaccuggacagacaaggaaagaccccauugggauugguagaucuuuuugucuucaguacaaguuuuuacuuaaucaguauuuuccuccaucuggucaaaauaccaacccauagacacauuguagggaagccuugccccaaaccucauagguugaaccacaugggcaucugcucuuguggucuauauaaacagccaggaguacccguuagauggaagagauaaggacuaguuauaagacugacuagcccgaugggccucccaacgggcccuccuccccuccuugcaccgagauuaauaaaaaaaaaaaaaaaaaaaaaaaaaaaaaaaaaaaaaaaaaaaaaaaaaaaaaaaaaaaaaaaaugcaucccccccccccccccccccccccccccccccaaaggcucuuuucagagccaccagaauu

SEQ ID NO: 3333 - RNA, 1693 nt, Artificial Sequence
  mRNA product Design i-3 comprising derived and/or modified sequence from LASV(G1180-SLE-2010;Clade IV)__AIT17168__GPC (wt)
gggagaaagcuuaccaugggacagauagugacauucuuccaggaagugccucauguaauagaagaggugaugaacauuguucucauugcacugucuauacuagcagugcugaaaggucuguacaauuuugcaacauguggccucguuggucuacucacuuuccuccuguuguguggcagaucuugcacagcuagucguuacaaagggguuuaugagcuucagacucuggaacuaaacauggagacacucaauaugaccaugccucucuccugcacaaagaacaacagucaucauuauauaaugguggguaaugagacaggacuagaacugacuuugacuaacacgagcaucauuaaucauaaauuuugcaaucugucugaugcccacaaaaagaaccuuuaugaccacgcucuuaugagcauaauuucaacuuuccacuuauccauccccaacuucaaucaguaugaggcaaugagcugcgauuuuaaugggggaaagauuagugugcaguacaaccugagucacagcuaugcuggggaugcagccaaucauugugguacuguugcaaauggugucuugcagaccuucaugaggauggcuuggggugggagcuacauugcucuugacucaggccauggcaguugggacuguauuaugacuaguuaucaauaucugauaauccaaaauacaaccugggaagaucacugccaguucucaagaccaucucccauugguuaucucgggcuccuuucacaaagaaccagagauauuuacauuaguagaagacuacuaggcacauucacauggacacugucagauucugaaggcaaggacacaccagggggauauugucugaccagauggaugcuaauugaagcugaacuaaaaugcuucgggaacacagcuguggcaaaauguaaugagaagcaugaugaggaauuuugugacaugcugaggcuguuugacuucaacaaacaagccauucaaagguugaaagcugaagcacaaaugagcauucaauugaucaacaaggcaguaaaugcuuugauaaaugaccaacuuauaaugaagaaccauuuacgagacaucaugggaaucccauacuguaauuacagcaaguauugguaccucaaccacacaaccacugggaaaacaucacugccuaaguguuggcuuguaucaaaugguucauacuuaaaugagacccacuuuucugaugauauugagcaacaagcugacaacaugaucacugagauguuacagaaggaguauauggaaaggcagggcaagacaccauugggccuaguugaccucuuuguguuuagcacaaguuucuaucucauuagcaucuuccuucaccuggucaaaauaccaacucauaggcauauuguaggcaagucgugucccaaaccucauagauugaaucacaugggcauauguuccuguggacucuacaaacagcccggugugccugugaaauggaagagaugaggacuaguuauaagacugacuagcccgaugggccucccaacgggcccuccuccccuccuugcaccgagauuaauaaaaaaaaaaaaaaaaaaaaaaaaaaaaaaaaaaaaaaaaaaaaaaaaaaaaaaaaaaaaaaaaugcaucccccccccccccccccccccccccccccccaaaggcucuuuucagagccaccagaauu

SEQ ID NO: 3334 - RNA, 1693 nt, Artificial Sequence
  mRNA product Design i-3 comprising derived and/or modified sequence from LASV(G1442-SLE-2011;Clade IV)__AIT17180__GPC (wt)
gggagaaagcuuaccaugggacaaauagugacauucuuucaggaagugccucaugugauagaggagguaaugaacauugugcucauugcacuauccauacuggcagugcugaagggucuauacaauguugcaacaugcggccugauugguuuagucaccuuccuauuguuaugugguaggucuugcacaacaacucuuuacaaaggaguuuacgaacuucagacucuggaauuaaacauggagacacucaauaugacuaugccucucucuuguacaaagaacaacagucaccacuauauaaggguggguaaugagacaggacuagaguugacccugaccaacacaagcaucaucaaucacaaguuuugcaaucuaucugaugcucacaaaaagaaccucuaugaucaugcuuugaugagcauaaucucgacuuuucacuuguccauucccaacuucaaccaauaugaggcaaugagcugugacuucaauggagggaagauuagugugcaguauaaccugagucacagcuaugcuggagaugcagccaaccauugugguacaguugcaaaugguguuuuacaaaccuucaugaggauggcuuggggugggaguuacaucgcccuugacucaggucguggcaauugggacuguauuaugacuaguuaucaauaccuaauaauucagaauacgaccugggaugaucauugccaauucucaagaccaucccccaucgguuaucuugggcuccucucacaaaggaccagagauguuuauaucaguagaagacugcuaggcacauucacauggacacugucagauucugaaggcaaggacacaccaggaggguacugucugaccagguggaugcuaauugaagcugaacugaaaugcuuuggcaacacagcuguagcaaaauguaaugagaaacaugaugaagaauucugugacaugcuaaggcuguuugacuucaauaaacaagcuauucagagguugaaagccgaagcacaaaugaguauucaguugaucaacaaagcagugaaugcuuugauaaaugaccaacuaauaaugaaaaaccaucuacgggacaucauggggauuccauacugcaauuacagcaaguacugguaucucaacaacacagccacugggaaaacaucacugcccaaauguuggcuuauaucaaauggcucauauuugaacgaaacucacuucucugaugacauugaacaggaagcugacaauaugaucacugagauguuacaaaaagaauacauggagaggcaggggaagacaccauuaggucugguugaccucuuuguguucagcacaaguuucuaucucauuagcaucuuccuucaccuagucaaaauaccaacucacaggcauauugugggcaaaucauguccuaaaccccauagguugaaucacauggguauuugcucuuguggacuuuauaaacaacccggugugccuguaagauggaagagaugaggacuaguuauaagacugacuagcccgaugggccucccaacgggcccuccuccccuccuugcaccgagauuaauaaaaaaaaaaaaaaaaaaaaaaaaaaaaaaaaaaaaaaaaaaaaaaaaaaaaaaaaaaaaaaaaugcaucccccccccccccccccccccccccccccccaaaggcucuuuucagagccaccagaauu

SEQ ID NO: 3335 - RNA, 1693 nt, Artificial Sequence
  mRNA product Design i-3 comprising derived and/or modified sequence from LASV(G3010-SLE-2013;Clade IV)__AIT17344__GPC (wt)
gggagaaagcuuaccaugggacagauaguaacauucuuccaggaagugccucaugugauagaagaggugaugaacauuguucucauugcacugucuauauuagcagugcugaaaggucuguacaauuuugcaacauguggccucguugguuugguuaccuuccuccuguuaugugguaggucuugcacaaccagucuuuacaaagggguuuaugagcuucagacucuggaacuaaacauggagacacucaauaugaccaugccucucuccuguacaaagaacaacagucaucauuauauuaugguggguaaugagacaggacuagaacugaccuugaccaacacgagcaucauuaaucauaaauuuugcaaucugucugaugcccacaaaaagaaccucuauaaucacgcucuuaugagcauaauuucaacuuuccaucuguccauucccaacuucaaucaguaugaggcaaugagcugcgauuucaaugggggaaagauuagugugcaguacaaccugagucacaguuaugcuggggaugcggccagccauuguggcacuguugcaaauggugucuuacagacuuucaugaggauggcuugggguggaagcuauauugcucuugacucaggcuauggcaagugggacugcauuaugacuaguuaucaguaccugauaauucaaaauacaaccugggaagaucacugccaauucucaagaccaucucccauuggcuaucucgggcuccucucacaaaggaccagagauauuuauauuaguagaagacugcugggcacauucacauggacacugucggauucugaagguaaggacacaccagggggauauuguuugaccagauggaugcuaauugaagcugaacuaaagugcuucgggaacacagcuguagcaaaauguaaugagaagcaugaugaggaauuuugugacaugcugaggcuguuugacuucaacaaacaagccauucaaagauugaaaacugaagcacaaaugagcauucaguugaucaacaaggcaguaaaugccuuaauaaaugaccagcuuauaaugaagaaccaucuacgagacauaaugggaauuccauacuguaacuacagcaaguauugguaccucaaccacacaaccacugggaaaacaucacugccuaaauguuggcuuguaucaaauggcucauacuugaaugagacccacuuuucugaugauauugaacaacaggcugacaacaugaucacugagauguuacagaaagaguacauggagaggcaggggaagacaccauugggccuggucgaccuuuuuguguucagcacaaguuucuaucucaucaguaucuuucuucaccuagucaaaauaccaacucauagacauauuguaggaaagucgugucccaaaccucacagauugaaucacaugggcauauguuccuguggacucuacaaacagcccggugugccugugagauggaagagaugaggacuaguuauaagacugacuagcccgaugggccucccaacgggcccuccuccccuccuugcaccgagauuaauaaaaaaaaaaaaaaaaaaaaaaaaaaaaaaaaaaaaaaaaaaaaaaaaaaaaaaaaaaaaaaaaugcaucccccccccccccccccccccccccccccccaaaggcucuuuucagagccaccagaauu

SEQ ID NO: 3336 - RNA, 1693 nt, Artificial Sequence
  mRNA product Design i-3 comprising derived and/or modified sequence from LASV(G502-SLE-2009;Clade IV)__AIT17126__GPC (wt)
gggagaaagcuuaccaugggacagauagugacauucuuccaggaaguaccucauguaauagaagaggugaugaacauuguucucauugcacugucuauacuagcagugcugaaaggucuguauaauuuugcaacauguggccucguuggucuacucaccuuccuccuauuguguggcaggucuugcacaaccggacuuuacaaagggguuuaugagcuucaaacucuggaacuaaacauggagacacucaauaugaccaugccucucuccugcacaaagaacaacagucaucauuauauaaugguggguaaugagacaggacuagaacugacuuugacuaacacgagcaucauuaaucauaaauuuugcaaucugucugaugcccacaaaaagaaccuuuaugaccacgcucuuaugagcauaauuucaacuuuccacuuguccauccccaacuucaaucaguaugaggcaaugagcugcgauuuuaaugggggaaagauuaguguacaguacaaccugagccacaguuaugcuggggaugcggcugaucauuguggcacuguugcaaauggugucuugcagacuuucaugaggauggccuggggugggagcuacauugcucuugacucaggucguggcaggugggacuguauuaugacuaguuaucaauauuugauaauccaaaauacaaccugggaagaucacugccaguucucaagaccaucucccaucgguuaucucgggcuccucucacaaagaacuagagacauuuacauuaguagaaggcuacuaggcacauucacauggacacugucagauucugaaggcaaggacacaccaggaggauauugucugacuagauggaugcugauugaggcugaauuaaaaugcuucgggaacacagcuguagcaaaauguaaugagaagcaugaugaggaauuuugugacaugcugaggcuguuugacuucaacaaacaagccauucaaagguuaaaagcugaagcacagaugagcauucaauugaucaacaaggcaguaaaugcuuugauaaaugaccaacuuguaaugaagaaccacuuacgggacaucaugggaauuccauacuguaauuacagcagguauugguaucucaaccacacaaccacuggaagaacaucacugccuaaauguuggcuugugucaaauggcucauacuuaaacgagacccacuuuucugaugauauugagcaacaagcugacaacaugaucacugagauguuacagaaggaauauauggaaaggcagggaaagacaccauuaggucugguugaccucuuuguguucagcacaaguuucuaucuuauuagcaucuuccuucaccuggucaagauaccaacucauaggcauauugugggcaagucgugucccaaaccucauagauugaaucacaugggcauauguuccuguggacucuacaaacagcccgguguaccugugaaauggaagagaugaggacuaguuauaagacugacuagcccgaugggccucccaacgggcccuccuccccuccuugcaccgagauuaauaaaaaaaaaaaaaaaaaaaaaaaaaaaaaaaaaaaaaaaaaaaaaaaaaaaaaaaaaaaaaaaaugcaucccccccccccccccccccccccccccccccaaaggcucuuuucagagccaccagaauu

SEQ ID NO: 3337 - RNA, 1693 nt, Artificial Sequence
  mRNA product Design i-3 comprising derived and/or modified sequence from LASV(G733-SLE-2010;Clade IV)__AIT17154__GPC (wt)
gggagaaagcuuaccaugggacagauagugacauucuuccaggaagugccucauguaauagaagaggugaugaacauuguucucauugcacugucuauacuagcaguccugaagggucuguacaacuuugcaacauguggcaucguugguuuggucagcuuucuccuguuguguggcaggucuugcacaaccagucuuuacaaagggguuuaugagcuucagacucuggagcuaaacauggagacacuuaacaugaccaugccucucucuugcacaaagaacaacagucaucauuauauaauggugggcaaugagacgggauuggaacugaccuugaccaacacgagcauuaucaaucauaaauuuugcaaucuaucugaugcccauaagaagaaccucuaugaccacgcccuuaugaguauaaucucaaccuuccacuuguccauccccaacuucaaucaguaugaagcaaugagcugugauuucaaugggggaaagauuaguguacaguacaaccugagucacagcuaugcuggggaugcagccaaccauuguggcacaauugcaaauggugucuuacagacuuucaugaggauggccuggggugggagcuacauugcucuugacucaggccgugacaggugggacugcauaaugaccaguuaucaauaucugauaauccaaaacacaaccugggaagaucacugccaauucucaagaccaucucccaucgguuaucuugggcuccucucacaaaggaccagagauauauauauuaguaggagacuacugggcacauuuacauggacauugucagauucugaagguaaggacacaccaggaggguauugucuaaccagauggaugcugauugaggcugagcugaaaugcuuugggaacacagcuguggcaaaaugcaaugagaaacaugaugaggaauuuugugauaugcuaaggcuguuugacuucaacaaacaagccauucaaagguuaaaagcugaggcacaaaugagcauucaguugaucaacaaagcagugaaugcuuugauaaacgaccaacuaauaaugaagaaccaucuacgggacaucaugggaauuccauacuguaauuacagcaaguacugguaccucaaccacacaacuacugggaaaacaucacugccuaaauguuggcuugugucgaaugguucauacuuaaacgagacucacuuuucugaugacauugaacaacaagcugacaauaugaucacugagauguuacagaaggaauacauggaaaggcaggggaagacaccauugggucuaguugaccucuuuguguucagcacaaguuucuaucucauuagcaucuuccuucauuuggucaaaauaccaacucauaggcauguuguaggcaagucgugucccaagccucacagauugaaucacaugggcauaugcuccugcggacucuauggacagccugguguaccugugaaauggaagagaugaggacuaguuauaagacugacuagcccgaugggccucccaacgggcccuccuccccuccuugcaccgagauuaauaaaaaaaaaaaaaaaaaaaaaaaaaaaaaaaaaaaaaaaaaaaaaaaaaaaaaaaaaaaaaaaaugcaucccccccccccccccccccccccccccccccaaaggcucuuuucagagccaccagaauu

SEQ ID NO: 3338 - RNA, 1693 nt, Artificial Sequence
  mRNA product Design i-3 comprising derived and/or modified sequence from MOPV/LASV reassortant(IGS-1;Clade IV)__AFY05576__GPC (wt)
gggagaaagcuuaccaugggacaaauagugacauucuuccaggaagugccucauguaauagaagaggugaugaacauuguucucauugcacugucuguacuagcagugcugaaaggucuguacaauuuugcaacguguggccuuguugguuuggucacuuuccuccuguugugugguaggucuugcacaaccagucuuuauaaagggguuuaugagcuucagacucuggaacuaaacauggagacacucaauaugaccaugccucucuccugcacaaagaacaacagucaucauuauauaauggugggcaaugagacaggacuagaacugaccuugaccaacacgagcauuauuaaucacaaauuuugcaaucugucugaugcccacaaaaagaaccucuaugaccacgcucuuaugagcauaaucucaacuuuccacuuguccauccccaacuucaaucaguaugaggcaaugagcugcgauuuuaaugggggaaagauuagugugcaguacaaccugagucacagcuaugcuggggaugcagccaaccauugugguacuguugcaaaugguguguuacagacuuuuaugaggauggcuuggggugggagcuacauugcucuugacucaggccguggcaacugggacuguauuaugacuaguuaucaauaucugauaauccaaaauacaaccugggaagaucacugccaauucucgagaccaucucccaucgguuaucucgggcuccucucacaaaggacuagagauauuuauauuaguagaagauugcuaggcacauucacauggacacugucagauucugaaggugaagacacaccagggggauauugucugaccagguggaugcuaauugaggcugaacuaaaaugcuucgggaacacagcuguggcaaaauguaaugagaagcaugaugaggaauuuugugacaugcugaggcuguuugacuucaacaaacaagccauucaaagguugaaagcugaagcacaaaugagcauucaguugaucaacaaagcaguaaaugcuuugauaaaugaccaacuuauaaugaagaaccaucuacgggacaucaugggaauuccauacuguaauuacagcaaguauugguaccucaaccacacaacuacugggagaacaucacugcccaaauguuggcuuguaucaaaugguucauacuugaacgagacccacuuuucugaugauauugaacaacaagcugacaauaugaucacugagauguuacagaaggaguauauggagaggcaggggaagacaccauugggucuaguugaccucuuuguguucagcacaaguuucuaucuuauuagcaucuuccuucaccuagucaaaauaccaacucauaggcauauuguaggcaagucgugucccaaaccucacagauugaaucauaugggcauuuguuccuguggacucuacaaacagccuggugugccugugaaauggaagagaugaggacuaguuauaagacugacuagcccgaugggccucccaacgggcccuccuccccuccuugcaccgagauuaauaaaaaaaaaaaaaaaaaaaaaaaaaaaaaaaaaaaaaaaaaaaaaaaaaaaaaaaaaaaaaaaaugcaucccccccccccccccccccccccccccccccaaaggcucuuuucagagccaccagaauu

SEQ ID NO: 3339 - RNA, 1693 nt, Artificial Sequence
  mRNA product Design i-3 comprising derived and/or modified sequence from LASV(LM765-SLE-2012;Clade IV)__AIT17814__GPC (wt)
gggagaaagcuuaccaugggacaaauagugacauucuuccaggaagugccccaugucauagaagaggugaugaacauuguucucauugcacuguccauacuagcagugcugaaaggucuguacaauuuugcaacauguggccucguuggcuuggucacuuuccuccuguuguguggcaggucuuguacaacuagccuuuacaaagggguuuaugagcuucagacucuggaacuaaacauggaaacacucaauaugaccaugccucucuccugcacaaagaacaauagucaucauuauauaauggugggcaaugagacaggacuagaacugaccuugaccaacacgagcauuauugaucauaaauuuugcaaucugucugaugcccacagaaagaaccucuaugaccacgcucuuaugagcauuaucucaacuuuccacuugucuaucccuaacuucaaucaguaugaggcaaugagcugcgauuucaaugggggaaagauuaguguacaguacaaccugagucacagcuaugccaaggacgcagccgaccauuguggaacuguugcaaaugguguauuacagacuuucaugaggauggcuuggggugggagcuacaucgcucuugacucaggccguggcaggugggacuguauuaugacuaguuaucaauaucugauaauccaaaauacaaccugggaagaucacugccaauucucgagaccaucucccaucgguuaucucgggcuccucucacagaggaccagagauauuuauauuaguagaaggcuacuaggcacauucacauggacacugucagauucugaaggcaaggacacaccagggggauauugucuaaccagauggaugcuaauugaggcugagcuaaagugcuucgggaauacagcuguggcaaaauguaaugagaagcaugaugaggaauuuugugacaugcugagguuguuugacuuuaacaagcaagccauucaaagguugaaagcugaagcacaaaugagcauucaguugaucaacaaagcaguaaaugcuuugauaaaugaccaacuuauaaugaagaaccaucuacgggacaucauggggauuccauacuguaauuacagcaaguauugguaccucaaccacacaacuacuggaaaaacaucacugcccaaguguuggcuuguaucaaaugguucauaccugaacgagacccacuuuucugaugacauugaacaacaagcugacaacaugaucaccgagauguuacagaaggaguauauggagaggcaggggaagacaccauugggucugguugaccucuuuguguucagcacaagcuucuaucucauuagcaucuuccuucaccuaguuaaaauaccaacucauaggcauauuguaggcaagccgugucccaaaccucacagguugaaucauaugggcauuuguuccuguggacucuauaaacagccuggugugccuguaaaauggaagagaugaggacuaguuauaagacugacuagcccgaugggccucccaacgggcccuccuccccuccuugcaccgagauuaauaaaaaaaaaaaaaaaaaaaaaaaaaaaaaaaaaaaaaaaaaaaaaaaaaaaaaaaaaaaaaaaaugcaucccccccccccccccccccccccccccccccaaaggcucuuuucagagccaccagaauu

SEQ ID NO: 3340 - RNA, 1693 nt, Artificial Sequence
  mRNA product Design i-3 comprising derived and/or modified sequence from LASV(LM776-SLE-2012;Clade IV)__AIT17824__GPC (wt)
gggagaaagcuuaccaugggacagauagugacauucuuccaggaagugccucauguaauagaagaggugaugaacauuguccucauugcgcugucuauauuagcagugcugaaaggucuguacaacuuugcaacauguggccucguugguuugguuacuuuccuccuguuguguggcaggucuugcacaaccaguguuuauaaaggggucuaugagcuucagacucuggaguuaaacauggagacacucaauaugaccaugccucucuccugcacaaagaauaacagucaucauuauauaaugguagguaaugagacaggacuagaacugaccuugaccaacacaagcauuauuaaucauaaauuuugcaaucugucugaugcccacaaaaagaaccucuaugaccaugcccuuaugagcauaauuucaacuuuccacuuguccauccccaacuucaaucaguaugaagcaaugagcugugauuucaaugggggaaagauuagugugcaguacaaccugagucacagcuaugcuggggaugcugccaaccauuguggcacuguugcaaauggugucuuacagacuuucaugaggauggcuuggggugggagcuacauugcucuugacucaggccauggcaagugggacuguauuaugacuaguuaucaauaucugauaauccaaaauacaaccugggaagaucacugccaauucucaagaccaucuccuaucgguuaucuugggcuucucucacaaaggaccagagauauuuauaucaguagaagacuacuaggcacauucacauggacacugucagauucugaaggcaaggacacaccagggggauauugucugaccagauggaugcugauugaagcugaauuaaaaugcuucgggaacacagcuguagcaaaauguaaugagaagcaugaugaggaauuuugugacauguugaggcuguuugacuucaacaaacaagccauucaaagguugaaagcugaagcacaaaugagcauucaguugaucaacaaggcaguaaaugccuugauaaaugaucaacuuauaaugaagaaccaucuacgggacaucaugggaaucccauacuguaauuacagcaaauauugguaccucaaccacacaacuacugggaaaacaucacugccuaaauguuggcuugucucaaaugggucauacuugaacgagacccacuuuucugaugauauugaacaacaagcugacaacaugaucacugagauguuacagaaggaguauauggagaggcaggggaagacaccauugggccuaguugaccucuuuguguucagcacaaguuucuaucucaucagcaucuuccuucaccuagucaaaauaccaacucauaggcauauuguaggcaagucguguccuaaaccucacagauugaaucacaugggcauauguuccuguggacucuacaaacagcccggugugccugugagauggaaaagaugaggacuaguuauaagacugacuagcccgaugggccucccaacgggcccuccuccccuccuugcaccgagauuaauaaaaaaaaaaaaaaaaaaaaaaaaaaaaaaaaaaaaaaaaaaaaaaaaaaaaaaaaaaaaaaaaugcaucccccccccccccccccccccccccccccccaaaggcucuuuucagagccaccagaauu

SEQ ID NO: 3341 - RNA, 1693 nt, Artificial Sequence
  mRNA product Design i-3 comprising derived and/or modified sequence from LASV(Mad39;Clade IV)__ANH09722__GPC (wt)
gggagaaagcuuaccauggggcaaauugugacauucuuucaggaagugccucauguaauugaggaggugaugaacauuguacucauugcacuauccauacuggcagugcuaaagggucuguacaauguugcaacauguggccucauuggcuugguuaccuuccuccugcugugugguagaucuuguacaaccacucuuuauaaagggguuuaugagcuucaagcucuggaacuaaacauggaaacacucaacaugacuaugccucucucuugcacaaaaaacaacucucaucacuauauaagggugggcaaugaaacaggccuagaacugaccuugaccaacacaagccucauaaaucacaaguucugcaaucugucugaugcucacaaaaagaaccucuaugaucaugcucuuaugagcauaaucucaacuuuccauuuguccauccccaacuucaaucaguaugaagcaaugagcugugauuucaaugaugggaagaucaguguacaguacaaccuaagccacaccuacgcuggggauacagccaaccacugugguacuguugcgaacgguguuuuacagacuuucaugaggauggcuuggggugggaguuacauugcucuugauucaggccgugguggaugggacugcauuaugaccagcuaucaauauuugauaauucagaacacaaccugggaagaucacugucaguucucaagaccaucucccaucggguaccuugggcuccucucacaaagaaccagagacauuuauaucaguagaagacuacugggcacauucacauggacacuaucagauucugaggguaaagacacaccagggggguacugucuaacuagguggaugcugauugaagcugaauugaaaugcuuuggcaacacagcuguagcaaaaugcaaugagaagcaugaugaggaauuuugugauauguugaggcuauuugacuuuaacaaacaagccauucaaagauugaaagcugaagcacaaaugaguauucagcugaucaacaaagcagugaaugccuugauaaaugaucaacugauaaugaaaaaccauuugcgggacauuauggggauuccguacugcaacuacagcaaguauugguaucuuaaucacacagucaccggaaagacaucauuacccaaaugcuggcuuguaucaaauggcucauaccuaaacgagacccacuucucugaugauauugagcagcaagcugauaacaugauuacugagaugcuacagaaggaauacauggagagacaggggaagacaccacuuggucugguugaccucuuuguauuuagcacaaguuucuaucucauuagcauuuuccuucaccuagugaaaauaccaacucauaggcauguugugggcaaaccguguccuaaaccucacagacugaaccacauggguauauguucuuguggguucuacaagcaaccuggugugccugugagauggaagagaugaggacuaguuauaagacugacuagcccgaugggccucccaacgggcccuccuccccuccuugcaccgagauuaauaaaaaaaaaaaaaaaaaaaaaaaaaaaaaaaaaaaaaaaaaaaaaaaaaaaaaaaaaaaaaaaaugcaucccccccccccccccccccccccccccccccaaaggcucuuuucagagccaccagaauu

SEQ ID NO: 3342 - RNA, 1693 nt, Artificial Sequence
  mRNA product Design i-3 comprising derived and/or modified sequence from LASV(Z0947-SLE-2011;Clade IV)__AIT17840__GPC (wt)
gggagaaagcuuaccaugggacaaauagugacauucuuccaggaagugccccaugucauagaagaggugaugaacaucguucucauugcacugucuauacuagcaguguugaaaggucuguacaauuuugcaacauguggccucguuggcuuggucacuuuccuccuguuguguggcaggucuugcacaauuagccuuuacaaggggguuuaugagcuucagacucuggaacuaaacauggaaacacucaauaugaccaugccucucuccuguacaaagaacaacagucaucauuauauaauggugggcaaugagacaggacuagaacugaccuugaccaacacgagcauuauuaaucauaaauuuugcaaucugucugaugcccacaaaaagaaccucuaugaccaugcucuuaugagcauuaucucaacuuuccacuuguccaucccuaacuucaaucaguaugaggcaaugagcugcgauuucaaugggggaaagauuagugugcaguacaaccugagucacagcuaugccggggacgcagccaaccauugugguacuguugcaaaugguguauuacagacuuucaugaggauggcuuggggugggagcuacaucgcucuugacucaggccgugacaggugggacuguauuaugacuaguuaucaauaucugauaauccaaaauacaaccugggaagaucacugccaauucucgagaccaucucccaucgguuaucucgggcuccucucacaaaggaccagagauauuuauauuaguagaaggcuacuaggcacauucacauggacacugucagauucugaaggcaaggacacaccagggggauauugucuaaccagauggaugcuaauugaggcugagcuaaagugcuucgggaacacagccguggcaaaauguaaugagaagcaugaugaggaauuuugugacaugcugagguuguuugacuuuaacaaacaagccauucaaagguugaaagcugaagcacaaaugagcauucaguugaucaacaaagcaguaaaugcuuugauaaaugaccaacuuauaaugaagaaccaucuacgggacaucauggggauuccauacuguaauuacagcaaguauugguaccucaaccacacaacuacuggaaaaacaucacugcccaaguguuggcuuguaucaaaugguucauaccugaacgagacccacuuuucugaugacaucgaacaacaagcugacaacaugaucacugagauguuacagaaggaguauauggagaggcaggggaagacaccauugggucugguugaccucuuuguguucagcacaagcuucuaucucauuagcaucuuccuucaccuaguuaaaauaccaacucauaggcauauuguaggcaagccgugucccaaaccucacagguugaaucauaugggcauuuguuccuguggacucuauaaacagccuggugugccugugaaauggaagagaugaggacuaguuauaagacugacuagcccgaugggccucccaacgggcccuccuccccuccuugcaccgagauuaauaaaaaaaaaaaaaaaaaaaaaaaaaaaaaaaaaaaaaaaaaaaaaaaaaaaaaaaaaaaaaaaaugcaucccccccccccccccccccccccccccccccaaaggcucuuuucagagccaccagaauu

SEQ ID NO: 3343 - RNA, 1693 nt, Artificial Sequence
  mRNA product Design i-3 comprising derived and/or modified sequence from LASV(Josiah;Clade IV)__NP_694870__GPC (opt1) R6717
gggagaaagcuuaccaugggccagaucgugaccuucuuccaggaggucccccacgugaucgaggaggugaugaacaucguccugaucgcccucagcgugcuggccgugcugaaggggcucuacaacuucgcgaccugcggccuggucgggcuggugacguuccuccugcugugcggccgcuccugcaccaccagccucuacaaggggguguacgagcugcagacccuggagcucaacauggagacgcugaacaugaccaugccgcuguccugcaccaagaacaacagccaccacuacaucauggucggcaacgagaccggccucgagcugacgcugaccaacaccuccaucaucaaccacaaguucugcaaccucagcgacgcccacaagaagaaccuguacgaccacgcccugauguccaucaucagcaccuuccaccucuccauccccaacuucaaccaguacgaggccaugagcugcgacuucaacgggggcaagaucuccgugcaguacaaccugagccacuccuacgccggggacgcggccaaccacugcggcacgguggccaacgggguccugcagaccuucaugcggauggccuggggcggcagcuacaucgcgcucgacuccgggcgcggcaacugggacugcaucaugaccagcuaccaguaccugaucauccagaacaccacgugggaggaccacugccaguucucccggcccagccccaucggguaccugggccuccugucccagcgcacccgggacaucuacaucagccgccggcugcucggcaccuucaccuggacgcugagcgacuccgaggggaaggacaccccgggcggguacugccugacccgcuggaugcucaucgaggccgagcugaagugcuucggcaacaccgccguggccaagugcaacgagaagcacgacgaggaguucugcgacaugcugcggcuguucgacuucaacaagcaggccauccagcgccugaaggcggaggcccagaugagcauccagcugaucaacaaggccgugaacgcccucaucaacgaccagcugaucaugaagaaccaccuccgggacaucauggggauccccuacugcaacuacuccaaguacugguaccucaaccacacgaccaccggccgcaccagccugcccaagugcuggcuggucuccaacggcagcuaccucaacgagacgcacuucuccgacgacaucgagcagcaggccgacaacaugaucaccgagaugcugcagaaggaguacauggagcggcaggggaagacgccccugggccucguggaccuguucguguucagcaccuccuucuaccugaucagcaucuuccugcaccucgucaagaucccgacccaccgccacaucguggggaaguccugccccaagccccaccggcugaaccacaugggcaucugcagcugcgggcuguacaagcagcccggcgugccggucaaguggaagcgcugaggacuaguuauaagacugacuagcccgaugggccucccaacgggcccuccuccccuccuugcaccgagauuaauaaaaaaaaaaaaaaaaaaaaaaaaaaaaaaaaaaaaaaaaaaaaaaaaaaaaaaaaaaaaaaaaugcaucccccccccccccccccccccccccccccccaaaggcucuuuucagagccaccagaauu

SEQ ID NO: 3344 - RNA, 1690 nt, Artificial Sequence
  mRNA product Design i-3 comprising derived and/or modified sequence from LASV(LP;Clade I)__AAF86701__GPC (opt1)
gggagaaagcuuaccaugggccagaucaucaccuucuuccaggaggugccccacgucaucgaggaggugaugaacaucgugcugaucgcccucagccugcuggccauccucaaggggcuguacaacaucgcgaccugcggcaucaucgggcuggucgccuuccucuuccugugcggcaaguccugcagccugacgcucaagggcggguacgagcugcagacccuggagcucaacauggagacccugaacaugaccaugccgcuguccugcacgaagaacagcucccaccacuacauccgcgugggcaacgagaccgggcucgagcugacccugaccaacacgagcaucaucaaccacaaguucugcaaccucuccgacgcccacaagaagaaccuguacgaccacgcccugaugagcaucaucuccaccuuccaccucagcauccccaacuucaaccaguacgaggccauguccugcgacuucaacggcgggaagaucagcgugcaguacaaccugucccacagcuacgcgggcgacgccgccgagcacugcgggaccgucgccaacggcgugcugcagaccuucaugcggauggcguggggcgggcgcuacaucgcccucgacuccggcaaggggaacugggacugcaucaugacgagcuaccaguaccugaucauccagaacaccaccugggaggaccacugccaguucucccggcccagccccaucggcuaccugggccuccugucccagcgcacccgggacaucuacaucagccgccggcugcucgggacguucaccuggacccugagcgacuccgagggcaacgagacccccgggggcuacugccugacgcgcuggaugcucaucgaggccgagcugaagugcuucgggaacaccgccguggccaagugcaacgagaagcacgacgaggaguucugcgacaugcugcggcuguucgacuucaacaagcaggcgauccgccggcugaaggccgaggcccagaugagcauccagcugaucaacaaggccgucaacgcccucaucaacgaccagcugaucaugaagaaccaccuccgcgacaucaugggcauccccuacugcaacuacuccaaguacugguaccucaaccacaccagcuccggccggaccagccugcccaagugcuggcugaucuccaacgggagcuaccucaacgagacgcaguucuccgacgacaucgagcagcaggcggacaacaugaucaccgagaugcugcagaaggaguacaucgagcgccagggcaagaccccgcuggggcucguggacaucuucaucuucagcaccuccuucuaccugaucagcaucuuccugcaccugaucaagaucccgacgcaccggcacaucgugggcaagcccugccccaagccccaccgccucaaccacaugggggucugcuccugcggccuguacaagcacccgggcgugcccaccaaguggaagcggugaggacuaguuauaagacugacuagcccgaugggccucccaacgggcccuccuccccuccuugcaccgagauuaauaaaaaaaaaaaaaaaaaaaaaaaaaaaaaaaaaaaaaaaaaaaaaaaaaaaaaaaaaaaaaaaaugcaucccccccccccccccccccccccccccccccaaaggcucuuuucagagccaccagaauu

SEQ ID NO: 3345 - RNA, 1690 nt, Artificial Sequence
  mRNA product Design i-3 comprising derived and/or modified sequence from LASV(803213;Clade II)__AAF86703__GPC (opt1)
gggagaaagcuuaccaugggccagaucaucaccuucuuccaggaggugccccacgucaucgaggaggugaugaacaucgugcugaucgcccucagccugcuggccauccucaaggggaucuacaacgucgcgaccugcggccuguucgggcugaucuccuuccuccugcugugcggccgcagcugcuccgugacguacaaggggguguacgagcuccagacccuggagcugaacauggccaaccucaacaugaccaugccgcugagcugcaccaagaacaacucccaccacuacaucauggucggcaacgagacgggccuggagcucacccugaccaacaccagcaucaucaaccacaaguucugcaaccuguccgacgcccacaagaagaaccucuacgaccacgcccugaugagcaucaucuccacguuccaccugagcauccccaacuucaaccaguacgaggccauguccugcgacuucaacgggggcaagaucagcgugcaguacaaccucucccacagcuucgcgguggacgccgccaaccacugcgggaccaucgccaacggcguccugcagaccuucaugcggauggcguggggcggguccuacaucgcccuggacagcggcaaggggaacugggacugcaucaugaccuccuaccaguaccucaucauccagaacacgaccugggaggaccacugccaguucagccgccccucccccaucggcuaccuggggcugcucagccagcggacccgcgacaucuacaucagccggcgccugcugggcaccuucacguggacccucuccgacagcgagggcaacgaggcccccgggggcuacugccugacccgguggaugcugaucgaggccgagcucaagugcuucgggaacaccgccguggcgaagugcaacgagaagcacgacgaggaguucugcgacaugcugcgccuguucgacuucaacaagcaggccaucaagcggcucaagacggaggcccagauguccauccagcugaucaacaaggccgugaacgcccugaucaacgaccagcucaucaugaagaaccaccuccgcgacaucaugggcauccccuacugcaacuacagccgguacugguaccugaaccacaccgucaccgggaagaccucccugccccgcugcuggcuggugagcaacggcuccuaccugaacgagacgcacuucagcgacgacaucgagcagcaggcggacaacaugaucaccgagaugcuccagaaggaguacauggaccggcagggcaagaccccgcuggggcugguggaccucuucgucuucuccaccagcuucuaccugaucuccaucuuccugcaccuggugaagaucccgacgcaccgccacaucgugggcaagcccugccccaagccccaccggcucaaccacauggggaucugcagcugcggccuguacaagcacccggggguccccgugaaguggaagcgcugaggacuaguuauaagacugacuagcccgaugggccucccaacgggcccuccuccccuccuugcaccgagauuaauaaaaaaaaaaaaaaaaaaaaaaaaaaaaaaaaaaaaaaaaaaaaaaaaaaaaaaaaaaaaaaaaugcaucccccccccccccccccccccccccccccccaaaggcucuuuucagagccaccagaauu

SEQ ID NO: 3346 - RNA, 1690 nt, Artificial Sequence
  mRNA product Design i-3 comprising derived and/or modified sequence from LASV(GA391;Clade III)__CAA36645__GPC (opt1)
gggagaaagcuuaccaugggccagaucgugaccuucuuccaggaggucccccacgugaucgaggaggugaugaacaucguccugaucgcccucagcauccuggccauccugaaggggcucuacaacguggcgaccugcggccugaucgggcuggugacguuccuccugcuguccggccgcagcugcucccucaucuacaaggggaccuacgagcugcagacccuggagcucaacauggagacccugaacaugacgaugccgcugagcugcaccaagaacaacucccaccacuacauccgggucggcaacgagaccggccucgagcugacccugacgaacaccagcauccucaaccacaaguucugcaaccuguccgacgcccacaagcgcaaccuguacgaccacagccucauguccaucaucagcaccuuccaccuguccauccccaacuucaaccaguacgaggccaugagcugcgacuucaacgggggcaagaucaccgugcaguacaaccugucccacagcuucgccguggacgccgcggggcacugcggcacgcucgccaacgggguccugcagaccuucaugcggauggccuggggcggcuccuacaucgcccuggacagcgggcgcggcaacugggacugcaucaugaccuccuaccaguaccucaucauccagaacaccacgugggacgaccacugccaguucagccggcccucccccaucggguaccugggccugcucagccagcgcacccgggacaucuacaucagccgccggcugcugggcaccuucaccuggacgcucuccgacagcgaggggaacgagaccccgggcggguacugccugacccgcuggaugcugaucgaggcggagcucaagugcuucggcaacaccgccguggccaagugcaacgagaagcacgacgaggaguucugcgacaugcugcggcuguucgacuucaacaagcaggccauccgccggcucaagacggaggcccagauguccauccagcugaucaacaaggcggugaacgcccugaucaacgaccagcucaucaugaagaaccaccuccgcgacaucauggggauccccuacugcaacuacagccgguacugguaccugaaccacaccuccaccggcaagaccagccugccccgcugcuggcugaucuccaacggcagcuaccugaacgagacgaaguucuccgacgacaucgagcagcaggccgacaacaugaucaccgagaugcuccagaaggaguacaucgaccggcaggggaagacgccccugggccuggucgaccuguucguguucagcaccuccuucuaccucaucagcaucuuccugcaccuggugaagaucccgacccaccgccacaucgucgggaagcccugccccaagccccaccggcucaaccacaugggcaucugcuccugcgggcuguacaagcagccgggcgugcccgugcgcuggaagcggugaggacuaguuauaagacugacuagcccgaugggccucccaacgggcccuccuccccuccuugcaccgagauuaauaaaaaaaaaaaaaaaaaaaaaaaaaaaaaaaaaaaaaaaaaaaaaaaaaaaaaaaaaaaaaaaaugcaucccccccccccccccccccccccccccccccaaaggcucuuuucagagccaccagaauu

SEQ ID NO: 3347 - RNA, 1693 nt, Artificial Sequence
  mRNA product Design i-3 comprising derived and/or modified sequence from LASV(AV;Clade V)__CCA30314__GPC (opt1)
gggagaaagcuuaccaugggccagaucgugaccuucuuccaggaggucccccacgugaucgaggaggugaugaacaucguccugaucgcccucagcauccuggccgugcugaaggggcucuacaacaucgcgaccugcggccugaucgggcugaucacguuccuccugcugugcggccgcuccugcagcuccaaccucuacaaggggguguacgagcugcagagccuggaccucaacauggagacccugaacaugaccaugccgcuguccugcaccaagaacaacagccaccacuacauccgggucggcaacgacacgggccucgagcugacccugaccaacaccuccauccucaaccacaaguucugcaaccugagcgacgcccacaagaaggaccuguacgaccacgcccucauguccaucaucagcacguuccaccuguccauccccaacuucaaccaguacgaggccaugagcugcgacuucaacgggggcaagaucuccgugcaguacaaccugagccacuccuacgccaucgacgcggccaaccacugcgggaccguggccaacggcauccuccagaccuucaugcgcauggccuggggcgggagcuacaucgcgcuggacuccggccgggggaacugggacugcaucaugaccagcuaccaguaccugaucauccagaacacgaccugggagaaccacugccaguucucccgccccagccccaucggcuaccucgggcugcugagccagcggacccgcgacaucuacaucucccggcgccuccugggcaccuucacguggacccugagcgacuccgagggcaacgccacccccgggggcuacugccucacccgguggaugcugaucgaggccgagcugaagugcuucgggaacacggccgucgccaagugcaacgagaagcacgacgaggaguucugcgacaugcuccgccuguucgacuucaacaagcaggcgaucagccggcugaaguccgaggcccagaugagcauccagcucaucaacaaggccgugaacgcccugaucaacgaccagcugaucaugaagaaccaccuccgcgacaucaugggcauccccuacugcaacuacuccaaguacugguaccugaaccacaccaucaccgggaagaccagccugcccaagugcuggcucguguccaacggcagcuaccugaacgagacgcacuucuccgacgacaucgagcagcaggccgacaacaugaucaccgagaugcugcagaaggaguacauggagcggcagggcaagaccccgcucgggcuggucgaccuguucguguucagcaccuccuucuaccugaucagcaucuuccuccgccuggugaagaucccgacgcaccggcacaucgucggcaagcccugccccaagccccaccgccugaaccacauggggaucugcuccugcggccucuacaagcagccgggggugcccgugcgguggaagcgcugaggacuaguuauaagacugacuagcccgaugggccucccaacgggcccuccuccccuccuugcaccgagauuaauaaaaaaaaaaaaaaaaaaaaaaaaaaaaaaaaaaaaaaaaaaaaaaaaaaaaaaaaaaaaaaaaugcaucccccccccccccccccccccccccccccccaaaggcucuuuucagagccaccagaauu

SEQ ID NO: 3348 - RNA, 1690 nt, Artificial Sequence
  mRNA product Design i-3 comprising derived and/or modified sequence from LASV(Togo/2016/7082;Clade VI)__AMR44577__GPC (opt1)
gggagaaagcuuaccaugggccagaucaucaccuucuuccaggaggugccccacgucaucgaggaggugaugaacaucgugcugaucgcccucagccugcuggccauccucaagggggucuacaacguggcgaccugcggcaucaucgggcuggugacguuccuguuccucugcggccgcuccugcagccugaucuacaagggguccuacgagcugcagacccucgagcugaacauggagacccugaacaugaccaugccgcucagcugcacgaagaacuccagccaccacuacauccgggucggcaacgagaccggccuggagcugacccucaccaacacguccaucaucaaccacaaguucugcaaccugagcgacgcccacaagcgcaaccuguacgaccacgcccucauguccauccugagcaccuuccaccuguccauccccaacuucaaccaguacgaggccaugagcugcgacuucaacgggggcaagaucuccgugcaguacaaccucagccacgccuacgcgguggacgccgccgagcacugcgggaccgucgccaacggcgugcugcagaccuucaugcggauggcguggggcggguccuacaucgcccuggacagcggccgcgggaacugggacugcaucaugacguccuaccaguaccucaucauccagaacaccaccugggaggaccacugccaguucagccggcccucccccaucggcuaccuggggcugcucagccagcgcacccgggacaucuacaucagccgccggcugcugggcacguucaccuggacccucuccgacagcgagggcaacgagacccccgggggcuacugccugacgcgcuggaugcugaucgaggccgagcucaagugcuucgggaacaccgccguggccaagugcaacgagaagcacgacgaggaguucugcgacaugcugcggcuguucgacuucaacaagcaggcgauccagcgccucaaguccgaggcccagaugagcauccagcugaucaacaaggccgucaacgcccugaucaacgaccagcucaucaugaagaaccaccuccgggacaugaugggcauccccuacugcaacuacuccaaguacugguaccugaaccacaccagcuccgggcgcaccagccugcccaagugcuggcugguguccaacggcagcuaccugaacgagacgcacuucuccgacgacaucgagcagcaggccgacaacaugaucaccgagaugcuccagaaggaguacaucgaccggcagggcaagaccccgcuggggcugguggaccucuucgucuucagcaccuccuucuaccugaucagcaucuuccugcaccugaucaagaucccgacgcaccgccacaucgugggcaagcccugccccaagccccaccggcucaaccacauggggaucugcuccugcggccuguacaagcagccgggggugcccacccgcuggaagcggugaggacuaguuauaagacugacuagcccgaugggccucccaacgggcccuccuccccuccuugcaccgagauuaauaaaaaaaaaaaaaaaaaaaaaaaaaaaaaaaaaaaaaaaaaaaaaaaaaaaaaaaaaaaaaaaaugcaucccccccccccccccccccccccccccccccaaaggcucuuuucagagccaccagaauu

SEQ ID NO: 3349 - RNA, 1690 nt, Artificial Sequence
  mRNA product Design i-3 comprising derived and/or modified sequence from LASV(KAK-428;Clade n.d. (VII))__ANH09740__GPC (opt1)
gggagaaagcuuaccaugggccagaucgugaccuucuuccaggaggucccccacgugaucgaggaggugaugaacaucguccugaucgcccucagccugcuggccauccucaaggggcuguacaacuucgcgaccugcggcgugaucgggcugaucacguuccuccugcugugcggccgcuccugcagcgccaccuacaaggggcaguacgagcuccagacccuggagcugaacauggagucccucaacaugaccaugccgcugagcugcacgaagaacaacucccaccacuacauccgggccggcaacaacaccggccuggagcucacccugaccaacacgagcaucaucucccacaaguucugcaaccugagcgacgcccacaagaagaaccucuacgaccacacccugauguccaucaucaccaccuuccaccugagcauccccaacuucaaccaguacgaggccauguccugcgacuucaacgggggcaagaucagcauccaguacaaccucucccacagcuacgcgggggacgccgcccagcacugcggcacgguggccaacgggguccugcagaccuucaugcgcauggcguggggcggcuccuaccuggcccucgacagcgggcggcgcggcugggacugcaucaucuccagcuaccaguaccugaucauccagaacaccaccugggacgaccacugccaguucucccggcccagccccaucggguaccugggcuucgugagccagaagacgcgcgacaucuacaucucccggcgccuccugggcaccuucaccuggacccugagcgacuccgaggggcacgacaugccgggcggguacugccucacgcgguggaugcugaucgaggccgaccugaagugcuucggcaacaccgccguggccaagugcaacgagaagcacgacgaggaguucugcgacauguggcgccucuucgacuucaacaagcaggcgauccagcggcugaaggccgaggcccagaugaacauccagcugaucaacaaggccgucaacgcccucaucaacgaccagcugaugaugaagaaccaccuccgcgacaucauggggauccccuacugcaacuacagcaaguucugguaccugaacaacaccaccacgggccggaccucccugccccgcugcuggcugaucagcaacggcuccuaccucaacgagacccacuucagcgacgacaucgagcagcaggcggacaacaugaucaccgagaugcugcagaaggaguacauggaccggcaggggaagacgccccugggccucguggaccuguucguguucuccaccagcuucuaccugaucaccaucuuccuccaccuggucaagaucccgacccaccgccacaucguggggaagcccugccccaagccccaccggcugaaccacaugggcaucugcuccugcgggcuguacaagcagccgggcgugcccguccgcuggaagcggugaggacuaguuauaagacugacuagcccgaugggccucccaacgggcccuccuccccuccuugcaccgagauuaauaaaaaaaaaaaaaaaaaaaaaaaaaaaaaaaaaaaaaaaaaaaaaaaaaaaaaaaaaaaaaaaaugcaucccccccccccccccccccccccccccccccaaaggcucuuuucagagccaccagaauu

SEQ ID NO: 3350 - RNA, 1690 nt, Artificial Sequence; identical to SEQ ID NO: 3344
  mRNA product Design i-3 comprising derived and/or modified sequence from LASV(Pinneo-NIG-1969;Clade I)__AIT17836__GPC (opt1)

SEQ ID NO: 3351 - RNA, 1690 nt, Artificial Sequence
  mRNA product Design i-3 comprising derived and/or modified sequence from LASV(ISTH0009-NIG-2011;Clade II)__AIT17404__GPC (opt1)
gggagaaagcuuaccaugggccagaucaucaccuucuuccaggaggugccccacgucaucgaggaggugaugaacaucgugcugaucgcccucagccugcuggccauccucaaggggaucuacaacgucgcgaccugcggccuguucgggcugguguccuuccuccugcugugcggccgcagcugcuccacgaccuacaaggggguguacgagcuccagacccuggagcuggacauggccagccucaacaugaccaugccgcuguccugcacgaagaacaacagccaccacuacaucauggucggcaacgagaccggccuggagcucacccugaccaacacguccaucaucaaccacaaguucugcaaccugagcgacgcccacaagaagaaccucuacgaccacgcccugauguccaucaucagcaccuuccaccuguccauccccaacuucaaccaguacgaggccaugagcugcgacuucaacgggggcaagaucuccgugcaguacaaccucagccacgcguacgccguggacgccgccaaccacugcgggaccaucgcgaacggcguccugcagaccuucaugcggauggccuggggcggguccuacaucgcccuggacagcggcaagggguccugggacugcaucaugacgagcuaccaguaccucaucauccagaacaccaccugggaggaccacugccaguucucccgccccagccccaucggcuaccuggggcugcucagccagcggacccgcgacaucuacaucucccggcgccugcugggcacguucaccuggacccucagcgacuccgagggcaacgagacccccgggggcuacugccugacgcgguggaugcugaucgaggccgagcucaagugcuucgggaacaccgccguggcgaagugcaacgagaagcacgacgaggaguucugcgacaugcugcgccuguucgacuucaacaagcaggccauccggcgccucaagaccgaggcccagaugagcauccagcugaucaacaaggccgugaacgcccugaucaacgaccagcucaucaugaagaaccaccuccgggacaucaugggcaucccguacugcaacuacuccaaguacugguaccugaaccacaccgucacggggaagaccagccugccccgcugcuggcugguguccaacggcagcuaccugaacgagacccacuucuccgacgacaucgagcagcaggcggacaacaugaucaccgagcuccugcagaaggaguacauggaccggcagggcaagacgccccuggggcucguggaccuguucgucuucagcaccuccuucuaccugaucagcaucuuccugcaccucaucaagaucccgacccaccgccacaucaccggcaagcccugccccaagccccaccggcugaaccacauggggaucugcuccugcggccuguacaagcacccgggggugcccgugaaguggaagcgcugaggacuaguuauaagacugacuagcccgaugggccucccaacgggcccuccuccccuccuugcaccgagauuaauaaaaaaaaaaaaaaaaaaaaaaaaaaaaaaaaaaaaaaaaaaaaaaaaaaaaaaaaaaaaaaaaugcaucccccccccccccccccccccccccccccccaaaggcucuuuucagagccaccagaauu

SEQ ID NO: 3352 - RNA, 1690 nt, Artificial Sequence
  mRNA product Design i-3 comprising derived and/or modified sequence from LASV(ISTH2010-NIG-2012;Clade II)__AIT17482__GPC (opt1)
gggagaaagcuuaccaugggccagaucaucaccuucuuccaggaggugccccacgucaucgaggaggugaugaacaucgugcugaucgcccucagccugcuggccauccucaaggggaucuacaacgucgcgaccugcggccuguucgggcugguguccuuccuccugcugugcggccgcagcugcuccacgaccuacaaggggguguacgagcuccagacccuggagcuggacauggccagccucaacaugaccaugccgcuguccugcacgaagaacaacagccaccacuacaucauggucggcaacgagaccggccuggagcucacccugaccaacacguccaucaucaaccacaaguucugcaaccugagcgacgcccacaagaagaaccucuacgaccacgcccugauguccaucaucagcaccuuccaccuguccauccccaacuucaaccaguacgaggccaugagcugcgacuucaacgggggcaagaucuccgugcaguacaaccucagccacgcguacgccguggacgccgccaaccacugcgggaccaucgcgaacggcguccugcagaccuucaugcggauggccuggggcggguccuacaucgcccuggacagcggcaagggguccugggacugcaucaugacgagcuaccaguaccucaucauccagaacaucaccugggaggaccacugccaguucucccgccccagccccaucggcuaccuggggcugcucagccagcggacccgcgacaucuacaucucccggcgccugcugggcaccuucacguggacccucagcgacuccgagggcaacgagacccccgggggcuacugccugacccgguggaugcugaucgaggccgagcucaagugcuucgggaacacggccguggcgaagugcaacgagaagcacgacgaggaguucugcgacaugcugcgccuguucgacuucaacaagcaggccauccggcgccucaagaccgaggcccagaugagcauccagcugaucaacaaggccgugaacgcccugaucaacgaccagcucaucaugaagaaccaccuccgggacaucaugggcauccccuacugcaacuacuccaaguacugguaccugaaccacaccgucaccgggaagacgagccugccccgcugcuggcugguguccaacggcagcuaccugaacgagacccacuucuccgacgacaucgagcagcaggcggacaacaugaucaccgagcuccugcagaaggaguacaucgaccggcagggcaagaccccgcuggggcucguggaccuguucgucuucagcacguccuucuaccugaucagcaucuuccugcaccucgugaagaucccgacccaccgccacguggucggcaagcccugccccaagccccaccggcugaaccacauggggaucugcuccugcggccuguacaagcacccgggggugcccgugaaguggaagcgcugaggacuaguuauaagacugacuagcccgaugggccucccaacgggcccuccuccccuccuugcaccgagauuaauaaaaaaaaaaaaaaaaaaaaaaaaaaaaaaaaaaaaaaaaaaaaaaaaaaaaaaaaaaaaaaaaugcaucccccccccccccccccccccccccccccccaaaggcucuuuucagagccaccagaauu

SEQ ID NO: 3353 - RNA, 1690 nt, Artificial Sequence
  mRNA product Design i-3 comprising derived and/or modified sequence from LASV(Lassa virus/H.sapiens-wt/NGA/2015/ISTH_0543;Clade II)__AVO03639__GPC (opt1)
gggagaaagcuuaccaugggccagaucaucaccuucuuccaggaggugccccacgucaucgaggaggugaugaacaucgugcugaucgcccucagccugcuggccauccucaaggggaucuacaacgucgcgaccugcggccuguucgggcugguguccuuccuccugcugugcggccgcagcugcuccacgaccuacaaggggguguacgagcuccagacccuggagcuggacauggccaaccucaacaugaccaugccgcugagcugcacgaagaacaacucccaccacuacaucauggucggcaacgagaccggccuggagcucacccugaccaacacgagcaucaucaaccacaaguucugcaaccuguccgacgcccacaagaagaaccucuacgaccacgcccugaugagcaucaucuccaccuuccaccugagcauccccaacuucaaccaguacgaggccauguccugcgacuucaacgggggcaagaucagcgugcaguacaaccucucccacaccuacgcgguggacgccgccaaccacugcgggaccaucgccaacggcguccugcagacguucaugcggauggcguggggcgggagcuacaucgcccuggacuccggcaaggggagcugggacugcaucaugaccuccuaccaguaccucgugauccagaacaccaccugggaggaccacugccaguucagccgccccucccccaucggcuaccuggggcugcucagccagcggacgcgcgacaucuacaucagccggcgccugcugggcaccuucaccuggacccucuccgacagcgagggcaacgagacgcccgggggcuacugccugacccgguggaugcugaucgaggccgagcucaagugcuucgggaacaccgccguggccaagugcaacgagaagcacgacgaggaguucugcgacaugcugcgccuguucgacuucaacaagcaggcgauccggcgccucaagaccgaggcccagauguccauccagcugaucaacaaggccgucaacgcccugaucaacgaccagcucaucaugaagaaccaccuccgggacaucaugggcauccccuacugcaacuacagcaaguacugguaccugaaccacacggugaccgggaagaccucccugccccgcugcuggcuggugagcaacggcuccuaccugaacgagacccacuucagcgacgacaucgagcagcaggccgacaacaugaucacggagcuccugcagaaggaguacaucgaccggcagggcaagaccccgcuggggcucgucgaccuguucguguucuccaccagcuucuaccugaucuccaucuuccugcaccucgugaagaucccgacccaccgccacaucacgggcaagcccugccccaagccccaccggcugaaccacauggggaucugcagcugcggccuguacaagcacccggggguccccgugaaguggaagcgcugaggacuaguuauaagacugacuagcccgaugggccucccaacgggcccuccuccccuccuugcaccgagauuaauaaaaaaaaaaaaaaaaaaaaaaaaaaaaaaaaaaaaaaaaaaaaaaaaaaaaaaaaaaaaaaaaugcaucccccccccccccccccccccccccccccccaaaggcucuuuucagagccaccagaauu

SEQ ID NO: 3354 - RNA, 1690 nt, Artificial Sequence
  mRNA product Design i-3 comprising derived and/or modified sequence from LASV(Lassa virus/H.sapiens-wt/NGA/2016/ISTH_0009;Clade II)__AVO03571__GPC (opt1)
gggagaaagcuuaccaugggccagaucaucaccuucuuccaggaggugccccacgucaucgaggaggugaugaacaucgugcugaucgcccucagccugcuggccauccucaaggggaucuacaacgucgcgaccugcggccugcuggggcucguguccuuccugcugcucugcggccgcagcugcuccacgaccuacaaggggguguacgagcugcagacccuggagcucgacauggccagccugaacaugaccaugccgcuguccugcacgaagaacaacagccaccacuacaucauggucggcaacgagaccggccucgagcugacccugaccaacacguccaucaucaaccacaaguucugcaaccucagcgacgcccacaagaagaaccuguacgaccacgcccugauguccaucaucagcaccuuccaccucuccauccccaacuucaaccaguacgaggccaugagcugcgacuucaacgggggccggaucuccgugcaguacaaccugagccacuccuacgcgguggacgccgccaaccacugcgggaccaucgccaacggcguccugcagaccuucaugcgcauggcguggggcgggagcuacaucgcccucgacuccggcaaggggagcugggacugcaucaugacguccuaccaguaccugaucauccagaacaccaccugggaggaccacugccaguucagccggcccagccccaucggcuaccuggggcuccugucccagcgcacccgggacaucuacaucagccgccggcugcucggcacguucaccuggacccuguccgacagcgagggcaacgagacccccgggggcuacugccugacgcgcuggaugcucaucgaggccgagcugaagugcuucgggaacaccgccguggccaagugcaacgagaagcacgacgaggaguucugcgacaugcugcggcuguucgacuucaacaagcaggcgauccgccggcugaagaccgaggcccagauguccauccagcugaucaacaaggccgugaacgcccucaucaacgaccagcugaucaugaagaaccaccuccgcgacaucaugggcaucccguacugcaacuacagcaaguacugguaccucaaccacaccgucacggggaagaccucccugccccggugcuggcuggugagcaacggcuccuaccucaacgagacccacuucagcgacgacaucgagcagcaggccgacaacaugaucaccgagcugcugcagaaggaguacaucgaccgccagggcaagacgccccucgggcugguggaccuguucgucuucuccaccagcuucuaccugaucuccaucuuccuccaccuggugaagaucccgacccaccggcacaucaccggcaagcccugccccaagccccaccgccugaaccacauggggaucugcagcugcggccucuacaaccacccgggggugcccgucaaguggaagcggugaggacuaguuauaagacugacuagcccgaugggccucccaacgggcccuccuccccuccuugcaccgagauuaauaaaaaaaaaaaaaaaaaaaaaaaaaaaaaaaaaaaaaaaaaaaaaaaaaaaaaaaaaaaaaaaaugcaucccccccccccccccccccccccccccccccaaaggcucuuuucagagccaccagaauu

SEQ ID NO: 3355 - RNA, 1690 nt, Artificial Sequence
  mRNA product Design i-3 comprising derived and/or modified sequence from LASV(Lassa virus/H.sapiens-wt/NGA/2016/ISTH_0017;Clade II)__AVO03567__GPC (opt1)
gggagaaagcuuaccaugggccagaucaucaccuucuuccaggaggugccccacgucaucgaggaggugaugaacaucgugcugaucgcccucagccugcuggccauccucaaggggaucuacaacgucgcgaccugcggccuguucgggcugguguccuuccuccugcugugcggccgcagcugcuccacgaccuacaaggggguguacgagcuccagacccuggagcuggacauggccagccucaacaugaccaugccgcuguccugcacgaagaacaacagccaccacuacaucauggucggcaacgagaccggccuggagcucacccugaccaacacguccaucaucaaccacaaguucugcaaccugagcgacgcccacaagaagaaccucuacgaccacgcccugauguccaucaucagcaccuuccaccuguccauccccaacuucaaccaguacgaggccaugagcugcgacuucaacgggggcaagaucuccgugcaguacaaccucagccacaccuacgcgaucgacgccgccaaccacugcgggaccaucgccaacggcgugcugcagacguucaugcggauggcguggggcggguccuacaucgcccuggacagcggcaagggguccugggacugcaucaugaccagcuaccaguaccucaucauccagaacaccaccugggaggaccacugccaguucucccgccccagccccaucggcuaccuggggcugcucagccagcggacgcgcgacaucuacaucucccggcgccugcugggcaccuucaccuggacccucagcgacuccgagggcaacgagacgcccgggggcuacugccugacccgguggaugcugaucgaggccgagcucaagugcuucgggaacaccgccgucgccaagugcaacgagaagcacgacgaggaguucugcgacaugcugcgccuguucgacuucaacaagcaggcgauccggcgccucaagaccgaggcccagaugagcauccagcugaucaacaaggccgugaacgcccugaucaacgaccagcucaucaugaagaaccaccuccgggacaucaugggcauccccuacugcaacuacuccaaguacugguaccugaaccacacggugaccgggaagaccagccugccccgcugcuggcuggucuccaacggcagcuaccugaacgagacccacuucuccgacgacaucgagcagcaggccgacaacaugaucacggagcuccugcagaaggaguacauggaccggcagggcaagaccccgcuggggcucguggaccuguucguguucagcaccuccuucuaccugaucagcaucuuccugcaccucguccgcaucccgacccaccggcacgugaucggcaagcccugccccaagccccaccgccugaaccacauggggaucugcuccugcggccuguacaagcacccgggggugcccgucaaguggaagcggugaggacuaguuauaagacugacuagcccgaugggccucccaacgggcccuccuccccuccuugcaccgagauuaauaaaaaaaaaaaaaaaaaaaaaaaaaaaaaaaaaaaaaaaaaaaaaaaaaaaaaaaaaaaaaaaaugcaucccccccccccccccccccccccccccccccaaaggcucuuuucagagccaccagaauu

SEQ ID NO: 3356 - RNA, 1690 nt, Artificial Sequence
  mRNA product Design i-3 comprising derived and/or modified sequence from LASV(Lassa virus/H.sapiens-wt/NGA/2018/ISTH_0959;Clade II)__AVV65099__GPC (opt1)
gggagaaagcuuaccaugggccagaucaucaccuucuuccaggaggugccccacgucaucgaggaggugaugaacaucgugcugaucgcccucagccugcuggccauccucaaggggaucuacaacgucgugaccugcggccuguucgggcugguguccuuccuccugcugugcggccgcagcugcuccacgaccuacaagggggucuacgagcuccagacccuggagcuggacauggcgagccucaacaugaccaugccgcuguccugcacgaagaacaacagccaccacuacaucauggugggcaacgagaccggccuggagcucacccugaccaacacguccaucaucaaccacaaguucugcaaccugagcgacgcccacaagaagaaccucuacgaccacgcccugauguccaucaucagcaccuuccaccuguccauccccaacuucaaccaguacgaggccaugagcugcgacuucaacgggggcaagaucuccgugcaguacaaccucagccacgccuacgcgaucgacgccgccaaccacugcgggaccaucgccaacggcguccugcagaccuucaugcggauggcguggggcggguccuacaucgcccuggacagcggcaagggguccugggacugcaucaugacgagcuaccaguaccucaucauccagaacaccaccugggaggaccacugccaguucucccgccccagccccaucggcuaccuggggcugcucagccagcggacccgcgacaucuacaucucccggcgccugcugggcacguucaccuggacccucagcgacuccgagggcaacgagacccccgggggcuacugccugacgcgguggaugcugaucgaggccgagcucaagugcuucgggaacaccgccguggccaagugcaacgagaagcacgacgaggaguucugcgacaugcugcgccuguucgacuucaacaagcaggcgauccggcgccucaagaccgaggcccagaugagcauccagcugaucaacaaggccgugaacgcccugaucaacgaccagcucaucaugaagaaccaccuccgggacaucaugggcaucccguacugcaacuacuccaaguacugguaccugaaccacaccgucacggggaagaccagccugccccgcugcuggcugguguccaacggcagcuaccugaacgagacccacuucuccgacgacaucgagcagcaggccgacaacaugaucaccgagcuccugcagaaggaguacaucgaccggcagggcaagacgccccuggggcucguggaccuguucgucuucagcaccuccuucuaccugaucagcaucuuccugcaccucgugaagaucccgacccaccgccacgugaucggcaagcccugccccaagccccaccggcugaaccacauggggaucugcuccugcggccuguacaagcacccggggguccccgugaaguggaagcgcugaggacuaguuauaagacugacuagcccgaugggccucccaacgggcccuccuccccuccuugcaccgagauuaauaaaaaaaaaaaaaaaaaaaaaaaaaaaaaaaaaaaaaaaaaaaaaaaaaaaaaaaaaaaaaaaaugcaucccccccccccccccccccccccccccccccaaaggcucuuuucagagccaccagaauu

SEQ ID NO: 3357 - RNA, 1690 nt, Artificial Sequence
  mRNA product Design i-3 comprising derived and/or modified sequence from LASV(LASV003-NIG-2008;Clade II)__AIT17580__GPC (opt1)
gggagaaagcuuaccaugggccagaucaucaccuucuuccaggaggugccccacgucaucgaggaggugaugaacaucgugcugaucgcccucagccugcuggccauccucaaggggaucuacaacgucgcgaccugcggccuguucgggcugguguccuuccuccugcugugcggccgcagcugcuccacgaccuacaaggggguguacgagcuccagacccuggagcuggacauggccagccucaacaugaccaugccgcuguccugcacgaagaacaacagccaccacuacaucauggucggcaacgagaccggccuggagcucacccugaccaacacguccaucaucaaccacaaguucugcaaccugagcgacgcccacaagaagaaccucuacgaccacgcccugauguccaucaucagcaccuuccaccuguccauccccaacuucaaccaguacgaggccaugagcugcgacuucaacgggggcaagaucuccgugcaguacaaccucagccacaccuacgcgguggacgccgccaaccacugcgggaccaucgccaacggcguccugcagacguucaugcggauggcguggggcggguccuacaucgcccuggacagcggcaagggguccugggacugcaucaugaccagcuaccaguaccucaucauccagaacaccaccugggaggaccacugccaguucucccgccccagccccaucggcuaccuggggcugcucagccagcggacgcgcgacaucuacaucucccggcgccugcugggcaccuucaccuggacccucagcgacuccgagagcaacgagacgccgggcggguacugccugacccgguggaugcugaucgaggccgagcucaagugcuucggcaacaccgccguggccaagugcaacgagaagcacgacgaggaguucugcgacaugcugcgccuguucgacuucaacaagcaggcgauccggcgccucaaggccgaggcccagauguccauccagcugaucaacaaggccgugaacgcccugaucaacgaccagcucaucaugaagaaccaccuccgggacaucauggggauccccuacugcaacuacagcaaguacugguaccugaaccacaccgucacgggccgcaccucccugccccggugcuggcuggugagcaacggguccuaccugaacgagacccacuucagcgacgacaucgagcagcaggcggacaacaugaucaccgagcuccugcagaaggaguacauggaccgccagggcaagacgccccugggccucguggaccuguucgucuucuccaccagcuucuaccugaucuccaucuuccugcaccucgugaagaucccgacccaccggcacgugaucgggaagcccugccccaagccccaccgccugaaccacaugggcaucugcagcugcgggcuguacaagcacccgggcguccccgugaaguggaagcggugaggacuaguuauaagacugacuagcccgaugggccucccaacgggcccuccuccccuccuugcaccgagauuaauaaaaaaaaaaaaaaaaaaaaaaaaaaaaaaaaaaaaaaaaaaaaaaaaaaaaaaaaaaaaaaaaugcaucccccccccccccccccccccccccccccccaaaggcucuuuucagagccaccagaauu

SEQ ID NO: 3358 - RNA, 1690 nt, Artificial Sequence
  mRNA product Design i-3 comprising derived and/or modified sequence from LASV(LASV035-NIG-2009;Clade II)__AIT17588__GPC (opt1)
gggagaaagcuuaccaugggccagaucaucaccuucuuccaggaggugccccacgucaucgaggaggugaugaacaucgugcugaucgcccucagccugcuggccauccucaaggggaucuacaacgucgcgaccugcggccuguucgggcugguguccuuccuccugcugugcggccgcagcugcuccacgaccuacaaggggguguacgagcuccagacccuggagcuggacauggccagccucaacaugaccaugccgcuguccugcacgaagaacaacagccaccacuacaucauggucggcaacgagaccggccuggagcucacccugaccaacacguccaucaucaaccacaaguucugcaaccugagcgacgcccacaagaagaaccucuacgaccacgcccugauguccaucaucagcaccuuccaccuguccauccccaacuucaaccaguacgaggccaugagcugcgacuucaacgggggcaagaucuccgugcaguacaaccucagccacgcguacgccguggacgccgccaaccacugcgggaccaucgcgaacggcguccugcagaccuucaugcggauggccuggggcggguccuacaucgcccuggacagcggcaagggguccugggacugcaucaugacgagcuaccaguaccucaucauccagaacaccaccugggaggaccacugccaguucucccgccccagccccaucggcuaccuggggcugcucagccagcggacccgcgacaucuacaucucccggcgccugcugggcacguucaccuggacccucagcgacuccgagggcaacgagacccccgggggcuacugccugacgcgguggaugcugaucgaggccgagcucaagugcuucgggaacaccgccguggcgaagugcaacgagaagcacgacgaggaguucugcgacaugcugcgccuguucgacuucaacaagcaggccauccggcgccucaaggccgaggcccagaugagcauccagcugaucaacaaggccgugaacgcgcugaucaacgaccagcucaucaugaagaaccaccuccgggacaucaugggcauccccuacugcaacuacuccaaguacugguaccugaaccacaccgucaccgggaagacgagccugccccgcugcuggcugguguccaacggcagcuaccugaacgagacccacuucuccgacgacaucgagcagcaggccgacaacaugaucaccgagcuccugcagaaggaguacaucgaccggcagggcaagaccccgcuggggcucguggaccuguucgucuucagcacguccuucuaccugaucagcaucuuccugcaccucgugaagaucccgacccaccgccacgugaucggcaagcccugccccaagccccaccggcugaaccacauggggaucugcuccugcggccuguacaagcacccggggguccccgugaaguggaagcgcugaggacuaguuauaagacugacuagcccgaugggccucccaacgggcccuccuccccuccuugcaccgagauuaauaaaaaaaaaaaaaaaaaaaaaaaaaaaaaaaaaaaaaaaaaaaaaaaaaaaaaaaaaaaaaaaaugcaucccccccccccccccccccccccccccccccaaaggcucuuuucagagccaccagaauu

SEQ ID NO: 3359 - RNA, 1690 nt, Artificial Sequence
  mRNA product Design i-3 comprising derived and/or modified sequence from LASV(LASV1000-NIG-2009;Clade II)__AIT17782__GPC (opt1)
gggagaaagcuuaccaugggccagaucaucaccuucuuccaggaggugccccacgucaucgaggaggugaugaacaucgugcugaucgcccucagccugcuggccauccucaaggggaucuacaacgucgcgaccugcggccuguucgggcugguguccuuccuccugcugugcggccgcagcugcuccacgaccuacaaggggguguacgagcuccagacccuggagcuggacauggccagccucaacaugaccaugccgcuguccugcacgaagaacaacagccaccacuacaucauggucggcaacgagaccggccuggagcucacccugaccaacacguccaucaucaaccacaaguucugcaaccugagcgacgcccacaagaagaaccucuacgaccacgcccugauguccaucaucagcaccuuccaccuguccauccccaacuucaaccaguacgaggccaugagcugcgacuucaacgggggcaagaucuccgugcaguacaaccucagccacaccuacgcgguggacgccgccaaccacugcgggaccaucgccaacggcguccugcagacguucaugcggauggcguggggcggguccuacaucgcccuggacagcggcaagggguccugggacugcaucaugaccagcuaccaguaccucaucauccagaacaccaccugggaggaccacugccaguucucccgccccagccccaucggcuaccuggggcugcucagccagcggacgcgcgacaucuacaucucccggcgccugcugggcaccuucaccuggacccucagcgacuccgagggcaacgagacgcccgggggcuacugccugacccgguggaugcugaucgaggccgagcucaagugcuucgggaacaccgccguggccaagugcaacgagaagcacgacgaggaguucugcgacaugcugcgccuguucgacuucaacaagcaggcgaucaagcggcucaagaccgaggcccagaugagcauccagcugaucaacaaggccgugaacgcccugaucaacgaccagcucaucaugaagaaccaccuccgcgacaucaugggcauccccuacugcaacuacuccaaguacugguaccugaaccacacggucaccgggaagaccagccugccccggugcuggcugguguccaacggcagcuaccugaacgagacccacuucuccgacgacaucgagcagcaggccgacaacaugaucacggagcuccugcagaaggaguacaucgaccgccagggcaagaccccgcuggggcucguggaccuguucgucuucagcaccuccuucuaccugaucagcaucuuccugcaccucgugaagaucccgacccaccggcacguggucggcaagcccugccccaagccccaccgccugaaccacauggggaucugcuccugcggccuguacaagcacccgggggugcccgugaaguggaagcggugaggacuaguuauaagacugacuagcccgaugggccucccaacgggcccuccuccccuccuugcaccgagauuaauaaaaaaaaaaaaaaaaaaaaaaaaaaaaaaaaaaaaaaaaaaaaaaaaaaaaaaaaaaaaaaaaugcaucccccccccccccccccccccccccccccccaaaggcucuuuucagagccaccagaauu

SEQ ID NO: 3360 - RNA, 1690 nt, Artificial Sequence
  mRNA product Design i-3 comprising derived and/or modified sequence from LASV(LASV221-NIG-2010;Clade II)__AIT17624__GPC (opt1)
gggagaaagcuuaccaugggccagaucaucaccuucuuccaggaggugccccacgucaucgaggaggugaugaacaucgugcugaucgcccucagccugcuggccauccucaaggggaucuacaacgucgcgaccugcggccuguucgggcugguguccuuccuccugcugugcggccgcagcugcuccacgaccuacaaggggguguacgagcuccagacccuggagcuggacauggccagccucaacaugaccaugccgcuguccugcacgaagaacaacagccaccacuacaucauggucggcaacgagaccggccuggagcucacccugaccaacacguccaucaucaaccacaaguucugcaaccugagcgacgcccacaagaagaaccucuacgaccacgcccugauguccaucaucagcaccuuccaccuguccauccccaacuucaaccaguacgaggccaugagcugcgacuucaacgggggcaagaucuccgugcaguacaaccucagccacaccuacgcgaucgacgccgccaaccacugcgggaccaucgccaacggcgugcugcagacguucaugcggauggcguggggcggguccuacaucgcccuggacagcggcaagggguccugggacugcaucaugaccagcuaccaguaccucaucauccagaacaccaccugggaggaccacugccaguucucccgccccagccccaucggcuaccuggggcugcucagccagcggacgcgcgacaucuacaucucccggcgccugcugggcaccuucaccuggacccucagcgacuccgagggcaacgagacgcccgggggcuacugccugacccgguggaugcugaucgaggccgagcucaagugcuucgggaacaccgccgucgccaagugcaacgagaagcacgacgaggaguucugcgacaugcugcgccuguucgacuucaacaagcaggcgauccggcgccucaagaccgaggcccagaugagcauccagcugaucaacaaggccgugaacgcccugaucaacgaccagcucaucaugaagaaccaccuccgggacaucaugggcauccccuacugcaacuacuccaaguacugguaccugaaccacacggugaccgggaagaccagccugccccgcugcuggcuggucuccaacggcagcuaccugaacgagacccacuucuccgacgacaucgagcagcaggccgacaacaugaucacggagaugcuccagaaggaguacauggaccggcagggcaagaccccgcuggggcugguggaccucuucguguucagcaccuccuucuaccugaucagcaucuuccugcaccuggucaagaucccgacccaccgccacgugaucggcaagcccugccccaagccccaccggcucaaccacauggggaucugcuccugcggccuguacaagcacccgggggugcccgucaaguggaagcgcugaggacuaguuauaagacugacuagcccgaugggccucccaacgggcccuccuccccuccuugcaccgagauuaauaaaaaaaaaaaaaaaaaaaaaaaaaaaaaaaaaaaaaaaaaaaaaaaaaaaaaaaaaaaaaaaaugcaucccccccccccccccccccccccccccccccaaaggcucuuuucagagccaccagaauu

SEQ ID NO: 3361 - RNA, 1690 nt, Artificial Sequence
  mRNA product Design i-3 comprising derived and/or modified sequence from LASV(LASV237-NIG-2010;Clade II)__AIT17638__GPC (opt1)
gggagaaagcuuaccaugggccagaucaucaccuucuuccaggaggugccccacgucaucgaggaggugaugaacaucgugcugaucgcccucagccugcuggccauccucaaggggaucuacaacgucgcgaccugcggccuguucgggcugguguccuuccuccugcugugcggccgcagcugcuccacgaccuacaaggggguguacgagcuccagacccuggagcuggacauggccagccucaacaugaccaugccgcuguccugcacgaagaacaacagccaccacuacaucauggucggcaacgagaccggccuggagcucacccugaccaacacguccaucaucaaccacaaguucugcaaccugagcgacgcccacaagaaggaccucuacgaccacgcccugauguccaucaucagcaccuuccaccuguccauccccaacuucaaccaguacgaggccaugagcugcgacuucaacgggggcaagaucuccgugcaguacaaccucagccacaccuacgcgguggacgccgccaaccacugcgggaccaucgccaacggcguccugcagacguucaugcggauggcguggggcggguccuacaucgcccuggacagcggcaagggguccugggacugcaucaugaccagcuaccaguaccucaucauccagaacaccaccugggaggaccacugccaguucucccgccccagccccaucggcuaccuggggcugcucagccagcggacgcgcgacaucuacaucucccggcgccugcugggcaccuucaccuggacccucagcgacuccgagggcaacgagacgcccgggggcuacugccugacccgguggaugcugaucgaggccgagcucaagugcuucgggaacaccgccguggccaagugcaacgagaagcacgacgaggaguucugcgacaugcugcgccuguucgacuucaacaagcaggcgauccggcgccucaagaccgaggcccagaugagcauccagcugaucaacaaggccgugaacgcccugaucaacgaccagcucaucaugaagaaccaccuccgggacaucaugggcauccccuacugcaacuacuccaaguacugguaccugaaccacacggucaccgggaagaccagccugccccgcugcuggcugguguccaacggcagcuaccugaacgagacccacuucuccgacgacaucgagcagcaggccgacaacaugaucacggagcuccugcagaaggaguacauggaccggcagggcaagaccccgcuggggcucguggaccuguucgucuucagcaccuccuucuaccugaucagcaucuuccugcaccucaucaagaucccgacccaccgccacaucacgggcaagcccugccccaagccccaccggcugaaccacauggggaucugcuccugcggccuguacaagcacccgggggugcccgugaaguggaagcgcugaggacuaguuauaagacugacuagcccgaugggccucccaacgggcccuccuccccuccuugcaccgagauuaauaaaaaaaaaaaaaaaaaaaaaaaaaaaaaaaaaaaaaaaaaaaaaaaaaaaaaaaaaaaaaaaaugcaucccccccccccccccccccccccccccccccaaaggcucuuuucagagccaccagaauu

SEQ ID NO: 3362 - RNA, 1690 nt, Artificial Sequence
  mRNA product Design i-3 comprising derived and/or modified sequence from LASV(LASV253-NIG-2011;Clade II)__AIT17670__GPC (opt1)
gggagaaagcuuaccaugggccagaucaucaccuucuuccaggaggugccccacgucaucgaggaggugaugaacaucgugcugaucgcccucagccugcuggccauccucaaggggaucuacaacgucgcgaccugcggccuguucgggcugguguccuuccuccugcugugcggccgcagcugcuccacgaccuacaaggggguguacgagcuccagacccuggagcuggacauggccagccucaacaugaccaugccgcuguccugcacgaagaacaacagccaccacuacaucauggucggcaacgagaccggccuggagcucacccugaccaacacguccaucaucaaccacaaguucugcaaccugagcgacgcccacaagaagaaccucuacgaccacgcccugauguccaucaucagcaccuuccaccuguccauccccaacuucaaccaguacgaggccaugagcugcgacuucaacgggggcaagaucuccgugcaguacaaccucagccacaccuacgcgguggacgccgccaaccacugcgggaccaucgccaacggcguccugcagacguucaugcggauggcguggggcggguccuacaucgcccuggacagcggcaagggguccugggacugcaucaugaccagcuaccaguaccucaucauccagaacaccaccugggaggaccacugccaguucucccgccccagccccaucggcuaccuggggcugcucagccagcggacgcgcgacaucuacaucucccggcgccugcugggcaccuucaccuggacccucagcgacuccgagggcaacgagacgcccgggggcuacugccugacccgguggaugcugaucgaggccgagcucaagugcuucgggaacaccgccguggccaagugcaacgagaagcacgacgaggaguucugcgacaugcugcgccuguucgacuucaacaagcaggcgauccggcgccucaaggccgaggcccagaugagcauccagcugaucaacaaggccgugaacgcccugaucaacgaccagcucaucaugaagaaccaccuccgggacaucaugggcaucccguacugcaacuacuccaaguacugguaccugaaccacaccgucacggggcgcaccagccugccccggugcuggcugguguccaacggcagcuaccugaacgagacccacuucuccgacgacaucgagcagcaggcggacaacaugaucaccgagcuccugcagaaggaguacaucgaccgccagggcaagacgccccuggggcucguggaccuguucgucuucagcaccuccuucuaccugaucagcaucuuccugcaccucgugaagaucccgacccaccggcacaucaucggcaagcccugccccaagccccaccgccugaaccacauggggaucugcuccugcggccuguacaagcacccgggggugcccgucaaguggaagcggugaggacuaguuauaagacugacuagcccgaugggccucccaacgggcccuccuccccuccuugcaccgagauuaauaaaaaaaaaaaaaaaaaaaaaaaaaaaaaaaaaaaaaaaaaaaaaaaaaaaaaaaaaaaaaaaaugcaucccccccccccccccccccccccccccccccaaaggcucuuuucagagccaccagaauu

SEQ ID NO: 3363 - RNA, 1690 nt, Artificial Sequence
  mRNA product Design i-3 comprising derived and/or modified sequence from LASV(LASV254-NIG-2011;Clade II)__AIT17674__GPC (opt1)
gggagaaagcuuaccaugggccagaucaucaccuucuuccaggaggugccccacgucaucgaggaggugaugaacaucgugcugaucgcccucagccugcuggccauccucaaggggaucuacaacgucgcgaccugcggccuguucgggcugguguccuuccuccugcugugcggccgcagcugcuccacgaccuacaaggggguguacgagcuccagacccuggagcuggacaugaccaaccucaacaugacgaugccgcugagcugcaccaagaacaacucccaccacuacaucauggucggcaacgagaccggccuggagcucacccugacgaacaccagcaucaucaaccacaaguucugcaaccuguccgacgcccacaagaagaaccucuacaaccacgcccugaugagcaucaucuccaccuuccaccugagcauccccaacuucaaccaguacgaggccauguccugcgacuucaacgggggcaagaucagcgugcaguacaaccucucccacagcuacgccguggacgcggccaaccacugcgggaccaucgccaacggcguccugcagacguucaugcggauggccuggggcggguccuacaucgcgcuggacagcggcaaggggaacugggacugcaucaugaccuccuaccaguaccucaucauccagaacaccaccugggaggaccacugccaguucagccgccccucccccaucggcuaccuggggcugcucagccagcggacgcgcgacaucuacaucagccggcgccugcugggcaccuucaccuggacccucuccgacagcgagggcaacgagacgcccgggggcuacugccugacccgguggaugcugaucgaggccgagcucaagugcuucgggaacaccgccguggccaagugcaacgagaagcacgacgaggaguucugcgacaugcugcgccuguucgacuucaacaagcaggccauccggcgccucaagaccgaggcgcaggccaacauccagcugaucaacaaggccgugaacgcccugaucaacgaccagcucaucaugaagaaccaccuccgggacaucaugggcauccccuacugcaacuacuccaaguacugguaccugaaccacacggucaccgggaagaccagccugccccgcugcuggcugguguccaacggcagcuaccugaacgagacccacuucuccgacgacaucgagcagcaggccgacaacaugaucacggagcuccugcagaaggaguacauggaccggcagggcaagaccccgcuggggcucguggaccuguucgucuucagcaccuccuucuaccugaucagcaucuuccugcaccucgugaagaucccgacccaccgccacgugaucggcaagcccugccccaagccccaccggcugaaccacauggggaucugcuccugcggccuguacaagcacccggggguccccgugaaguggaagcgcugaggacuaguuauaagacugacuagcccgaugggccucccaacgggcccuccuccccuccuugcaccgagauuaauaaaaaaaaaaaaaaaaaaaaaaaaaaaaaaaaaaaaaaaaaaaaaaaaaaaaaaaaaaaaaaaaugcaucccccccccccccccccccccccccccccccaaaggcucuuuucagagccaccagaauu

SEQ ID NO: 3364 - RNA, 1690 nt, Artificial Sequence
  mRNA product Design i-3 comprising derived and/or modified sequence from LASV(Nig08-A19;Clade III)__ADU56618__GPC (opt1)
gggagaaagcuuaccaugggccagaucgugaccuucuuccaggaggucccccacgugaucgaggaggugaugaacaucguccugaucgcccucagcauccuggccauccugaaggggcucuacaacaucgcgaccugcggccugaucgggcuggugacguuccuccugcuguccggccgcagcugcuccaugaccuacaaggggguguacgagcuccagacccuggagcugaacaugaacacccucaacaugacgaugccgcugagcugcaccaagaacaacucccaccacuacaucauggucggcaacgagaccggccuggagcucacccugacgaacaccagccugcuccaccacaaguucugcaaccuguccgacgcccacaagaagaaccuguacgaccacacccucaugagcaucaucuccaccuuccaccugagcauccccaacuucaaccaguacgaggccauguccugcgacuucaacgggggcaagaucacggugcaguacaaccugagccacuccuacgccaucgacgccgcgaaccacugcgggaccguggccaacggcguccuccagaccuucaugcggauggccuggggcgggagcuacaucgcccuggacuccggccgcgggaagugggacugcaucaugaccagcuaccaguaccugaucauccagaacacgaccugggaggaccacugccaguucucccggcccagccccaucggcuaccucgggcugcugucccagcgcacccgggacaucuacaucagccgccggcuccugggcaccuucacguggacccugagcgacuccgagggcaacgagacccccgggggcuacugccucacccgcuggaugcugaucgaggcggagcugaagugcuucgggaacacggccguggccaagugcaacgagaagcacgacgaggaguucugcgacaugcuccggcuguucgacuucaacaagcaggccauccgccggcugaaggccgaggcgcagaugagcauccagcucaucaacaaggccgugaacgcccugaucaacgaccagcugaucaugaagaaccaccuccgcgacaucaugggcauccccuacugcaacuacuccaaguacugguaccugaaccacaccagcaccgggcggaccucccugccccgcugcuggcucgucagcaacggcuccuaccugaacgagacgcacuucagcgacgacaucgagcagcaggccgacaacaugaucaccgagaugcugcagaaggaguaccucgaccggcagggcaagaccccgcuggggcugguggaccuguucguguucuccaccagcuucuaccucaucuccaucuuccugcaccuggucaagaucccgacgcaccgccacaucgugggcaagcccugccccaagccccaccggcucaaccacauggggaucugcagcugcggccuguacaagcagccgggggugcccguccgcuggaagcggugaggacuaguuauaagacugacuagcccgaugggccucccaacgggcccuccuccccuccuugcaccgagauuaauaaaaaaaaaaaaaaaaaaaaaaaaaaaaaaaaaaaaaaaaaaaaaaaaaaaaaaaaaaaaaaaaugcaucccccccccccccccccccccccccccccccaaaggcucuuuucagagccaccagaauu

SEQ ID NO: 3365 - RNA, 1693 nt, Artificial Sequence
  mRNA product Design i-3 comprising derived and/or modified sequence from LASV(G1180-SLE-2010;Clade IV)__AIT17168__GPC (opt1)
gggagaaagcuuaccaugggccagaucgugaccuucuuccaggaggucccccacgugaucgaggaggugaugaacaucguccugaucgcccucagcauccuggccgugcugaaggggcucuacaacuucgcgaccugcggccugguggggcugcucaccuuccugcugcucugcggccgcuccugcaccgccagccgguacaagggggucuacgagcugcagacccuggagcucaacauggagacccugaacaugacgaugccgcuguccugcaccaagaacaacagccaccacuacaucauggugggcaacgagaccggccucgagcugacccugacgaacaccuccaucaucaaccacaaguucugcaaccucagcgacgcccacaagaagaaccuguacgaccacgcccugauguccaucaucagcaccuuccaccucuccauccccaacuucaaccaguacgaggccaugagcugcgacuucaacgggggcaagaucuccgugcaguacaaccugagccacuccuacgcgggggacgccgccaaccacugcggcaccgucgccaacggggugcugcagacguucaugcgcauggcguggggcggcagcuacaucgcccucgacuccgggcacggcagcugggacugcaucaugaccuccuaccaguaccugaucauccagaacaccaccugggaggaccacugccaguucagccggcccucccccaucggguaccugggccuccugagccagcgcacgcgggacaucuacaucagccgccggcugcucggcaccuucaccuggacccuguccgacagcgaggggaaggacacgccgggcggguacugccugacccgcuggaugcucaucgaggccgagcugaagugcuucggcaacaccgccguggccaagugcaacgagaagcacgacgaggaguucugcgacaugcugcggcuguucgacuucaacaagcaggcgauccagcgccugaaggccgaggcccagauguccauccagcugaucaacaaggccgucaacgcccucaucaacgaccagcugaucaugaagaaccaccuccgggacaucauggggauccccuacugcaacuacagcaaguacugguaccucaaccacaccacgaccggcaagaccucccugcccaagugcuggcuggugagcaacggcuccuaccucaacgagacccacuucagcgacgacaucgagcagcaggcggacaacaugaucacggagaugcugcagaaggaguacauggagcgccaggggaagacgccccugggccucguggaccuguucgucuucuccaccagcuucuaccugaucuccaucuuccugcaccucgugaagaucccgacccaccggcacaucgugggcaagagcugccccaagccccaccgccugaaccacauggggaucugcuccugcgggcuguacaagcagcccggcgucccggugaaguggaagcggugaggacuaguuauaagacugacuagcccgaugggccucccaacgggcccuccuccccuccuugcaccgagauuaauaaaaaaaaaaaaaaaaaaaaaaaaaaaaaaaaaaaaaaaaaaaaaaaaaaaaaaaaaaaaaaaaugcaucccccccccccccccccccccccccccccccaaaggcucuuuucagagccaccagaauu

SEQ ID NO: 3366 - RNA, 1693 nt, Artificial Sequence
  mRNA product Design i-3 comprising derived and/or modified sequence from LASV(G1442-SLE-2011;Clade IV)__AIT17180__GPC (opt1)
gggagaaagcuuaccaugggccagaucgugaccuucuuccaggaggucccccacgugaucgaggaggugaugaacaucguccugaucgcccucagcauccuggccgugcugaaggggcucuacaacguggcgaccugcggccugaucgggcuggucacguuccuccugcugugcggccgcuccugcaccaccacccucuacaaggggguguacgagcugcagacgcuggagcucaacauggagacccugaacaugaccaugccgcugagcugcaccaagaacaacucccaccacuacauccgggugggcaacgagacgggccucgagcugacccugaccaacaccagcaucaucaaccacaaguucugcaaccucuccgacgcccacaagaagaaccuguacgaccacgcccugaugagcaucaucuccacguuccaccucagcauccccaacuucaaccaguacgaggccauguccugcgacuucaacgggggcaagaucagcguccaguacaaccugucccacagcuacgccggggacgcggccaaccacugcggcaccguggccaacggggugcugcagaccuucaugcgcauggccuggggcggcuccuacaucgcgcucgacagcgggcggggcaacugggacugcaucaugaccuccuaccaguaccugaucauccagaacacgaccugggacgaccacugccaguucagccgccccucccccaucggguaccugggccuccugagccagcggacccgcgacgucuacaucucccggcgccugcucggcaccuucacguggacccugagcgacagcgaggggaaggacaccccgggcggguacugccugacccgguggaugcucaucgaggccgagcugaagugcuucggcaacacggccguggccaagugcaacgagaagcacgacgaggaguucugcgacaugcugcgccucuucgacuucaacaagcaggccauccagcggcugaaggcggaggcccagauguccauccagcugaucaacaaggccgugaacgcccucaucaacgaccagcugaucaugaagaaccaccuccgcgacaucauggggauccccuacugcaacuacagcaaguacugguaccugaacaacaccgccaccggcaagaccucccugcccaagugcuggcugaucagcaacggcuccuaccucaacgagacgcacuucagcgacgacaucgagcaggaggcggacaacaugaucaccgagaugcugcagaaggaguacauggagcggcaggggaagacgccccugggccucgucgaccuguucguguucuccaccagcuucuaccugaucuccaucuuccugcaccucgugaagaucccgacccaccgccacaucgucggcaagagcugccccaagccccaccggcugaaccacauggggaucugcuccugcgggcuguacaagcagcccggcgugccggugcgcuggaagcggugaggacuaguuauaagacugacuagcccgaugggccucccaacgggcccuccuccccuccuugcaccgagauuaauaaaaaaaaaaaaaaaaaaaaaaaaaaaaaaaaaaaaaaaaaaaaaaaaaaaaaaaaaaaaaaaaugcaucccccccccccccccccccccccccccccccaaaggcucuuuucagagccaccagaauu

SEQ ID NO: 3367 - RNA, 1693 nt, Artificial Sequence
  mRNA product Design i-3 comprising derived and/or modified sequence from LASV(G3010-SLE-2013;Clade IV)__AIT17344__GPC (opt1)
gggagaaagcuuaccaugggccagaucgugaccuucuuccaggaggucccccacgugaucgaggaggugaugaacaucguccugaucgcccucagcauccuggccgugcugaaggggcucuacaacuucgcgaccugcggccugguggggcuggucacguuccuccugcugugcggccgcuccugcaccaccagccucuacaaggggguguacgagcugcagacccuggagcucaacauggagacgcugaacaugaccaugccgcuguccugcaccaagaacaacagccaccacuacaucauggugggcaacgagaccggccucgagcugacgcugaccaacaccuccaucaucaaccacaaguucugcaaccucagcgacgcccacaagaagaaccuguacaaccacgcccugauguccaucaucagcaccuuccaccucuccauccccaacuucaaccaguacgaggccaugagcugcgacuucaacgggggcaagaucuccguccaguacaaccugagccacuccuacgccggggacgcggccagccacugcggcacgguggccaacggggugcugcagaccuucaugcggauggccuggggcggcuccuacaucgcgcucgacagcggguacggcaagugggacugcaucaugaccuccuaccaguaccugaucauccagaacaccacgugggaggaccacugccaguucagccgccccucccccaucggguaccugggccuccugagccagcggacccgcgacaucuacaucagccggcgccugcucggcaccuucaccuggacgcuguccgacagcgaggggaaggacaccccgggcggguacugccugacccgguggaugcucaucgaggccgagcugaagugcuucggcaacaccgccgucgccaagugcaacgagaagcacgacgaggaguucugcgacaugcugcgccucuucgacuucaacaagcaggccauccagcggcugaagacggaggcgcagauguccauccagcugaucaacaaggccgugaacgcccucaucaacgaccagcugaucaugaagaaccaccuccgcgacaucauggggauccccuacugcaacuacagcaaguacugguaccugaaccacaccaccaccggcaagacgucccugcccaagugcuggcuggugagcaacggcuccuaccucaacgagacccacuucagcgacgacaucgagcagcaggccgacaacaugaucaccgagaugcugcagaaggaguacauggagcggcaggggaagacgccccugggccucgucgaccuguucguguucuccaccagcuucuaccugaucuccaucuuccugcaccucgugaagaucccgacccaccgccacaucgucggcaagagcugccccaagccccaccggcugaaccacauggggaucugcuccugcgggcuguacaagcagcccggcgugccggugcgcuggaagcggugaggacuaguuauaagacugacuagcccgaugggccucccaacgggcccuccuccccuccuugcaccgagauuaauaaaaaaaaaaaaaaaaaaaaaaaaaaaaaaaaaaaaaaaaaaaaaaaaaaaaaaaaaaaaaaaaugcaucccccccccccccccccccccccccccccccaaaggcucuuuucagagccaccagaauu

SEQ ID NO: 3368 - RNA, 1693 nt, Artificial Sequence
  mRNA product Design i-3 comprising derived and/or modified sequence from LASV(G502-SLE-2009;Clade IV)__AIT17126__GPC (opt1)
gggagaaagcuuaccaugggccagaucgugaccuucuuccaggaggucccccacgugaucgaggaggugaugaacaucguccugaucgcccucagcauccuggccgugcugaaggggcucuacaacuucgcgaccugcggccugguggggcugcucacguuccugcugcucugcggccgcuccugcaccaccgggcuguacaagggcgucuacgagcugcagacccucgagcugaacauggagacgcugaacaugaccaugccgcucagcugcaccaagaacaacucccaccacuacaucauggugggcaacgagaccgggcuggagcugacgcucaccaacaccagcaucaucaaccacaaguucugcaaccuguccgacgcccacaagaagaaccuguacgaccacgcccucaugagcaucaucuccaccuuccaccugagcauccccaacuucaaccaguacgaggccauguccugcgacuucaacggcgggaagaucagcgugcaguacaaccugucccacagcuacgccggcgacgcggccgaccacugcgggacggucgccaacggcgugcuccagaccuucaugcggauggccuggggcggguccuacaucgcgcuggacagcggccgcgggcggugggacugcaucaugaccuccuaccaguaccugaucauccagaacaccacgugggaggaccacugccaguucagccgccccucccccaucggcuaccucggccugcugagccagcggacccgcgacaucuacaucucccggcgccuccuggggaccuucaccuggacgcugagcgacagcgagggcaaggacacccccgggggcuacugccucacccgguggaugcugaucgaggccgagcugaagugcuucgggaacaccgccguggccaagugcaacgagaagcacgacgaggaguucugcgacaugcuccgccuguucgacuucaacaagcaggccauccagcggcugaaggcggaggcccagauguccauccagcucaucaacaaggccgucaacgcccugaucaacgaccagcuggugaugaagaaccaccuccgcgacaucaugggcauccccuacugcaacuacagccgguacugguaccugaaccacacgaccaccggccgcaccucccugcccaagugcuggcucgugagcaacggguccuaccugaacgagacgcacuucagcgacgacaucgagcagcaggccgacaacaugaucaccgagaugcugcagaaggaguacauggagcggcagggcaagaccccgcucgggcuggucgaccuguucguguucuccaccagcuucuaccugaucuccaucuuccuccaccuggugaagaucccgacgcaccgccacaucgucggcaagagcugccccaagccccaccggcugaaccacauggggaucugcuccugcggccucuacaagcagcccggcgugccggugaaguggaagcgcugaggacuaguuauaagacugacuagcccgaugggccucccaacgggcccuccuccccuccuugcaccgagauuaauaaaaaaaaaaaaaaaaaaaaaaaaaaaaaaaaaaaaaaaaaaaaaaaaaaaaaaaaaaaaaaaaugcaucccccccccccccccccccccccccccccccaaaggcucuuuucagagccaccagaauu

SEQ ID NO: 3369 - RNA, 1693 nt, Artificial Sequence
  mRNA product Design i-3 comprising derived and/or modified sequence from LASV(G733-SLE-2010;Clade IV)__AIT17154__GPC (opt1)
gggagaaagcuuaccaugggccagaucgugaccuucuuccaggaggucccccacgugaucgaggaggugaugaacaucguccugaucgcccucagcauccuggccgugcugaaggggcucuacaacuucgcgaccugcggcaucguggggcuggucuccuuccugcuccugugcggccgcagcugcacgaccucccuguacaaggggguguacgagcuccagacccuggagcugaacauggagacccucaacaugacgaugccgcugagcugcaccaagaacaacucccaccacuacaucauggugggcaacgagaccggccuggagcucacccugacgaacaccagcaucaucaaccacaaguucugcaaccuguccgacgcccacaagaagaaccucuacgaccacgcccugaugagcaucaucuccaccuuccaccugagcauccccaacuucaaccaguacgaggccauguccugcgacuucaacgggggcaagaucagcguccaguacaaccucucccacagcuacgccggggacgcggccaaccacugcggcaccaucgccaacggggugcugcagacguucaugcggauggccuggggcggcuccuacaucgcgcuggacagcgggcgcgaccggugggacugcaucaugaccuccuaccaguaccucaucauccagaacaccaccugggaggaccacugccaguucagccgccccucccccaucggcuaccuggggcugcucagccagcggacgcgcgacaucuacaucagccggcgccugcugggcaccuucaccuggacccucuccgacagcgagggcaaggacacgcccgggggcuacugccugacccgguggaugcugaucgaggccgagcucaagugcuucgggaacaccgccguggccaagugcaacgagaagcacgacgaggaguucugcgacaugcugcgccuguucgacuucaacaagcaggccauccagcggcucaaggcggaggcccagauguccauccagcugaucaacaaggccgucaacgcccugaucaacgaccagcucaucaugaagaaccaccuccgcgacaucaugggcauccccuacugcaacuacagcaaguacugguaccugaaccacaccacgaccgggaagaccucccugcccaagugcuggcuggugagcaacggcuccuaccugaacgagacccacuucagcgacgacaucgagcagcaggccgacaacaugaucacggagaugcuccagaaggaguacauggagcggcagggcaagaccccgcuggggcugguggaccucuucgucuucuccaccagcuucuaccugaucuccaucuuccugcaccuggugaagaucccgacccaccgccacguggucggcaagagcugccccaagccccaccggcucaaccacauggggaucugcuccugcggccuguacgggcagcccggcgugccggugaaguggaagcgcugaggacuaguuauaagacugacuagcccgaugggccucccaacgggcccuccuccccuccuugcaccgagauuaauaaaaaaaaaaaaaaaaaaaaaaaaaaaaaaaaaaaaaaaaaaaaaaaaaaaaaaaaaaaaaaaaugcaucccccccccccccccccccccccccccccccaaaggcucuuuucagagccaccagaauu

SEQ ID NO: 3370 - RNA, 1693 nt, Artificial Sequence
  mRNA product Design i-3 comprising derived and/or modified sequence from MOPV/LASV reassortant(IGS-1;Clade IV)__AFY05576__GPC (opt1)
gggagaaagcuuaccaugggccagaucgugaccuucuuccaggaggucccccacgugaucgaggaggugaugaacaucguccugaucgcccucagcgugcuggccgugcugaaggggcucuacaacuucgcgaccugcggccuggucgggcuggugacguuccuccugcugugcggccgcuccugcaccaccagccucuacaaggggguguacgagcugcagacccuggagcucaacauggagacgcugaacaugaccaugccgcuguccugcaccaagaacaacagccaccacuacaucauggucggcaacgagaccggccucgagcugacgcugaccaacaccuccaucaucaaccacaaguucugcaaccucagcgacgcccacaagaagaaccuguacgaccacgcccugauguccaucaucagcaccuuccaccucuccauccccaacuucaaccaguacgaggccaugagcugcgacuucaacgggggcaagaucuccgugcaguacaaccugagccacuccuacgccggggacgcggccaaccacugcggcacgguggccaacgggguccugcagaccuucaugcggauggccuggggcggcagcuacaucgcgcucgacuccgggcgcggcaacugggacugcaucaugaccagcuaccaguaccugaucauccagaacaccacgugggaggaccacugccaguucucccggcccagccccaucggguaccugggccuccugucccagcgcacccgggacaucuacaucagccgccggcugcucggcaccuucaccuggacgcugagcgacuccgagggggaggacaccccgggcggguacugccugacccgcuggaugcucaucgaggccgagcugaagugcuucggcaacaccgccguggccaagugcaacgagaagcacgacgaggaguucugcgacaugcugcggcuguucgacuucaacaagcaggccauccagcgccugaaggcggaggcccagaugagcauccagcugaucaacaaggccgugaacgcccucaucaacgaccagcugaucaugaagaaccaccuccgggacaucauggggauccccuacugcaacuacuccaaguacugguaccucaaccacacgaccaccggccgcaccagccugcccaagugcuggcuggucuccaacggcagcuaccucaacgagacgcacuucuccgacgacaucgagcagcaggccgacaacaugaucaccgagaugcugcagaaggaguacauggagcggcaggggaagacgccccugggccucguggaccuguucguguucagcaccuccuucuaccugaucagcaucuuccugcaccucgucaagaucccgacccaccgccacaucguggggaaguccugccccaagccccaccggcugaaccacaugggcaucugcagcugcgggcuguacaagcagcccggcgugccggucaaguggaagcgcugaggacuaguuauaagacugacuagcccgaugggccucccaacgggcccuccuccccuccuugcaccgagauuaauaaaaaaaaaaaaaaaaaaaaaaaaaaaaaaaaaaaaaaaaaaaaaaaaaaaaaaaaaaaaaaaaugcaucccccccccccccccccccccccccccccccaaaggcucuuuucagagccaccagaauu

SEQ ID NO: 3371 - RNA, 1693 nt, Artificial Sequence
  mRNA product Design i-3 comprising derived and/or modified sequence from LASV(LM765-SLE-2012;Clade IV)__AIT17814__GPC (opt1)
gggagaaagcuuaccaugggccagaucgugaccuucuuccaggaggucccccacgugaucgaggaggugaugaacaucguccugaucgcccucagcauccuggccgugcugaaggggcucuacaacuucgcgaccugcggccugguggggcuggucacguuccuccugcugugcggccgcuccugcaccaccagccucuacaaggggguguacgagcugcagacccuggagcucaacauggagacgcugaacaugaccaugccgcuguccugcaccaagaacaacagccaccacuacaucauggugggcaacgagaccggccucgagcugacgcugaccaacaccuccaucaucgaccacaaguucugcaaccucagcgacgcccaccggaagaaccuguacgaccacgcccugauguccaucaucagcaccuuccaccucuccauccccaacuucaaccaguacgaggccaugagcugcgacuucaacgggggcaagaucuccguccaguacaaccugagccacuccuacgccaaggacgcggccgaccacugcgggacgguggccaacggcgugcugcagaccuucaugcgcauggccuggggcgggagcuacaucgcgcucgacuccggccgggggcgcugggacugcaucaugaccagcuaccaguaccugaucauccagaacaccacgugggaggaccacugccaguucucccggcccagccccaucggcuaccuggggcuccugucccagcgcacccgggacaucuacaucagccgccggcugcucggcaccuucaccuggacgcugagcgacuccgagggcaaggacacccccgggggcuacugccugacccgcuggaugcucaucgaggccgagcugaagugcuucgggaacaccgccgucgccaagugcaacgagaagcacgacgaggaguucugcgacaugcugcggcuguucgacuucaacaagcaggccauccagcgccugaaggcggaggcccagaugagcauccagcugaucaacaaggccgugaacgcccucaucaacgaccagcugaucaugaagaaccaccuccgggacaucaugggcauccccuacugcaacuacuccaaguacugguaccucaaccacacgaccaccgggaagaccagccugcccaagugcuggcugguguccaacggcagcuaccucaacgagacgcacuucuccgacgacaucgagcagcaggccgacaacaugaucaccgagaugcugcagaaggaguacauggagcgccagggcaagaccccgcuggggcucgucgaccuguucguguucagcaccuccuucuaccugaucagcaucuuccugcaccucgugaagaucccgacgcaccggcacaucgucggcaagcccugccccaagccccaccgccugaaccacauggggaucugcuccugcggccuguacaagcagccgggggugcccgugaaguggaagcggugaggacuaguuauaagacugacuagcccgaugggccucccaacgggcccuccuccccuccuugcaccgagauuaauaaaaaaaaaaaaaaaaaaaaaaaaaaaaaaaaaaaaaaaaaaaaaaaaaaaaaaaaaaaaaaaaugcaucccccccccccccccccccccccccccccccaaaggcucuuuucagagccaccagaauu

SEQ ID NO: 3372 - RNA, 1693 nt, Artificial Sequence
  mRNA product Design i-3 comprising derived and/or modified sequence from LASV(LM776-SLE-2012;Clade IV)__AIT17824__GPC (opt1)
gggagaaagcuuaccaugggccagaucgugaccuucuuccaggaggucccccacgugaucgaggaggugaugaacaucguccugaucgcccucagcauccuggccgugcugaaggggcucuacaacuucgcgaccugcggccugguggggcuggucacguuccuccugcugugcggccgcuccugcaccaccagcguguacaaggggguguacgagcuccagacccuggagcugaacauggagacgcucaacaugaccaugccgcuguccugcaccaagaacaacagccaccacuacaucauggucggcaacgagaccggccuggagcucacgcugaccaacaccuccaucaucaaccacaaguucugcaaccugagcgacgcccacaagaagaaccucuacgaccacgcccugauguccaucaucagcaccuuccaccuguccauccccaacuucaaccaguacgaggccaugagcugcgacuucaacgggggcaagaucuccgugcaguacaaccucagccacuccuacgccggggacgcggccaaccacugcggcacgguggccaacgggguccugcagaccuucaugcggauggccuggggcggcagcuacaucgcgcuggacuccgggcacggcaagugggacugcaucaugaccagcuaccaguaccucaucauccagaacaccacgugggaggaccacugccaguucucccgccccagccccaucggguaccugggccugcucucccagcggacccgcgacaucuacaucagccggcgccugcugggcaccuucaccuggacgcucagcgacuccgaggggaaggacaccccgggcggguacugccugacccgguggaugcugaucgaggccgagcucaagugcuucggcaacaccgccguggccaagugcaacgagaagcacgacgaggaguucugcgacaugcugcgccuguucgacuucaacaagcaggccauccagcggcucaaggcggaggcccagaugagcauccagcugaucaacaaggccgugaacgcccugaucaacgaccagcucaucaugaagaaccaccuccgcgacaucauggggauccccuacugcaacuacuccaaguacugguaccugaaccacacgaccaccggcaagaccagccugcccaagugcuggcuggucuccaacggcagcuaccugaacgagacgcacuucuccgacgacaucgagcagcaggccgacaacaugaucaccgagaugcuccagaaggaguacauggagcggcaggggaagacgccccugggccugguggaccucuucguguucagcaccuccuucuaccugaucagcaucuuccugcaccuggucaagaucccgacccaccgccacaucguggggaaguccugccccaagccccaccggcucaaccacaugggcaucugcagcugcgggcuguacaagcagcccggcgugccgguccgcuggaagcggugaggacuaguuauaagacugacuagcccgaugggccucccaacgggcccuccuccccuccuugcaccgagauuaauaaaaaaaaaaaaaaaaaaaaaaaaaaaaaaaaaaaaaaaaaaaaaaaaaaaaaaaaaaaaaaaaugcaucccccccccccccccccccccccccccccccaaaggcucuuuucagagccaccagaauu

SEQ ID NO: 3373 - RNA, 1693 nt, Artificial Sequence
  mRNA product Design i-3 comprising derived and/or modified sequence from LASV(Mad39;Clade IV)__ANH09722__GPC (opt1)
gggagaaagcuuaccaugggccagaucgugaccuucuuccaggaggucccccacgugaucgaggaggugaugaacaucguccugaucgcccucagcauccuggccgugcugaaggggcucuacaacguggcgaccugcggccugaucgggcuggucacguuccuccugcugugcggccgcuccugcaccaccacccucuacaaggggguguacgagcugcaggcccuggagcucaacauggagacgcugaacaugaccaugccgcugagcugcaccaagaacaacucccaccacuacauccgggugggcaacgagaccggccucgagcugacgcugaccaacaccagccucaucaaccacaaguucugcaaccuguccgacgcccacaagaagaaccuguacgaccacgcccucaugagcaucaucuccaccuuccaccugagcauccccaacuucaaccaguacgaggccauguccugcgacuucaacgacgggaagaucagcguccaguacaaccugucccacacguacgcgggcgacaccgccaaccacugcgggaccguggccaacggcgugcuccagaccuucaugcgcauggccuggggcgggagcuacaucgcgcuggacuccggccgcgggggcugggacugcaucaugacgagcuaccaguaccugaucauccagaacaccaccugggaggaccacugccaguucucccggcccagccccaucggguaccucggccugcugucccagcggacccgcgacaucuacaucagccggcgccuccugggcacguucaccuggacccuguccgacagcgaggggaaggacaccccgggcggguacugccucacgcgguggaugcugaucgaggccgagcugaagugcuucggcaacaccgccgucgccaagugcaacgagaagcacgacgaggaguucugcgacaugcuccgccuguucgacuucaacaagcaggccauccagcggcugaaggcggaggcccagaugagcauccagcucaucaacaaggccgugaacgcccugaucaacgaccagcugaucaugaagaaccaccuccgcgacaucauggggauccccuacugcaacuacuccaaguacugguaccugaaccacaccgugaccggcaagacgagccugcccaagugcuggcucgucuccaacggcagcuaccugaacgagacccacuucuccgacgacaucgagcagcaggccgacaacaugaucaccgagaugcugcagaaggaguacauggagcggcaggggaagacgccccucggccugguggaccuguucguguucagcaccuccuucuaccugaucagcaucuuccuccaccuggucaagaucccgacccaccgccacgugguggggaagcccugccccaagccccaccggcugaaccacaugggcaucugcuccugcggguucuacaagcagccgggcguccccgugcgcuggaagcggugaggacuaguuauaagacugacuagcccgaugggccucccaacgggcccuccuccccuccuugcaccgagauuaauaaaaaaaaaaaaaaaaaaaaaaaaaaaaaaaaaaaaaaaaaaaaaaaaaaaaaaaaaaaaaaaaugcaucccccccccccccccccccccccccccccccaaaggcucuuuucagagccaccagaauu

SEQ ID NO: 3374 - RNA, 1693 nt, Artificial Sequence
  mRNA product Design i-3 comprising derived and/or modified sequence from LASV(Z0947-SLE-2011;Clade IV)__AIT17840__GPC (opt1)
gggagaaagcuuaccaugggccagaucgugaccuucuuccaggaggucccccacgugaucgaggaggugaugaacaucguccugaucgcccucagcauccuggccgugcugaaggggcucuacaacuucgcgaccugcggccugguggggcuggucacguuccuccugcugugcggccgcuccugcaccaucagccucuacaaggggguguacgagcugcagacccuggagcucaacauggagacccugaacaugacgaugccgcuguccugcaccaagaacaacagccaccacuacaucauggugggcaacgagaccggccucgagcugacccugacgaacaccuccaucaucaaccacaaguucugcaaccucagcgacgcccacaagaagaaccuguacgaccacgcccugauguccaucaucagcaccuuccaccucuccauccccaacuucaaccaguacgaggccaugagcugcgacuucaacgggggcaagaucuccguccaguacaaccugagccacuccuacgccggggacgcggccaaccacugcggcaccguggccaacggggugcugcagacguucaugcggauggccuggggcggcagcuacaucgcgcucgacuccgggcgcgaccggugggacugcaucaugaccagcuaccaguaccugaucauccagaacaccaccugggaggaccacugccaguucucccgccccagccccaucggcuaccuggggcuccugucccagcggacgcgcgacaucuacaucagccggcgccugcucggcaccuucaccuggacccugagcgacuccgagggcaaggacacgcccgggggcuacugccugacccgguggaugcucaucgaggccgagcugaagugcuucgggaacaccgccgucgccaagugcaacgagaagcacgacgaggaguucugcgacaugcugcgccucuucgacuucaacaagcaggccauccagcggcugaaggcggaggcccagaugagcauccagcugaucaacaaggccgugaacgcccucaucaacgaccagcugaucaugaagaaccaccuccgcgacaucaugggcauccccuacugcaacuacuccaaguacugguaccugaaccacaccacgaccgggaagaccagccugcccaagugcuggcugguguccaacggcagcuaccucaacgagacccacuucuccgacgacaucgagcagcaggccgacaacaugaucacggagaugcugcagaaggaguacauggagcggcagggcaagaccccgcuggggcucgucgaccuguucguguucagcaccuccuucuaccugaucagcaucuuccugcaccucgugaagaucccgacccaccgccacaucgucggcaagcccugccccaagccccaccggcugaaccacauggggaucugcuccugcggccuguacaagcagccgggggugcccgugaaguggaagcgcugaggacuaguuauaagacugacuagcccgaugggccucccaacgggcccuccuccccuccuugcaccgagauuaauaaaaaaaaaaaaaaaaaaaaaaaaaaaaaaaaaaaaaaaaaaaaaaaaaaaaaaaaaaaaaaaaugcaucccccccccccccccccccccccccccccccaaaggcucuuuucagagccaccagaauu

SEQ ID NO: 3375 - RNA, 1693 nt, Artificial Sequence
  mRNA product Design i-3 comprising derived and/or modified sequence from LASV(Josiah;Clade IV)__NP_694870__GPC (opt2) R7286
gggagaaagcuuaccaugggccagaucgucaccuucuuccaggaggucccccacgucaucgaggaggucaugaacaucguccucaucgcccucuccguccucgccguccucaagggccucuacaacuucgccaccugcggccucgucggccucgucaccuuccuccuccucugcggccgcuccugcaccaccucccucuacaagggcgucuacgagcuccagacccucgagcucaacauggagacccucaacaugaccaugccccucuccugcaccaagaacaacucccaccacuacaucauggucggcaacgagaccggccucgagcucacccucaccaacaccuccaucaucaaccacaaguucugcaaccucuccgacgcccacaagaagaaccucuacgaccacgcccucauguccaucaucuccaccuuccaccucuccauccccaacuucaaccaguacgaggccauguccugcgacuucaacggcggcaagaucuccguccaguacaaccucucccacuccuacgccggcgacgccgccaaccacugcggcaccgucgccaacggcguccuccagaccuucaugcgcauggccuggggcggcuccuacaucgcccucgacuccggccgcggcaacugggacugcaucaugaccuccuaccaguaccucaucauccagaacaccaccugggaggaccacugccaguucucccgccccucccccaucggcuaccucggccuccucucccagcgcacccgcgacaucuacaucucccgccgccuccucggcaccuucaccuggacccucuccgacuccgagggcaaggacacccccggcggcuacugccucacccgcuggaugcucaucgaggccgagcucaagugcuucggcaacaccgccgucgccaagugcaacgagaagcacgacgaggaguucugcgacaugcuccgccucuucgacuucaacaagcaggccauccagcgccucaaggccgaggcccagauguccauccagcucaucaacaaggccgucaacgcccucaucaacgaccagcucaucaugaagaaccaccuccgcgacaucaugggcauccccuacugcaacuacuccaaguacugguaccucaaccacaccaccaccggccgcaccucccuccccaagugcuggcucgucuccaacggcuccuaccucaacgagacccacuucuccgacgacaucgagcagcaggccgacaacaugaucaccgagaugcuccagaaggaguacauggagcgccagggcaagaccccccucggccucgucgaccucuucgucuucuccaccuccuucuaccucaucuccaucuuccuccaccucgucaagauccccacccaccgccacaucgucggcaaguccugccccaagccccaccgccucaaccacaugggcaucugcuccugcggccucuacaagcagcccggcguccccgucaaguggaagcgcugaggacuaguuauaagacugacuagcccgaugggccucccaacgggcccuccuccccuccuugcaccgagauuaauaaaaaaaaaaaaaaaaaaaaaaaaaaaaaaaaaaaaaaaaaaaaaaaaaaaaaaaaaaaaaaaaugcaucccccccccccccccccccccccccccccccaaaggcucuuuucagagccaccagaauu

SEQ ID NO: 3376 - RNA, 1690 nt, Artificial Sequence
  mRNA product Design i-3 comprising derived and/or modified sequence from LASV(LP;Clade I)__AAF86701__GPC (opt2)
gggagaaagcuuaccaugggccagaucaucaccuucuuccaggaggucccccacgucaucgaggaggucaugaacaucguccucaucgcccucucccuccucgccauccucaagggccucuacaacaucgccaccugcggcaucaucggccucgucgccuuccucuuccucugcggcaaguccugcucccucacccucaagggcggcuacgagcuccagacccucgagcucaacauggagacccucaacaugaccaugccccucuccugcaccaagaacuccucccaccacuacauccgcgucggcaacgagaccggccucgagcucacccucaccaacaccuccaucaucaaccacaaguucugcaaccucuccgacgcccacaagaagaaccucuacgaccacgcccucauguccaucaucuccaccuuccaccucuccauccccaacuucaaccaguacgaggccauguccugcgacuucaacggcggcaagaucuccguccaguacaaccucucccacuccuacgccggcgacgccgccgagcacugcggcaccgucgccaacggcguccuccagaccuucaugcgcauggccuggggcggccgcuacaucgcccucgacuccggcaagggcaacugggacugcaucaugaccuccuaccaguaccucaucauccagaacaccaccugggaggaccacugccaguucucccgccccucccccaucggcuaccucggccuccucucccagcgcacccgcgacaucuacaucucccgccgccuccucggcaccuucaccuggacccucuccgacuccgagggcaacgagacccccggcggcuacugccucacccgcuggaugcucaucgaggccgagcucaagugcuucggcaacaccgccgucgccaagugcaacgagaagcacgacgaggaguucugcgacaugcuccgccucuucgacuucaacaagcaggccauccgccgccucaaggccgaggcccagauguccauccagcucaucaacaaggccgucaacgcccucaucaacgaccagcucaucaugaagaaccaccuccgcgacaucaugggcauccccuacugcaacuacuccaaguacugguaccucaaccacaccuccuccggccgcaccucccuccccaagugcuggcucaucuccaacggcuccuaccucaacgagacccaguucuccgacgacaucgagcagcaggccgacaacaugaucaccgagaugcuccagaaggaguacaucgagcgccagggcaagaccccccucggccucgucgacaucuucaucuucuccaccuccuucuaccucaucuccaucuuccuccaccucaucaagauccccacccaccgccacaucgucggcaagcccugccccaagccccaccgccucaaccacaugggcgucugcuccugcggccucuacaagcaccccggcguccccaccaaguggaagcgcugaggacuaguuauaagacugacuagcccgaugggccucccaacgggcccuccuccccuccuugcaccgagauuaauaaaaaaaaaaaaaaaaaaaaaaaaaaaaaaaaaaaaaaaaaaaaaaaaaaaaaaaaaaaaaaaaugcaucccccccccccccccccccccccccccccccaaaggcucuuuucagagccaccagaauu

SEQ ID NO: 3377 - RNA, 1690 nt, Artificial Sequence
  mRNA product Design i-3 comprising derived and/or modified sequence from LASV(803213;Clade II)__AAF86703__GPC (opt2)
gggagaaagcuuaccaugggccagaucaucaccuucuuccaggaggucccccacgucaucgaggaggucaugaacaucguccucaucgcccucucccuccucgccauccucaagggcaucuacaacgucgccaccugcggccucuucggccucaucuccuuccuccuccucugcggccgcuccugcuccgucaccuacaagggcgucuacgagcuccagacccucgagcucaacauggccaaccucaacaugaccaugccccucuccugcaccaagaacaacucccaccacuacaucauggucggcaacgagaccggccucgagcucacccucaccaacaccuccaucaucaaccacaaguucugcaaccucuccgacgcccacaagaagaaccucuacgaccacgcccucauguccaucaucuccaccuuccaccucuccauccccaacuucaaccaguacgaggccauguccugcgacuucaacggcggcaagaucuccguccaguacaaccucucccacuccuucgccgucgacgccgccaaccacugcggcaccaucgccaacggcguccuccagaccuucaugcgcauggccuggggcggcuccuacaucgcccucgacuccggcaagggcaacugggacugcaucaugaccuccuaccaguaccucaucauccagaacaccaccugggaggaccacugccaguucucccgccccucccccaucggcuaccucggccuccucucccagcgcacccgcgacaucuacaucucccgccgccuccucggcaccuucaccuggacccucuccgacuccgagggcaacgaggcccccggcggcuacugccucacccgcuggaugcucaucgaggccgagcucaagugcuucggcaacaccgccgucgccaagugcaacgagaagcacgacgaggaguucugcgacaugcuccgccucuucgacuucaacaagcaggccaucaagcgccucaagaccgaggcccagauguccauccagcucaucaacaaggccgucaacgcccucaucaacgaccagcucaucaugaagaaccaccuccgcgacaucaugggcauccccuacugcaacuacucccgcuacugguaccucaaccacaccgucaccggcaagaccucccucccccgcugcuggcucgucuccaacggcuccuaccucaacgagacccacuucuccgacgacaucgagcagcaggccgacaacaugaucaccgagaugcuccagaaggaguacauggaccgccagggcaagaccccccucggccucgucgaccucuucgucuucuccaccuccuucuaccucaucuccaucuuccuccaccucgucaagauccccacccaccgccacaucgucggcaagcccugccccaagccccaccgccucaaccacaugggcaucugcuccugcggccucuacaagcaccccggcguccccgucaaguggaagcgcugaggacuaguuauaagacugacuagcccgaugggccucccaacgggcccuccuccccuccuugcaccgagauuaauaaaaaaaaaaaaaaaaaaaaaaaaaaaaaaaaaaaaaaaaaaaaaaaaaaaaaaaaaaaaaaaaugcaucccccccccccccccccccccccccccccccaaaggcucuuuucagagccaccagaauu

SEQ ID NO: 3378 - RNA, 1690 nt, Artificial Sequence
  mRNA product Design i-3 comprising derived and/or modified sequence from LASV(GA391;Clade III)__CAA36645__GPC (opt2)
gggagaaagcuuaccaugggccagaucgucaccuucuuccaggaggucccccacgucaucgaggaggucaugaacaucguccucaucgcccucuccauccucgccauccucaagggccucuacaacgucgccaccugcggccucaucggccucgucaccuuccuccuccucuccggccgcuccugcucccucaucuacaagggcaccuacgagcuccagacccucgagcucaacauggagacccucaacaugaccaugccccucuccugcaccaagaacaacucccaccacuacauccgcgucggcaacgagaccggccucgagcucacccucaccaacaccuccauccucaaccacaaguucugcaaccucuccgacgcccacaagcgcaaccucuacgaccacucccucauguccaucaucuccaccuuccaccucuccauccccaacuucaaccaguacgaggccauguccugcgacuucaacggcggcaagaucaccguccaguacaaccucucccacuccuucgccgucgacgccgccggccacugcggcacccucgccaacggcguccuccagaccuucaugcgcauggccuggggcggcuccuacaucgcccucgacuccggccgcggcaacugggacugcaucaugaccuccuaccaguaccucaucauccagaacaccaccugggacgaccacugccaguucucccgccccucccccaucggcuaccucggccuccucucccagcgcacccgcgacaucuacaucucccgccgccuccucggcaccuucaccuggacccucuccgacuccgagggcaacgagacccccggcggcuacugccucacccgcuggaugcucaucgaggccgagcucaagugcuucggcaacaccgccgucgccaagugcaacgagaagcacgacgaggaguucugcgacaugcuccgccucuucgacuucaacaagcaggccauccgccgccucaagaccgaggcccagauguccauccagcucaucaacaaggccgucaacgcccucaucaacgaccagcucaucaugaagaaccaccuccgcgacaucaugggcauccccuacugcaacuacucccgcuacugguaccucaaccacaccuccaccggcaagaccucccucccccgcugcuggcucaucuccaacggcuccuaccucaacgagaccaaguucuccgacgacaucgagcagcaggccgacaacaugaucaccgagaugcuccagaaggaguacaucgaccgccagggcaagaccccccucggccucgucgaccucuucgucuucuccaccuccuucuaccucaucuccaucuuccuccaccucgucaagauccccacccaccgccacaucgucggcaagcccugccccaagccccaccgccucaaccacaugggcaucugcuccugcggccucuacaagcagcccggcguccccguccgcuggaagcgcugaggacuaguuauaagacugacuagcccgaugggccucccaacgggcccuccuccccuccuugcaccgagauuaauaaaaaaaaaaaaaaaaaaaaaaaaaaaaaaaaaaaaaaaaaaaaaaaaaaaaaaaaaaaaaaaaugcaucccccccccccccccccccccccccccccccaaaggcucuuuucagagccaccagaauu

SEQ ID NO: 3379 - RNA, 1693 nt, Artificial Sequence
  mRNA product Design i-3 comprising derived and/or modified sequence from LASV(AV;Clade V)__CCA30314__GPC (opt2)
gggagaaagcuuaccaugggccagaucgucaccuucuuccaggaggucccccacgucaucgaggaggucaugaacaucguccucaucgcccucuccauccucgccguccucaagggccucuacaacaucgccaccugcggccucaucggccucaucaccuuccuccuccucugcggccgcuccugcuccuccaaccucuacaagggcgucuacgagcuccagucccucgaccucaacauggagacccucaacaugaccaugccccucuccugcaccaagaacaacucccaccacuacauccgcgucggcaacgacaccggccucgagcucacccucaccaacaccuccauccucaaccacaaguucugcaaccucuccgacgcccacaagaaggaccucuacgaccacgcccucauguccaucaucuccaccuuccaccucuccauccccaacuucaaccaguacgaggccauguccugcgacuucaacggcggcaagaucuccguccaguacaaccucucccacuccuacgccaucgacgccgccaaccacugcggcaccgucgccaacggcauccuccagaccuucaugcgcauggccuggggcggcuccuacaucgcccucgacuccggccgcggcaacugggacugcaucaugaccuccuaccaguaccucaucauccagaacaccaccugggagaaccacugccaguucucccgccccucccccaucggcuaccucggccuccucucccagcgcacccgcgacaucuacaucucccgccgccuccucggcaccuucaccuggacccucuccgacuccgagggcaacgccacccccggcggcuacugccucacccgcuggaugcucaucgaggccgagcucaagugcuucggcaacaccgccgucgccaagugcaacgagaagcacgacgaggaguucugcgacaugcuccgccucuucgacuucaacaagcaggccaucucccgccucaaguccgaggcccagauguccauccagcucaucaacaaggccgucaacgcccucaucaacgaccagcucaucaugaagaaccaccuccgcgacaucaugggcauccccuacugcaacuacuccaaguacugguaccucaaccacaccaucaccggcaagaccucccuccccaagugcuggcucgucuccaacggcuccuaccucaacgagacccacuucuccgacgacaucgagcagcaggccgacaacaugaucaccgagaugcuccagaaggaguacauggagcgccagggcaagaccccccucggccucgucgaccucuucgucuucuccaccuccuucuaccucaucuccaucuuccuccgccucgucaagauccccacccaccgccacaucgucggcaagcccugccccaagccccaccgccucaaccacaugggcaucugcuccugcggccucuacaagcagcccggcguccccguccgcuggaagcgcugaggacuaguuauaagacugacuagcccgaugggccucccaacgggcccuccuccccuccuugcaccgagauuaauaaaaaaaaaaaaaaaaaaaaaaaaaaaaaaaaaaaaaaaaaaaaaaaaaaaaaaaaaaaaaaaaugcaucccccccccccccccccccccccccccccccaaaggcucuuuucagagccaccagaauu

SEQ ID NO: 3380 - RNA, 1690 nt, Artificial Sequence
  mRNA product Design i-3 comprising derived and/or modified sequence from LASV(Togo/2016/7082;Clade VI)__AMR44577__GPC (opt2)
gggagaaagcuuaccaugggccagaucaucaccuucuuccaggaggucccccacgucaucgaggaggucaugaacaucguccucaucgcccucucccuccucgccauccucaagggcgucuacaacgucgccaccugcggcaucaucggccucgucaccuuccucuuccucugcggccgcuccugcucccucaucuacaagggcuccuacgagcuccagacccucgagcucaacauggagacccucaacaugaccaugccccucuccugcaccaagaacuccucccaccacuacauccgcgucggcaacgagaccggccucgagcucacccucaccaacaccuccaucaucaaccacaaguucugcaaccucuccgacgcccacaagcgcaaccucuacgaccacgcccucauguccauccucuccaccuuccaccucuccauccccaacuucaaccaguacgaggccauguccugcgacuucaacggcggcaagaucuccguccaguacaaccucucccacgccuacgccgucgacgccgccgagcacugcggcaccgucgccaacggcguccuccagaccuucaugcgcauggccuggggcggcuccuacaucgcccucgacuccggccgcggcaacugggacugcaucaugaccuccuaccaguaccucaucauccagaacaccaccugggaggaccacugccaguucucccgccccucccccaucggcuaccucggccuccucucccagcgcacccgcgacaucuacaucucccgccgccuccucggcaccuucaccuggacccucuccgacuccgagggcaacgagacccccggcggcuacugccucacccgcuggaugcucaucgaggccgagcucaagugcuucggcaacaccgccgucgccaagugcaacgagaagcacgacgaggaguucugcgacaugcuccgccucuucgacuucaacaagcaggccauccagcgccucaaguccgaggcccagauguccauccagcucaucaacaaggccgucaacgcccucaucaacgaccagcucaucaugaagaaccaccuccgcgacaugaugggcauccccuacugcaacuacuccaaguacugguaccucaaccacaccuccuccggccgcaccucccuccccaagugcuggcucgucuccaacggcuccuaccucaacgagacccacuucuccgacgacaucgagcagcaggccgacaacaugaucaccgagaugcuccagaaggaguacaucgaccgccagggcaagaccccccucggccucgucgaccucuucgucuucuccaccuccuucuaccucaucuccaucuuccuccaccucaucaagauccccacccaccgccacaucgucggcaagcccugccccaagccccaccgccucaaccacaugggcaucugcuccugcggccucuacaagcagcccggcguccccacccgcuggaagcgcugaggacuaguuauaagacugacuagcccgaugggccucccaacgggcccuccuccccuccuugcaccgagauuaauaaaaaaaaaaaaaaaaaaaaaaaaaaaaaaaaaaaaaaaaaaaaaaaaaaaaaaaaaaaaaaaaugcaucccccccccccccccccccccccccccccccaaaggcucuuuucagagccaccagaauu

SEQ ID NO: 3381 - RNA, 1690 nt, Artificial Sequence
  mRNA product Design i-3 comprising derived and/or modified sequence from LASV(KAK-428;Clade n.d. (VII))__ANH09740__GPC (opt2)
gggagaaagcuuaccaugggccagaucgucaccuucuuccaggaggucccccacgucaucgaggaggucaugaacaucguccucaucgcccucucccuccucgccauccucaagggccucuacaacuucgccaccugcggcgucaucggccucaucaccuuccuccuccucugcggccgcuccugcuccgccaccuacaagggccaguacgagcuccagacccucgagcucaacauggagucccucaacaugaccaugccccucuccugcaccaagaacaacucccaccacuacauccgcgccggcaacaacaccggccucgagcucacccucaccaacaccuccaucaucucccacaaguucugcaaccucuccgacgcccacaagaagaaccucuacgaccacacccucauguccaucaucaccaccuuccaccucuccauccccaacuucaaccaguacgaggccauguccugcgacuucaacggcggcaagaucuccauccaguacaaccucucccacuccuacgccggcgacgccgcccagcacugcggcaccgucgccaacggcguccuccagaccuucaugcgcauggccuggggcggcuccuaccucgcccucgacuccggccgccgcggcugggacugcaucaucuccuccuaccaguaccucaucauccagaacaccaccugggacgaccacugccaguucucccgccccucccccaucggcuaccucggcuucgucucccagaagacccgcgacaucuacaucucccgccgccuccucggcaccuucaccuggacccucuccgacuccgagggccacgacaugcccggcggcuacugccucacccgcuggaugcucaucgaggccgaccucaagugcuucggcaacaccgccgucgccaagugcaacgagaagcacgacgaggaguucugcgacauguggcgccucuucgacuucaacaagcaggccauccagcgccucaaggccgaggcccagaugaacauccagcucaucaacaaggccgucaacgcccucaucaacgaccagcucaugaugaagaaccaccuccgcgacaucaugggcauccccuacugcaacuacuccaaguucugguaccucaacaacaccaccaccggccgcaccucccucccccgcugcuggcucaucuccaacggcuccuaccucaacgagacccacuucuccgacgacaucgagcagcaggccgacaacaugaucaccgagaugcuccagaaggaguacauggaccgccagggcaagaccccccucggccucgucgaccucuucgucuucuccaccuccuucuaccucaucaccaucuuccuccaccucgucaagauccccacccaccgccacaucgucggcaagcccugccccaagccccaccgccucaaccacaugggcaucugcuccugcggccucuacaagcagcccggcguccccguccgcuggaagcgcugaggacuaguuauaagacugacuagcccgaugggccucccaacgggcccuccuccccuccuugcaccgagauuaauaaaaaaaaaaaaaaaaaaaaaaaaaaaaaaaaaaaaaaaaaaaaaaaaaaaaaaaaaaaaaaaaugcaucccccccccccccccccccccccccccccccaaaggcucuuuucagagccaccagaauu

SEQ ID NO: 3382 - RNA, 1690 nt, Artificial Sequence; identical to SEQ ID NO: 3376
  mRNA product Design i-3 comprising derived and/or modified sequence from LASV(Pinneo-NIG-1969;Clade I)__AIT17836__GPC (opt2)

SEQ ID NO: 3383 - RNA, 1690 nt, Artificial Sequence
  mRNA product Design i-3 comprising derived and/or modified sequence from LASV(ISTH0009-NIG-2011;Clade II)__AIT17404__GPC (opt2)
gggagaaagcuuaccaugggccagaucaucaccuucuuccaggaggucccccacgucaucgaggaggucaugaacaucguccucaucgcccucucccuccucgccauccucaagggcaucuacaacgucgccaccugcggccucuucggccucgucuccuuccuccuccucugcggccgcuccugcuccaccaccuacaagggcgucuacgagcuccagacccucgagcucgacauggccucccucaacaugaccaugccccucuccugcaccaagaacaacucccaccacuacaucauggucggcaacgagaccggccucgagcucacccucaccaacaccuccaucaucaaccacaaguucugcaaccucuccgacgcccacaagaagaaccucuacgaccacgcccucauguccaucaucuccaccuuccaccucuccauccccaacuucaaccaguacgaggccauguccugcgacuucaacggcggcaagaucuccguccaguacaaccucucccacgccuacgccgucgacgccgccaaccacugcggcaccaucgccaacggcguccuccagaccuucaugcgcauggccuggggcggcuccuacaucgcccucgacuccggcaagggcuccugggacugcaucaugaccuccuaccaguaccucaucauccagaacaccaccugggaggaccacugccaguucucccgccccucccccaucggcuaccucggccuccucucccagcgcacccgcgacaucuacaucucccgccgccuccucggcaccuucaccuggacccucuccgacuccgagggcaacgagacccccggcggcuacugccucacccgcuggaugcucaucgaggccgagcucaagugcuucggcaacaccgccgucgccaagugcaacgagaagcacgacgaggaguucugcgacaugcuccgccucuucgacuucaacaagcaggccauccgccgccucaagaccgaggcccagauguccauccagcucaucaacaaggccgucaacgcccucaucaacgaccagcucaucaugaagaaccaccuccgcgacaucaugggcauccccuacugcaacuacuccaaguacugguaccucaaccacaccgucaccggcaagaccucccucccccgcugcuggcucgucuccaacggcuccuaccucaacgagacccacuucuccgacgacaucgagcagcaggccgacaacaugaucaccgagcuccuccagaaggaguacauggaccgccagggcaagaccccccucggccucgucgaccucuucgucuucuccaccuccuucuaccucaucuccaucuuccuccaccucaucaagauccccacccaccgccacaucaccggcaagcccugccccaagccccaccgccucaaccacaugggcaucugcuccugcggccucuacaagcaccccggcguccccgucaaguggaagcgcugaggacuaguuauaagacugacuagcccgaugggccucccaacgggcccuccuccccuccuugcaccgagauuaauaaaaaaaaaaaaaaaaaaaaaaaaaaaaaaaaaaaaaaaaaaaaaaaaaaaaaaaaaaaaaaaaugcaucccccccccccccccccccccccccccccccaaaggcucuuuucagagccaccagaauu

SEQ ID NO: 3384 - RNA, 1690 nt, Artificial Sequence
  mRNA product Design i-3 comprising derived and/or modified sequence from LASV(ISTH2010-NIG-2012;Clade II)__AIT17482__GPC (opt2)
gggagaaagcuuaccaugggccagaucaucaccuucuuccaggaggucccccacgucaucgaggaggucaugaacaucguccucaucgcccucucccuccucgccauccucaagggcaucuacaacgucgccaccugcggccucuucggccucgucuccuuccuccuccucugcggccgcuccugcuccaccaccuacaagggcgucuacgagcuccagacccucgagcucgacauggccucccucaacaugaccaugccccucuccugcaccaagaacaacucccaccacuacaucauggucggcaacgagaccggccucgagcucacccucaccaacaccuccaucaucaaccacaaguucugcaaccucuccgacgcccacaagaagaaccucuacgaccacgcccucauguccaucaucuccaccuuccaccucuccauccccaacuucaaccaguacgaggccauguccugcgacuucaacggcggcaagaucuccguccaguacaaccucucccacgccuacgccgucgacgccgccaaccacugcggcaccaucgccaacggcguccuccagaccuucaugcgcauggccuggggcggcuccuacaucgcccucgacuccggcaagggcuccugggacugcaucaugaccuccuaccaguaccucaucauccagaacaucaccugggaggaccacugccaguucucccgccccucccccaucggcuaccucggccuccucucccagcgcacccgcgacaucuacaucucccgccgccuccucggcaccuucaccuggacccucuccgacuccgagggcaacgagacccccggcggcuacugccucacccgcuggaugcucaucgaggccgagcucaagugcuucggcaacaccgccgucgccaagugcaacgagaagcacgacgaggaguucugcgacaugcuccgccucuucgacuucaacaagcaggccauccgccgccucaagaccgaggcccagauguccauccagcucaucaacaaggccgucaacgcccucaucaacgaccagcucaucaugaagaaccaccuccgcgacaucaugggcauccccuacugcaacuacuccaaguacugguaccucaaccacaccgucaccggcaagaccucccucccccgcugcuggcucgucuccaacggcuccuaccucaacgagacccacuucuccgacgacaucgagcagcaggccgacaacaugaucaccgagcuccuccagaaggaguacaucgaccgccagggcaagaccccccucggccucgucgaccucuucgucuucuccaccuccuucuaccucaucuccaucuuccuccaccucgucaagauccccacccaccgccacgucgucggcaagcccugccccaagccccaccgccucaaccacaugggcaucugcuccugcggccucuacaagcaccccggcguccccgucaaguggaagcgcugaggacuaguuauaagacugacuagcccgaugggccucccaacgggcccuccuccccuccuugcaccgagauuaauaaaaaaaaaaaaaaaaaaaaaaaaaaaaaaaaaaaaaaaaaaaaaaaaaaaaaaaaaaaaaaaaugcaucccccccccccccccccccccccccccccccaaaggcucuuuucagagccaccagaauu

SEQ ID NO: 3385 - RNA, 1690 nt, Artificial Sequence
  mRNA product Design i-3 comprising derived and/or modified sequence from LASV(Lassa virus/H.sapiens-wt/NGA/2015/ISTH_0543;Clade II)__AVO03639__GPC (opt2)
gggagaaagcuuaccaugggccagaucaucaccuucuuccaggaggucccccacgucaucgaggaggucaugaacaucguccucaucgcccucucccuccucgccauccucaagggcaucuacaacgucgccaccugcggccucuucggccucgucuccuuccuccuccucugcggccgcuccugcuccaccaccuacaagggcgucuacgagcuccagacccucgagcucgacauggccaaccucaacaugaccaugccccucuccugcaccaagaacaacucccaccacuacaucauggucggcaacgagaccggccucgagcucacccucaccaacaccuccaucaucaaccacaaguucugcaaccucuccgacgcccacaagaagaaccucuacgaccacgcccucauguccaucaucuccaccuuccaccucuccauccccaacuucaaccaguacgaggccauguccugcgacuucaacggcggcaagaucuccguccaguacaaccucucccacaccuacgccgucgacgccgccaaccacugcggcaccaucgccaacggcguccuccagaccuucaugcgcauggccuggggcggcuccuacaucgcccucgacuccggcaagggcuccugggacugcaucaugaccuccuaccaguaccucgucauccagaacaccaccugggaggaccacugccaguucucccgccccucccccaucggcuaccucggccuccucucccagcgcacccgcgacaucuacaucucccgccgccuccucggcaccuucaccuggacccucuccgacuccgagggcaacgagacccccggcggcuacugccucacccgcuggaugcucaucgaggccgagcucaagugcuucggcaacaccgccgucgccaagugcaacgagaagcacgacgaggaguucugcgacaugcuccgccucuucgacuucaacaagcaggccauccgccgccucaagaccgaggcccagauguccauccagcucaucaacaaggccgucaacgcccucaucaacgaccagcucaucaugaagaaccaccuccgcgacaucaugggcauccccuacugcaacuacuccaaguacugguaccucaaccacaccgucaccggcaagaccucccucccccgcugcuggcucgucuccaacggcuccuaccucaacgagacccacuucuccgacgacaucgagcagcaggccgacaacaugaucaccgagcuccuccagaaggaguacaucgaccgccagggcaagaccccccucggccucgucgaccucuucgucuucuccaccuccuucuaccucaucuccaucuuccuccaccucgucaagauccccacccaccgccacaucaccggcaagcccugccccaagccccaccgccucaaccacaugggcaucugcuccugcggccucuacaagcaccccggcguccccgucaaguggaagcgcugaggacuaguuauaagacugacuagcccgaugggccucccaacgggcccuccuccccuccuugcaccgagauuaauaaaaaaaaaaaaaaaaaaaaaaaaaaaaaaaaaaaaaaaaaaaaaaaaaaaaaaaaaaaaaaaaugcaucccccccccccccccccccccccccccccccaaaggcucuuuucagagccaccagaauu

SEQ ID NO: 3386 - RNA, 1690 nt, Artificial Sequence
  mRNA product Design i-3 comprising derived and/or modified sequence from LASV(Lassa virus/H.sapiens-wt/NGA/2016/ISTH_0009;Clade II)__AVO03571__GPC (opt2)
gggagaaagcuuaccaugggccagaucaucaccuucuuccaggaggucccccacgucaucgaggaggucaugaacaucguccucaucgcccucucccuccucgccauccucaagggcaucuacaacgucgccaccugcggccuccucggccucgucuccuuccuccuccucugcggccgcuccugcuccaccaccuacaagggcgucuacgagcuccagacccucgagcucgacauggccucccucaacaugaccaugccccucuccugcaccaagaacaacucccaccacuacaucauggucggcaacgagaccggccucgagcucacccucaccaacaccuccaucaucaaccacaaguucugcaaccucuccgacgcccacaagaagaaccucuacgaccacgcccucauguccaucaucuccaccuuccaccucuccauccccaacuucaaccaguacgaggccauguccugcgacuucaacggcggccgcaucuccguccaguacaaccucucccacuccuacgccgucgacgccgccaaccacugcggcaccaucgccaacggcguccuccagaccuucaugcgcauggccuggggcggcuccuacaucgcccucgacuccggcaagggcuccugggacugcaucaugaccuccuaccaguaccucaucauccagaacaccaccugggaggaccacugccaguucucccgccccucccccaucggcuaccucggccuccucucccagcgcacccgcgacaucuacaucucccgccgccuccucggcaccuucaccuggacccucuccgacuccgagggcaacgagacccccggcggcuacugccucacccgcuggaugcucaucgaggccgagcucaagugcuucggcaacaccgccgucgccaagugcaacgagaagcacgacgaggaguucugcgacaugcuccgccucuucgacuucaacaagcaggccauccgccgccucaagaccgaggcccagauguccauccagcucaucaacaaggccgucaacgcccucaucaacgaccagcucaucaugaagaaccaccuccgcgacaucaugggcauccccuacugcaacuacuccaaguacugguaccucaaccacaccgucaccggcaagaccucccucccccgcugcuggcucgucuccaacggcuccuaccucaacgagacccacuucuccgacgacaucgagcagcaggccgacaacaugaucaccgagcuccuccagaaggaguacaucgaccgccagggcaagaccccccucggccucgucgaccucuucgucuucuccaccuccuucuaccucaucuccaucuuccuccaccucgucaagauccccacccaccgccacaucaccggcaagcccugccccaagccccaccgccucaaccacaugggcaucugcuccugcggccucuacaaccaccccggcguccccgucaaguggaagcgcugaggacuaguuauaagacugacuagcccgaugggccucccaacgggcccuccuccccuccuugcaccgagauuaauaaaaaaaaaaaaaaaaaaaaaaaaaaaaaaaaaaaaaaaaaaaaaaaaaaaaaaaaaaaaaaaaugcaucccccccccccccccccccccccccccccccaaaggcucuuuucagagccaccagaauu

SEQ ID NO: 3387 - RNA, 1690 nt, Artificial Sequence
  mRNA product Design i-3 comprising derived and/or modified sequence from LASV(Lassa virus/H.sapiens-wt/NGA/2016/ISTH_0017;Clade II)__AVO03567__GPC (opt2)
gggagaaagcuuaccaugggccagaucaucaccuucuuccaggaggucccccacgucaucgaggaggucaugaacaucguccucaucgcccucucccuccucgccauccucaagggcaucuacaacgucgccaccugcggccucuucggccucgucuccuuccuccuccucugcggccgcuccugcuccaccaccuacaagggcgucuacgagcuccagacccucgagcucgacauggccucccucaacaugaccaugccccucuccugcaccaagaacaacucccaccacuacaucauggucggcaacgagaccggccucgagcucacccucaccaacaccuccaucaucaaccacaaguucugcaaccucuccgacgcccacaagaagaaccucuacgaccacgcccucauguccaucaucuccaccuuccaccucuccauccccaacuucaaccaguacgaggccauguccugcgacuucaacggcggcaagaucuccguccaguacaaccucucccacaccuacgccaucgacgccgccaaccacugcggcaccaucgccaacggcguccuccagaccuucaugcgcauggccuggggcggcuccuacaucgcccucgacuccggcaagggcuccugggacugcaucaugaccuccuaccaguaccucaucauccagaacaccaccugggaggaccacugccaguucucccgccccucccccaucggcuaccucggccuccucucccagcgcacccgcgacaucuacaucucccgccgccuccucggcaccuucaccuggacccucuccgacuccgagggcaacgagacccccggcggcuacugccucacccgcuggaugcucaucgaggccgagcucaagugcuucggcaacaccgccgucgccaagugcaacgagaagcacgacgaggaguucugcgacaugcuccgccucuucgacuucaacaagcaggccauccgccgccucaagaccgaggcccagauguccauccagcucaucaacaaggccgucaacgcccucaucaacgaccagcucaucaugaagaaccaccuccgcgacaucaugggcauccccuacugcaacuacuccaaguacugguaccucaaccacaccgucaccggcaagaccucccucccccgcugcuggcucgucuccaacggcuccuaccucaacgagacccacuucuccgacgacaucgagcagcaggccgacaacaugaucaccgagcuccuccagaaggaguacauggaccgccagggcaagaccccccucggccucgucgaccucuucgucuucuccaccuccuucuaccucaucuccaucuuccuccaccucguccgcauccccacccaccgccacgucaucggcaagcccugccccaagccccaccgccucaaccacaugggcaucugcuccugcggccucuacaagcaccccggcguccccgucaaguggaagcgcugaggacuaguuauaagacugacuagcccgaugggccucccaacgggcccuccuccccuccuugcaccgagauuaauaaaaaaaaaaaaaaaaaaaaaaaaaaaaaaaaaaaaaaaaaaaaaaaaaaaaaaaaaaaaaaaaugcaucccccccccccccccccccccccccccccccaaaggcucuuuucagagccaccagaauu

SEQ ID NO: 3388 - RNA, 1690 nt, Artificial Sequence
  mRNA product Design i-3 comprising derived and/or modified sequence from LASV(Lassa virus/H.sapiens-wt/NGA/2018/ISTH_0959;Clade II)__AVV65099__GPC (opt2)
gggagaaagcuuaccaugggccagaucaucaccuucuuccaggaggucccccacgucaucgaggaggucaugaacaucguccucaucgcccucucccuccucgccauccucaagggcaucuacaacgucgucaccugcggccucuucggccucgucuccuuccuccuccucugcggccgcuccugcuccaccaccuacaagggcgucuacgagcuccagacccucgagcucgacauggccucccucaacaugaccaugccccucuccugcaccaagaacaacucccaccacuacaucauggucggcaacgagaccggccucgagcucacccucaccaacaccuccaucaucaaccacaaguucugcaaccucuccgacgcccacaagaagaaccucuacgaccacgcccucauguccaucaucuccaccuuccaccucuccauccccaacuucaaccaguacgaggccauguccugcgacuucaacggcggcaagaucuccguccaguacaaccucucccacgccuacgccaucgacgccgccaaccacugcggcaccaucgccaacggcguccuccagaccuucaugcgcauggccuggggcggcuccuacaucgcccucgacuccggcaagggcuccugggacugcaucaugaccuccuaccaguaccucaucauccagaacaccaccugggaggaccacugccaguucucccgccccucccccaucggcuaccucggccuccucucccagcgcacccgcgacaucuacaucucccgccgccuccucggcaccuucaccuggacccucuccgacuccgagggcaacgagacccccggcggcuacugccucacccgcuggaugcucaucgaggccgagcucaagugcuucggcaacaccgccgucgccaagugcaacgagaagcacgacgaggaguucugcgacaugcuccgccucuucgacuucaacaagcaggccauccgccgccucaagaccgaggcccagauguccauccagcucaucaacaaggccgucaacgcccucaucaacgaccagcucaucaugaagaaccaccuccgcgacaucaugggcauccccuacugcaacuacuccaaguacugguaccucaaccacaccgucaccggcaagaccucccucccccgcugcuggcucgucuccaacggcuccuaccucaacgagacccacuucuccgacgacaucgagcagcaggccgacaacaugaucaccgagcuccuccagaaggaguacaucgaccgccagggcaagaccccccucggccucgucgaccucuucgucuucuccaccuccuucuaccucaucuccaucuuccuccaccucgucaagauccccacccaccgccacgucaucggcaagcccugccccaagccccaccgccucaaccacaugggcaucugcuccugcggccucuacaagcaccccggcguccccgucaaguggaagcgcugaggacuaguuauaagacugacuagcccgaugggccucccaacgggcccuccuccccuccuugcaccgagauuaauaaaaaaaaaaaaaaaaaaaaaaaaaaaaaaaaaaaaaaaaaaaaaaaaaaaaaaaaaaaaaaaaugcaucccccccccccccccccccccccccccccccaaaggcucuuuucagagccaccagaauu

SEQ ID NO: 3389 - RNA, 1690 nt, Artificial Sequence
  mRNA product Design i-3 comprising derived and/or modified sequence from LASV(LASV003-NIG-2008;Clade II)__AIT17580__GPC (opt2)
gggagaaagcuuaccaugggccagaucaucaccuucuuccaggaggucccccacgucaucgaggaggucaugaacaucguccucaucgcccucucccuccucgccauccucaagggcaucuacaacgucgccaccugcggccucuucggccucgucuccuuccuccuccucugcggccgcuccugcuccaccaccuacaagggcgucuacgagcuccagacccucgagcucgacauggccucccucaacaugaccaugccccucuccugcaccaagaacaacucccaccacuacaucauggucggcaacgagaccggccucgagcucacccucaccaacaccuccaucaucaaccacaaguucugcaaccucuccgacgcccacaagaagaaccucuacgaccacgcccucauguccaucaucuccaccuuccaccucuccauccccaacuucaaccaguacgaggccauguccugcgacuucaacggcggcaagaucuccguccaguacaaccucucccacaccuacgccgucgacgccgccaaccacugcggcaccaucgccaacggcguccuccagaccuucaugcgcauggccuggggcggcuccuacaucgcccucgacuccggcaagggcuccugggacugcaucaugaccuccuaccaguaccucaucauccagaacaccaccugggaggaccacugccaguucucccgccccucccccaucggcuaccucggccuccucucccagcgcacccgcgacaucuacaucucccgccgccuccucggcaccuucaccuggacccucuccgacuccgaguccaacgagacccccggcggcuacugccucacccgcuggaugcucaucgaggccgagcucaagugcuucggcaacaccgccgucgccaagugcaacgagaagcacgacgaggaguucugcgacaugcuccgccucuucgacuucaacaagcaggccauccgccgccucaaggccgaggcccagauguccauccagcucaucaacaaggccgucaacgcccucaucaacgaccagcucaucaugaagaaccaccuccgcgacaucaugggcauccccuacugcaacuacuccaaguacugguaccucaaccacaccgucaccggccgcaccucccucccccgcugcuggcucgucuccaacggcuccuaccucaacgagacccacuucuccgacgacaucgagcagcaggccgacaacaugaucaccgagcuccuccagaaggaguacauggaccgccagggcaagaccccccucggccucgucgaccucuucgucuucuccaccuccuucuaccucaucuccaucuuccuccaccucgucaagauccccacccaccgccacgucaucggcaagcccugccccaagccccaccgccucaaccacaugggcaucugcuccugcggccucuacaagcaccccggcguccccgucaaguggaagcgcugaggacuaguuauaagacugacuagcccgaugggccucccaacgggcccuccuccccuccuugcaccgagauuaauaaaaaaaaaaaaaaaaaaaaaaaaaaaaaaaaaaaaaaaaaaaaaaaaaaaaaaaaaaaaaaaaugcaucccccccccccccccccccccccccccccccaaaggcucuuuucagagccaccagaauu

SEQ ID NO: 3390 - RNA, 1690 nt, Artificial Sequence
  mRNA product Design i-3 comprising derived and/or modified sequence from LASV(LASV035-NIG-2009;Clade II)__AIT17588__GPC (opt2)
gggagaaagcuuaccaugggccagaucaucaccuucuuccaggaggucccccacgucaucgaggaggucaugaacaucguccucaucgcccucucccuccucgccauccucaagggcaucuacaacgucgccaccugcggccucuucggccucgucuccuuccuccuccucugcggccgcuccugcuccaccaccuacaagggcgucuacgagcuccagacccucgagcucgacauggccucccucaacaugaccaugccccucuccugcaccaagaacaacucccaccacuacaucauggucggcaacgagaccggccucgagcucacccucaccaacaccuccaucaucaaccacaaguucugcaaccucuccgacgcccacaagaagaaccucuacgaccacgcccucauguccaucaucuccaccuuccaccucuccauccccaacuucaaccaguacgaggccauguccugcgacuucaacggcggcaagaucuccguccaguacaaccucucccacgccuacgccgucgacgccgccaaccacugcggcaccaucgccaacggcguccuccagaccuucaugcgcauggccuggggcggcuccuacaucgcccucgacuccggcaagggcuccugggacugcaucaugaccuccuaccaguaccucaucauccagaacaccaccugggaggaccacugccaguucucccgccccucccccaucggcuaccucggccuccucucccagcgcacccgcgacaucuacaucucccgccgccuccucggcaccuucaccuggacccucuccgacuccgagggcaacgagacccccggcggcuacugccucacccgcuggaugcucaucgaggccgagcucaagugcuucggcaacaccgccgucgccaagugcaacgagaagcacgacgaggaguucugcgacaugcuccgccucuucgacuucaacaagcaggccauccgccgccucaaggccgaggcccagauguccauccagcucaucaacaaggccgucaacgcccucaucaacgaccagcucaucaugaagaaccaccuccgcgacaucaugggcauccccuacugcaacuacuccaaguacugguaccucaaccacaccgucaccggcaagaccucccucccccgcugcuggcucgucuccaacggcuccuaccucaacgagacccacuucuccgacgacaucgagcagcaggccgacaacaugaucaccgagcuccuccagaaggaguacaucgaccgccagggcaagaccccccucggccucgucgaccucuucgucuucuccaccuccuucuaccucaucuccaucuuccuccaccucgucaagauccccacccaccgccacgucaucggcaagcccugccccaagccccaccgccucaaccacaugggcaucugcuccugcggccucuacaagcaccccggcguccccgucaaguggaagcgcugaggacuaguuauaagacugacuagcccgaugggccucccaacgggcccuccuccccuccuugcaccgagauuaauaaaaaaaaaaaaaaaaaaaaaaaaaaaaaaaaaaaaaaaaaaaaaaaaaaaaaaaaaaaaaaaaugcaucccccccccccccccccccccccccccccccaaaggcucuuuucagagccaccagaauu

SEQ ID NO: 3391 - RNA, 1690 nt, Artificial Sequence
  mRNA product Design i-3 comprising derived and/or modified sequence from LASV(LASV1000-NIG-2009;Clade II)__AIT17782__GPC (opt2)
gggagaaagcuuaccaugggccagaucaucaccuucuuccaggaggucccccacgucaucgaggaggucaugaacaucguccucaucgcccucucccuccucgccauccucaagggcaucuacaacgucgccaccugcggccucuucggccucgucuccuuccuccuccucugcggccgcuccugcuccaccaccuacaagggcgucuacgagcuccagacccucgagcucgacauggccucccucaacaugaccaugccccucuccugcaccaagaacaacucccaccacuacaucauggucggcaacgagaccggccucgagcucacccucaccaacaccuccaucaucaaccacaaguucugcaaccucuccgacgcccacaagaagaaccucuacgaccacgcccucauguccaucaucuccaccuuccaccucuccauccccaacuucaaccaguacgaggccauguccugcgacuucaacggcggcaagaucuccguccaguacaaccucucccacaccuacgccgucgacgccgccaaccacugcggcaccaucgccaacggcguccuccagaccuucaugcgcauggccuggggcggcuccuacaucgcccucgacuccggcaagggcuccugggacugcaucaugaccuccuaccaguaccucaucauccagaacaccaccugggaggaccacugccaguucucccgccccucccccaucggcuaccucggccuccucucccagcgcacccgcgacaucuacaucucccgccgccuccucggcaccuucaccuggacccucuccgacuccgagggcaacgagacccccggcggcuacugccucacccgcuggaugcucaucgaggccgagcucaagugcuucggcaacaccgccgucgccaagugcaacgagaagcacgacgaggaguucugcgacaugcuccgccucuucgacuucaacaagcaggccaucaagcgccucaagaccgaggcccagauguccauccagcucaucaacaaggccgucaacgcccucaucaacgaccagcucaucaugaagaaccaccuccgcgacaucaugggcauccccuacugcaacuacuccaaguacugguaccucaaccacaccgucaccggcaagaccucccucccccgcugcuggcucgucuccaacggcuccuaccucaacgagacccacuucuccgacgacaucgagcagcaggccgacaacaugaucaccgagcuccuccagaaggaguacaucgaccgccagggcaagaccccccucggccucgucgaccucuucgucuucuccaccuccuucuaccucaucuccaucuuccuccaccucgucaagauccccacccaccgccacgucgucggcaagcccugccccaagccccaccgccucaaccacaugggcaucugcuccugcggccucuacaagcaccccggcguccccgucaaguggaagcgcugaggacuaguuauaagacugacuagcccgaugggccucccaacgggcccuccuccccuccuugcaccgagauuaauaaaaaaaaaaaaaaaaaaaaaaaaaaaaaaaaaaaaaaaaaaaaaaaaaaaaaaaaaaaaaaaaugcaucccccccccccccccccccccccccccccccaaaggcucuuuucagagccaccagaauu

SEQ ID NO: 3392 - RNA, 1690 nt, Artificial Sequence
  mRNA product Design i-3 comprising derived and/or modified sequence from LASV(LASV221-NIG-2010;Clade II)__AIT17624__GPC (opt2)
gggagaaagcuuaccaugggccagaucaucaccuucuuccaggaggucccccacgucaucgaggaggucaugaacaucguccucaucgcccucucccuccucgccauccucaagggcaucuacaacgucgccaccugcggccucuucggccucgucuccuuccuccuccucugcggccgcuccugcuccaccaccuacaagggcgucuacgagcuccagacccucgagcucgacauggccucccucaacaugaccaugccccucuccugcaccaagaacaacucccaccacuacaucauggucggcaacgagaccggccucgagcucacccucaccaacaccuccaucaucaaccacaaguucugcaaccucuccgacgcccacaagaagaaccucuacgaccacgcccucauguccaucaucuccaccuuccaccucuccauccccaacuucaaccaguacgaggccauguccugcgacuucaacggcggcaagaucuccguccaguacaaccucucccacaccuacgccaucgacgccgccaaccacugcggcaccaucgccaacggcguccuccagaccuucaugcgcauggccuggggcggcuccuacaucgcccucgacuccggcaagggcuccugggacugcaucaugaccuccuaccaguaccucaucauccagaacaccaccugggaggaccacugccaguucucccgccccucccccaucggcuaccucggccuccucucccagcgcacccgcgacaucuacaucucccgccgccuccucggcaccuucaccuggacccucuccgacuccgagggcaacgagacccccggcggcuacugccucacccgcuggaugcucaucgaggccgagcucaagugcuucggcaacaccgccgucgccaagugcaacgagaagcacgacgaggaguucugcgacaugcuccgccucuucgacuucaacaagcaggccauccgccgccucaagaccgaggcccagauguccauccagcucaucaacaaggccgucaacgcccucaucaacgaccagcucaucaugaagaaccaccuccgcgacaucaugggcauccccuacugcaacuacuccaaguacugguaccucaaccacaccgucaccggcaagaccucccucccccgcugcuggcucgucuccaacggcuccuaccucaacgagacccacuucuccgacgacaucgagcagcaggccgacaacaugaucaccgagaugcuccagaaggaguacauggaccgccagggcaagaccccccucggccucgucgaccucuucgucuucuccaccuccuucuaccucaucuccaucuuccuccaccucgucaagauccccacccaccgccacgucaucggcaagcccugccccaagccccaccgccucaaccacaugggcaucugcuccugcggccucuacaagcaccccggcguccccgucaaguggaagcgcugaggacuaguuauaagacugacuagcccgaugggccucccaacgggcccuccuccccuccuugcaccgagauuaauaaaaaaaaaaaaaaaaaaaaaaaaaaaaaaaaaaaaaaaaaaaaaaaaaaaaaaaaaaaaaaaaugcaucccccccccccccccccccccccccccccccaaaggcucuuuucagagccaccagaauu

SEQ ID NO: 3393 - RNA, 1690 nt, Artificial Sequence
  mRNA product Design i-3 comprising derived and/or modified sequence from LASV(LASV237-NIG-2010;Clade II)__AIT17638__GPC (opt2)
gggagaaagcuuaccaugggccagaucaucaccuucuuccaggaggucccccacgucaucgaggaggucaugaacaucguccucaucgcccucucccuccucgccauccucaagggcaucuacaacgucgccaccugcggccucuucggccucgucuccuuccuccuccucugcggccgcuccugcuccaccaccuacaagggcgucuacgagcuccagacccucgagcucgacauggccucccucaacaugaccaugccccucuccugcaccaagaacaacucccaccacuacaucauggucggcaacgagaccggccucgagcucacccucaccaacaccuccaucaucaaccacaaguucugcaaccucuccgacgcccacaagaaggaccucuacgaccacgcccucauguccaucaucuccaccuuccaccucuccauccccaacuucaaccaguacgaggccauguccugcgacuucaacggcggcaagaucuccguccaguacaaccucucccacaccuacgccgucgacgccgccaaccacugcggcaccaucgccaacggcguccuccagaccuucaugcgcauggccuggggcggcuccuacaucgcccucgacuccggcaagggcuccugggacugcaucaugaccuccuaccaguaccucaucauccagaacaccaccugggaggaccacugccaguucucccgccccucccccaucggcuaccucggccuccucucccagcgcacccgcgacaucuacaucucccgccgccuccucggcaccuucaccuggacccucuccgacuccgagggcaacgagacccccggcggcuacugccucacccgcuggaugcucaucgaggccgagcucaagugcuucggcaacaccgccgucgccaagugcaacgagaagcacgacgaggaguucugcgacaugcuccgccucuucgacuucaacaagcaggccauccgccgccucaagaccgaggcccagauguccauccagcucaucaacaaggccgucaacgcccucaucaacgaccagcucaucaugaagaaccaccuccgcgacaucaugggcauccccuacugcaacuacuccaaguacugguaccucaaccacaccgucaccggcaagaccucccucccccgcugcuggcucgucuccaacggcuccuaccucaacgagacccacuucuccgacgacaucgagcagcaggccgacaacaugaucaccgagcuccuccagaaggaguacauggaccgccagggcaagaccccccucggccucgucgaccucuucgucuucuccaccuccuucuaccucaucuccaucuuccuccaccucaucaagauccccacccaccgccacaucaccggcaagcccugccccaagccccaccgccucaaccacaugggcaucugcuccugcggccucuacaagcaccccggcguccccgucaaguggaagcgcugaggacuaguuauaagacugacuagcccgaugggccucccaacgggcccuccuccccuccuugcaccgagauuaauaaaaaaaaaaaaaaaaaaaaaaaaaaaaaaaaaaaaaaaaaaaaaaaaaaaaaaaaaaaaaaaaugcaucccccccccccccccccccccccccccccccaaaggcucuuuucagagccaccagaauu

SEQ ID NO: 3394 - RNA, 1690 nt, Artificial Sequence
  mRNA product Design i-3 comprising derived and/or modified sequence from LASV(LASV253-NIG-2011;Clade II)__AIT17670__GPC (opt2)
gggagaaagcuuaccaugggccagaucaucaccuucuuccaggaggucccccacgucaucgaggaggucaugaacaucguccucaucgcccucucccuccucgccauccucaagggcaucuacaacgucgccaccugcggccucuucggccucgucuccuuccuccuccucugcggccgcuccugcuccaccaccuacaagggcgucuacgagcuccagacccucgagcucgacauggccucccucaacaugaccaugccccucuccugcaccaagaacaacucccaccacuacaucauggucggcaacgagaccggccucgagcucacccucaccaacaccuccaucaucaaccacaaguucugcaaccucuccgacgcccacaagaagaaccucuacgaccacgcccucauguccaucaucuccaccuuccaccucuccauccccaacuucaaccaguacgaggccauguccugcgacuucaacggcggcaagaucuccguccaguacaaccucucccacaccuacgccgucgacgccgccaaccacugcggcaccaucgccaacggcguccuccagaccuucaugcgcauggccuggggcggcuccuacaucgcccucgacuccggcaagggcuccugggacugcaucaugaccuccuaccaguaccucaucauccagaacaccaccugggaggaccacugccaguucucccgccccucccccaucggcuaccucggccuccucucccagcgcacccgcgacaucuacaucucccgccgccuccucggcaccuucaccuggacccucuccgacuccgagggcaacgagacccccggcggcuacugccucacccgcuggaugcucaucgaggccgagcucaagugcuucggcaacaccgccgucgccaagugcaacgagaagcacgacgaggaguucugcgacaugcuccgccucuucgacuucaacaagcaggccauccgccgccucaaggccgaggcccagauguccauccagcucaucaacaaggccgucaacgcccucaucaacgaccagcucaucaugaagaaccaccuccgcgacaucaugggcauccccuacugcaacuacuccaaguacugguaccucaaccacaccgucaccggccgcaccucccucccccgcugcuggcucgucuccaacggcuccuaccucaacgagacccacuucuccgacgacaucgagcagcaggccgacaacaugaucaccgagcuccuccagaaggaguacaucgaccgccagggcaagaccccccucggccucgucgaccucuucgucuucuccaccuccuucuaccucaucuccaucuuccuccaccucgucaagauccccacccaccgccacaucaucggcaagcccugccccaagccccaccgccucaaccacaugggcaucugcuccugcggccucuacaagcaccccggcguccccgucaaguggaagcgcugaggacuaguuauaagacugacuagcccgaugggccucccaacgggcccuccuccccuccuugcaccgagauuaauaaaaaaaaaaaaaaaaaaaaaaaaaaaaaaaaaaaaaaaaaaaaaaaaaaaaaaaaaaaaaaaaugcaucccccccccccccccccccccccccccccccaaaggcucuuuucagagccaccagaauu

SEQ ID NO: 3395 - RNA, 1690 nt, Artificial Sequence
  mRNA product Design i-3 comprising derived and/or modified sequence from LASV(LASV254-NIG-2011;Clade II)__AIT17674__GPC (opt2)
gggagaaagcuuaccaugggccagaucaucaccuucuuccaggaggucccccacgucaucgaggaggucaugaacaucguccucaucgcccucucccuccucgccauccucaagggcaucuacaacgucgccaccugcggccucuucggccucgucuccuuccuccuccucugcggccgcuccugcuccaccaccuacaagggcgucuacgagcuccagacccucgagcucgacaugaccaaccucaacaugaccaugccccucuccugcaccaagaacaacucccaccacuacaucauggucggcaacgagaccggccucgagcucacccucaccaacaccuccaucaucaaccacaaguucugcaaccucuccgacgcccacaagaagaaccucuacaaccacgcccucauguccaucaucuccaccuuccaccucuccauccccaacuucaaccaguacgaggccauguccugcgacuucaacggcggcaagaucuccguccaguacaaccucucccacuccuacgccgucgacgccgccaaccacugcggcaccaucgccaacggcguccuccagaccuucaugcgcauggccuggggcggcuccuacaucgcccucgacuccggcaagggcaacugggacugcaucaugaccuccuaccaguaccucaucauccagaacaccaccugggaggaccacugccaguucucccgccccucccccaucggcuaccucggccuccucucccagcgcacccgcgacaucuacaucucccgccgccuccucggcaccuucaccuggacccucuccgacuccgagggcaacgagacccccggcggcuacugccucacccgcuggaugcucaucgaggccgagcucaagugcuucggcaacaccgccgucgccaagugcaacgagaagcacgacgaggaguucugcgacaugcuccgccucuucgacuucaacaagcaggccauccgccgccucaagaccgaggcccaggccaacauccagcucaucaacaaggccgucaacgcccucaucaacgaccagcucaucaugaagaaccaccuccgcgacaucaugggcauccccuacugcaacuacuccaaguacugguaccucaaccacaccgucaccggcaagaccucccucccccgcugcuggcucgucuccaacggcuccuaccucaacgagacccacuucuccgacgacaucgagcagcaggccgacaacaugaucaccgagcuccuccagaaggaguacauggaccgccagggcaagaccccccucggccucgucgaccucuucgucuucuccaccuccuucuaccucaucuccaucuuccuccaccucgucaagauccccacccaccgccacgucaucggcaagcccugccccaagccccaccgccucaaccacaugggcaucugcuccugcggccucuacaagcaccccggcguccccgucaaguggaagcgcugaggacuaguuauaagacugacuagcccgaugggccucccaacgggcccuccuccccuccuugcaccgagauuaauaaaaaaaaaaaaaaaaaaaaaaaaaaaaaaaaaaaaaaaaaaaaaaaaaaaaaaaaaaaaaaaaugcaucccccccccccccccccccccccccccccccaaaggcucuuuucagagccaccagaauu

SEQ ID NO: 3396 - RNA, 1690 nt, Artificial Sequence
  mRNA product Design i-3 comprising derived and/or modified sequence from LASV(Nig08-A19;Clade III)__ADU56618__GPC (opt2)
gggagaaagcuuaccaugggccagaucgucaccuucuuccaggaggucccccacgucaucgaggaggucaugaacaucguccucaucgcccucuccauccucgccauccucaagggccucuacaacaucgccaccugcggccucaucggccucgucaccuuccuccuccucuccggccgcuccugcuccaugaccuacaagggcgucuacgagcuccagacccucgagcucaacaugaacacccucaacaugaccaugccccucuccugcaccaagaacaacucccaccacuacaucauggucggcaacgagaccggccucgagcucacccucaccaacaccucccuccuccaccacaaguucugcaaccucuccgacgcccacaagaagaaccucuacgaccacacccucauguccaucaucuccaccuuccaccucuccauccccaacuucaaccaguacgaggccauguccugcgacuucaacggcggcaagaucaccguccaguacaaccucucccacuccuacgccaucgacgccgccaaccacugcggcaccgucgccaacggcguccuccagaccuucaugcgcauggccuggggcggcuccuacaucgcccucgacuccggccgcggcaagugggacugcaucaugaccuccuaccaguaccucaucauccagaacaccaccugggaggaccacugccaguucucccgccccucccccaucggcuaccucggccuccucucccagcgcacccgcgacaucuacaucucccgccgccuccucggcaccuucaccuggacccucuccgacuccgagggcaacgagacccccggcggcuacugccucacccgcuggaugcucaucgaggccgagcucaagugcuucggcaacaccgccgucgccaagugcaacgagaagcacgacgaggaguucugcgacaugcuccgccucuucgacuucaacaagcaggccauccgccgccucaaggccgaggcccagauguccauccagcucaucaacaaggccgucaacgcccucaucaacgaccagcucaucaugaagaaccaccuccgcgacaucaugggcauccccuacugcaacuacuccaaguacugguaccucaaccacaccuccaccggccgcaccucccucccccgcugcuggcucgucuccaacggcuccuaccucaacgagacccacuucuccgacgacaucgagcagcaggccgacaacaugaucaccgagaugcuccagaaggaguaccucgaccgccagggcaagaccccccucggccucgucgaccucuucgucuucuccaccuccuucuaccucaucuccaucuuccuccaccucgucaagauccccacccaccgccacaucgucggcaagcccugccccaagccccaccgccucaaccacaugggcaucugcuccugcggccucuacaagcagcccggcguccccguccgcuggaagcgcugaggacuaguuauaagacugacuagcccgaugggccucccaacgggcccuccuccccuccuugcaccgagauuaauaaaaaaaaaaaaaaaaaaaaaaaaaaaaaaaaaaaaaaaaaaaaaaaaaaaaaaaaaaaaaaaaugcaucccccccccccccccccccccccccccccccaaaggcucuuuucagagccaccagaauu

SEQ ID NO: 3397 - RNA, 1693 nt, Artificial Sequence
  mRNA product Design i-3 comprising derived and/or modified sequence from LASV(G1180-SLE-2010;Clade IV)__AIT17168__GPC (opt2)
gggagaaagcuuaccaugggccagaucgucaccuucuuccaggaggucccccacgucaucgaggaggucaugaacaucguccucaucgcccucuccauccucgccguccucaagggccucuacaacuucgccaccugcggccucgucggccuccucaccuuccuccuccucugcggccgcuccugcaccgccucccgcuacaagggcgucuacgagcuccagacccucgagcucaacauggagacccucaacaugaccaugccccucuccugcaccaagaacaacucccaccacuacaucauggucggcaacgagaccggccucgagcucacccucaccaacaccuccaucaucaaccacaaguucugcaaccucuccgacgcccacaagaagaaccucuacgaccacgcccucauguccaucaucuccaccuuccaccucuccauccccaacuucaaccaguacgaggccauguccugcgacuucaacggcggcaagaucuccguccaguacaaccucucccacuccuacgccggcgacgccgccaaccacugcggcaccgucgccaacggcguccuccagaccuucaugcgcauggccuggggcggcuccuacaucgcccucgacuccggccacggcuccugggacugcaucaugaccuccuaccaguaccucaucauccagaacaccaccugggaggaccacugccaguucucccgccccucccccaucggcuaccucggccuccucucccagcgcacccgcgacaucuacaucucccgccgccuccucggcaccuucaccuggacccucuccgacuccgagggcaaggacacccccggcggcuacugccucacccgcuggaugcucaucgaggccgagcucaagugcuucggcaacaccgccgucgccaagugcaacgagaagcacgacgaggaguucugcgacaugcuccgccucuucgacuucaacaagcaggccauccagcgccucaaggccgaggcccagauguccauccagcucaucaacaaggccgucaacgcccucaucaacgaccagcucaucaugaagaaccaccuccgcgacaucaugggcauccccuacugcaacuacuccaaguacugguaccucaaccacaccaccaccggcaagaccucccuccccaagugcuggcucgucuccaacggcuccuaccucaacgagacccacuucuccgacgacaucgagcagcaggccgacaacaugaucaccgagaugcuccagaaggaguacauggagcgccagggcaagaccccccucggccucgucgaccucuucgucuucuccaccuccuucuaccucaucuccaucuuccuccaccucgucaagauccccacccaccgccacaucgucggcaaguccugccccaagccccaccgccucaaccacaugggcaucugcuccugcggccucuacaagcagcccggcguccccgucaaguggaagcgcugaggacuaguuauaagacugacuagcccgaugggccucccaacgggcccuccuccccuccuugcaccgagauuaauaaaaaaaaaaaaaaaaaaaaaaaaaaaaaaaaaaaaaaaaaaaaaaaaaaaaaaaaaaaaaaaaugcaucccccccccccccccccccccccccccccccaaaggcucuuuucagagccaccagaauu

SEQ ID NO: 3398 - RNA, 1693 nt, Artificial Sequence
  mRNA product Design i-3 comprising derived and/or modified sequence from LASV(G1442-SLE-2011;Clade IV)__AIT17180__GPC (opt2)
gggagaaagcuuaccaugggccagaucgucaccuucuuccaggaggucccccacgucaucgaggaggucaugaacaucguccucaucgcccucuccauccucgccguccucaagggccucuacaacgucgccaccugcggccucaucggccucgucaccuuccuccuccucugcggccgcuccugcaccaccacccucuacaagggcgucuacgagcuccagacccucgagcucaacauggagacccucaacaugaccaugccccucuccugcaccaagaacaacucccaccacuacauccgcgucggcaacgagaccggccucgagcucacccucaccaacaccuccaucaucaaccacaaguucugcaaccucuccgacgcccacaagaagaaccucuacgaccacgcccucauguccaucaucuccaccuuccaccucuccauccccaacuucaaccaguacgaggccauguccugcgacuucaacggcggcaagaucuccguccaguacaaccucucccacuccuacgccggcgacgccgccaaccacugcggcaccgucgccaacggcguccuccagaccuucaugcgcauggccuggggcggcuccuacaucgcccucgacuccggccgcggcaacugggacugcaucaugaccuccuaccaguaccucaucauccagaacaccaccugggacgaccacugccaguucucccgccccucccccaucggcuaccucggccuccucucccagcgcacccgcgacgucuacaucucccgccgccuccucggcaccuucaccuggacccucuccgacuccgagggcaaggacacccccggcggcuacugccucacccgcuggaugcucaucgaggccgagcucaagugcuucggcaacaccgccgucgccaagugcaacgagaagcacgacgaggaguucugcgacaugcuccgccucuucgacuucaacaagcaggccauccagcgccucaaggccgaggcccagauguccauccagcucaucaacaaggccgucaacgcccucaucaacgaccagcucaucaugaagaaccaccuccgcgacaucaugggcauccccuacugcaacuacuccaaguacugguaccucaacaacaccgccaccggcaagaccucccuccccaagugcuggcucaucuccaacggcuccuaccucaacgagacccacuucuccgacgacaucgagcaggaggccgacaacaugaucaccgagaugcuccagaaggaguacauggagcgccagggcaagaccccccucggccucgucgaccucuucgucuucuccaccuccuucuaccucaucuccaucuuccuccaccucgucaagauccccacccaccgccacaucgucggcaaguccugccccaagccccaccgccucaaccacaugggcaucugcuccugcggccucuacaagcagcccggcguccccguccgcuggaagcgcugaggacuaguuauaagacugacuagcccgaugggccucccaacgggcccuccuccccuccuugcaccgagauuaauaaaaaaaaaaaaaaaaaaaaaaaaaaaaaaaaaaaaaaaaaaaaaaaaaaaaaaaaaaaaaaaaugcaucccccccccccccccccccccccccccccccaaaggcucuuuucagagccaccagaauu

SEQ ID NO: 3399 - RNA, 1693 nt, Artificial Sequence
  mRNA product Design i-3 comprising derived and/or modified sequence from LASV(G3010-SLE-2013;Clade IV)__AIT17344__GPC (opt2)
gggagaaagcuuaccaugggccagaucgucaccuucuuccaggaggucccccacgucaucgaggaggucaugaacaucguccucaucgcccucuccauccucgccguccucaagggccucuacaacuucgccaccugcggccucgucggccucgucaccuuccuccuccucugcggccgcuccugcaccaccucccucuacaagggcgucuacgagcuccagacccucgagcucaacauggagacccucaacaugaccaugccccucuccugcaccaagaacaacucccaccacuacaucauggucggcaacgagaccggccucgagcucacccucaccaacaccuccaucaucaaccacaaguucugcaaccucuccgacgcccacaagaagaaccucuacaaccacgcccucauguccaucaucuccaccuuccaccucuccauccccaacuucaaccaguacgaggccauguccugcgacuucaacggcggcaagaucuccguccaguacaaccucucccacuccuacgccggcgacgccgccucccacugcggcaccgucgccaacggcguccuccagaccuucaugcgcauggccuggggcggcuccuacaucgcccucgacuccggcuacggcaagugggacugcaucaugaccuccuaccaguaccucaucauccagaacaccaccugggaggaccacugccaguucucccgccccucccccaucggcuaccucggccuccucucccagcgcacccgcgacaucuacaucucccgccgccuccucggcaccuucaccuggacccucuccgacuccgagggcaaggacacccccggcggcuacugccucacccgcuggaugcucaucgaggccgagcucaagugcuucggcaacaccgccgucgccaagugcaacgagaagcacgacgaggaguucugcgacaugcuccgccucuucgacuucaacaagcaggccauccagcgccucaagaccgaggcccagauguccauccagcucaucaacaaggccgucaacgcccucaucaacgaccagcucaucaugaagaaccaccuccgcgacaucaugggcauccccuacugcaacuacuccaaguacugguaccucaaccacaccaccaccggcaagaccucccuccccaagugcuggcucgucuccaacggcuccuaccucaacgagacccacuucuccgacgacaucgagcagcaggccgacaacaugaucaccgagaugcuccagaaggaguacauggagcgccagggcaagaccccccucggccucgucgaccucuucgucuucuccaccuccuucuaccucaucuccaucuuccuccaccucgucaagauccccacccaccgccacaucgucggcaaguccugccccaagccccaccgccucaaccacaugggcaucugcuccugcggccucuacaagcagcccggcguccccguccgcuggaagcgcugaggacuaguuauaagacugacuagcccgaugggccucccaacgggcccuccuccccuccuugcaccgagauuaauaaaaaaaaaaaaaaaaaaaaaaaaaaaaaaaaaaaaaaaaaaaaaaaaaaaaaaaaaaaaaaaaugcaucccccccccccccccccccccccccccccccaaaggcucuuuucagagccaccagaauu

SEQ ID NO: 3400 - RNA, 1693 nt, Artificial Sequence
  mRNA product Design i-3 comprising derived and/or modified sequence from LASV(G502-SLE-2009;Clade IV)__AIT17126__GPC (opt2)
gggagaaagcuuaccaugggccagaucgucaccuucuuccaggaggucccccacgucaucgaggaggucaugaacaucguccucaucgcccucuccauccucgccguccucaagggccucuacaacuucgccaccugcggccucgucggccuccucaccuuccuccuccucugcggccgcuccugcaccaccggccucuacaagggcgucuacgagcuccagacccucgagcucaacauggagacccucaacaugaccaugccccucuccugcaccaagaacaacucccaccacuacaucauggucggcaacgagaccggccucgagcucacccucaccaacaccuccaucaucaaccacaaguucugcaaccucuccgacgcccacaagaagaaccucuacgaccacgcccucauguccaucaucuccaccuuccaccucuccauccccaacuucaaccaguacgaggccauguccugcgacuucaacggcggcaagaucuccguccaguacaaccucucccacuccuacgccggcgacgccgccgaccacugcggcaccgucgccaacggcguccuccagaccuucaugcgcauggccuggggcggcuccuacaucgcccucgacuccggccgcggccgcugggacugcaucaugaccuccuaccaguaccucaucauccagaacaccaccugggaggaccacugccaguucucccgccccucccccaucggcuaccucggccuccucucccagcgcacccgcgacaucuacaucucccgccgccuccucggcaccuucaccuggacccucuccgacuccgagggcaaggacacccccggcggcuacugccucacccgcuggaugcucaucgaggccgagcucaagugcuucggcaacaccgccgucgccaagugcaacgagaagcacgacgaggaguucugcgacaugcuccgccucuucgacuucaacaagcaggccauccagcgccucaaggccgaggcccagauguccauccagcucaucaacaaggccgucaacgcccucaucaacgaccagcucgucaugaagaaccaccuccgcgacaucaugggcauccccuacugcaacuacucccgcuacugguaccucaaccacaccaccaccggccgcaccucccuccccaagugcuggcucgucuccaacggcuccuaccucaacgagacccacuucuccgacgacaucgagcagcaggccgacaacaugaucaccgagaugcuccagaaggaguacauggagcgccagggcaagaccccccucggccucgucgaccucuucgucuucuccaccuccuucuaccucaucuccaucuuccuccaccucgucaagauccccacccaccgccacaucgucggcaaguccugccccaagccccaccgccucaaccacaugggcaucugcuccugcggccucuacaagcagcccggcguccccgucaaguggaagcgcugaggacuaguuauaagacugacuagcccgaugggccucccaacgggcccuccuccccuccuugcaccgagauuaauaaaaaaaaaaaaaaaaaaaaaaaaaaaaaaaaaaaaaaaaaaaaaaaaaaaaaaaaaaaaaaaaugcaucccccccccccccccccccccccccccccccaaaggcucuuuucagagccaccagaauu

SEQ ID NO: 3401 - RNA, 1693 nt, Artificial Sequence
  mRNA product Design i-3 comprising derived and/or modified sequence from LASV(G733-SLE-2010;Clade IV)__AIT17154__GPC (opt2)
gggagaaagcuuaccaugggccagaucgucaccuucuuccaggaggucccccacgucaucgaggaggucaugaacaucguccucaucgcccucuccauccucgccguccucaagggccucuacaacuucgccaccugcggcaucgucggccucgucuccuuccuccuccucugcggccgcuccugcaccaccucccucuacaagggcgucuacgagcuccagacccucgagcucaacauggagacccucaacaugaccaugccccucuccugcaccaagaacaacucccaccacuacaucauggucggcaacgagaccggccucgagcucacccucaccaacaccuccaucaucaaccacaaguucugcaaccucuccgacgcccacaagaagaaccucuacgaccacgcccucauguccaucaucuccaccuuccaccucuccauccccaacuucaaccaguacgaggccauguccugcgacuucaacggcggcaagaucuccguccaguacaaccucucccacuccuacgccggcgacgccgccaaccacugcggcaccaucgccaacggcguccuccagaccuucaugcgcauggccuggggcggcuccuacaucgcccucgacuccggccgcgaccgcugggacugcaucaugaccuccuaccaguaccucaucauccagaacaccaccugggaggaccacugccaguucucccgccccucccccaucggcuaccucggccuccucucccagcgcacccgcgacaucuacaucucccgccgccuccucggcaccuucaccuggacccucuccgacuccgagggcaaggacacccccggcggcuacugccucacccgcuggaugcucaucgaggccgagcucaagugcuucggcaacaccgccgucgccaagugcaacgagaagcacgacgaggaguucugcgacaugcuccgccucuucgacuucaacaagcaggccauccagcgccucaaggccgaggcccagauguccauccagcucaucaacaaggccgucaacgcccucaucaacgaccagcucaucaugaagaaccaccuccgcgacaucaugggcauccccuacugcaacuacuccaaguacugguaccucaaccacaccaccaccggcaagaccucccuccccaagugcuggcucgucuccaacggcuccuaccucaacgagacccacuucuccgacgacaucgagcagcaggccgacaacaugaucaccgagaugcuccagaaggaguacauggagcgccagggcaagaccccccucggccucgucgaccucuucgucuucuccaccuccuucuaccucaucuccaucuuccuccaccucgucaagauccccacccaccgccacgucgucggcaaguccugccccaagccccaccgccucaaccacaugggcaucugcuccugcggccucuacggccagcccggcguccccgucaaguggaagcgcugaggacuaguuauaagacugacuagcccgaugggccucccaacgggcccuccuccccuccuugcaccgagauuaauaaaaaaaaaaaaaaaaaaaaaaaaaaaaaaaaaaaaaaaaaaaaaaaaaaaaaaaaaaaaaaaaugcaucccccccccccccccccccccccccccccccaaaggcucuuuucagagccaccagaauu

SEQ ID NO: 3402 - RNA, 1693 nt, Artificial Sequence
  mRNA product Design i-3 comprising derived and/or modified sequence from MOPV/LASV reassortant(IGS-1;Clade IV)__AFY05576__GPC (opt2)
gggagaaagcuuaccaugggccagaucgucaccuucuuccaggaggucccccacgucaucgaggaggucaugaacaucguccucaucgcccucuccguccucgccguccucaagggccucuacaacuucgccaccugcggccucgucggccucgucaccuuccuccuccucugcggccgcuccugcaccaccucccucuacaagggcgucuacgagcuccagacccucgagcucaacauggagacccucaacaugaccaugccccucuccugcaccaagaacaacucccaccacuacaucauggucggcaacgagaccggccucgagcucacccucaccaacaccuccaucaucaaccacaaguucugcaaccucuccgacgcccacaagaagaaccucuacgaccacgcccucauguccaucaucuccaccuuccaccucuccauccccaacuucaaccaguacgaggccauguccugcgacuucaacggcggcaagaucuccguccaguacaaccucucccacuccuacgccggcgacgccgccaaccacugcggcaccgucgccaacggcguccuccagaccuucaugcgcauggccuggggcggcuccuacaucgcccucgacuccggccgcggcaacugggacugcaucaugaccuccuaccaguaccucaucauccagaacaccaccugggaggaccacugccaguucucccgccccucccccaucggcuaccucggccuccucucccagcgcacccgcgacaucuacaucucccgccgccuccucggcaccuucaccuggacccucuccgacuccgagggcgaggacacccccggcggcuacugccucacccgcuggaugcucaucgaggccgagcucaagugcuucggcaacaccgccgucgccaagugcaacgagaagcacgacgaggaguucugcgacaugcuccgccucuucgacuucaacaagcaggccauccagcgccucaaggccgaggcccagauguccauccagcucaucaacaaggccgucaacgcccucaucaacgaccagcucaucaugaagaaccaccuccgcgacaucaugggcauccccuacugcaacuacuccaaguacugguaccucaaccacaccaccaccggccgcaccucccuccccaagugcuggcucgucuccaacggcuccuaccucaacgagacccacuucuccgacgacaucgagcagcaggccgacaacaugaucaccgagaugcuccagaaggaguacauggagcgccagggcaagaccccccucggccucgucgaccucuucgucuucuccaccuccuucuaccucaucuccaucuuccuccaccucgucaagauccccacccaccgccacaucgucggcaaguccugccccaagccccaccgccucaaccacaugggcaucugcuccugcggccucuacaagcagcccggcguccccgucaaguggaagcgcugaggacuaguuauaagacugacuagcccgaugggccucccaacgggcccuccuccccuccuugcaccgagauuaauaaaaaaaaaaaaaaaaaaaaaaaaaaaaaaaaaaaaaaaaaaaaaaaaaaaaaaaaaaaaaaaaugcaucccccccccccccccccccccccccccccccaaaggcucuuuucagagccaccagaauu

SEQ ID NO: 3403 - RNA, 1693 nt, Artificial Sequence
  mRNA product Design i-3 comprising derived and/or modified sequence from LASV(LM765-SLE-2012;Clade IV)__AIT17814__GPC (opt2)
gggagaaagcuuaccaugggccagaucgucaccuucuuccaggaggucccccacgucaucgaggaggucaugaacaucguccucaucgcccucuccauccucgccguccucaagggccucuacaacuucgccaccugcggccucgucggccucgucaccuuccuccuccucugcggccgcuccugcaccaccucccucuacaagggcgucuacgagcuccagacccucgagcucaacauggagacccucaacaugaccaugccccucuccugcaccaagaacaacucccaccacuacaucauggucggcaacgagaccggccucgagcucacccucaccaacaccuccaucaucgaccacaaguucugcaaccucuccgacgcccaccgcaagaaccucuacgaccacgcccucauguccaucaucuccaccuuccaccucuccauccccaacuucaaccaguacgaggccauguccugcgacuucaacggcggcaagaucuccguccaguacaaccucucccacuccuacgccaaggacgccgccgaccacugcggcaccgucgccaacggcguccuccagaccuucaugcgcauggccuggggcggcuccuacaucgcccucgacuccggccgcggccgcugggacugcaucaugaccuccuaccaguaccucaucauccagaacaccaccugggaggaccacugccaguucucccgccccucccccaucggcuaccucggccuccucucccagcgcacccgcgacaucuacaucucccgccgccuccucggcaccuucaccuggacccucuccgacuccgagggcaaggacacccccggcggcuacugccucacccgcuggaugcucaucgaggccgagcucaagugcuucggcaacaccgccgucgccaagugcaacgagaagcacgacgaggaguucugcgacaugcuccgccucuucgacuucaacaagcaggccauccagcgccucaaggccgaggcccagauguccauccagcucaucaacaaggccgucaacgcccucaucaacgaccagcucaucaugaagaaccaccuccgcgacaucaugggcauccccuacugcaacuacuccaaguacugguaccucaaccacaccaccaccggcaagaccucccuccccaagugcuggcucgucuccaacggcuccuaccucaacgagacccacuucuccgacgacaucgagcagcaggccgacaacaugaucaccgagaugcuccagaaggaguacauggagcgccagggcaagaccccccucggccucgucgaccucuucgucuucuccaccuccuucuaccucaucuccaucuuccuccaccucgucaagauccccacccaccgccacaucgucggcaagcccugccccaagccccaccgccucaaccacaugggcaucugcuccugcggccucuacaagcagcccggcguccccgucaaguggaagcgcugaggacuaguuauaagacugacuagcccgaugggccucccaacgggcccuccuccccuccuugcaccgagauuaauaaaaaaaaaaaaaaaaaaaaaaaaaaaaaaaaaaaaaaaaaaaaaaaaaaaaaaaaaaaaaaaaugcaucccccccccccccccccccccccccccccccaaaggcucuuuucagagccaccagaauu

SEQ ID NO: 3404 - RNA, 1693 nt, Artificial Sequence
  mRNA product Design i-3 comprising derived and/or modified sequence from LASV(LM776-SLE-2012;Clade IV)__AIT17824__GPC (opt2)
gggagaaagcuuaccaugggccagaucgucaccuucuuccaggaggucccccacgucaucgaggaggucaugaacaucguccucaucgcccucuccauccucgccguccucaagggccucuacaacuucgccaccugcggccucgucggccucgucaccuuccuccuccucugcggccgcuccugcaccaccuccgucuacaagggcgucuacgagcuccagacccucgagcucaacauggagacccucaacaugaccaugccccucuccugcaccaagaacaacucccaccacuacaucauggucggcaacgagaccggccucgagcucacccucaccaacaccuccaucaucaaccacaaguucugcaaccucuccgacgcccacaagaagaaccucuacgaccacgcccucauguccaucaucuccaccuuccaccucuccauccccaacuucaaccaguacgaggccauguccugcgacuucaacggcggcaagaucuccguccaguacaaccucucccacuccuacgccggcgacgccgccaaccacugcggcaccgucgccaacggcguccuccagaccuucaugcgcauggccuggggcggcuccuacaucgcccucgacuccggccacggcaagugggacugcaucaugaccuccuaccaguaccucaucauccagaacaccaccugggaggaccacugccaguucucccgccccucccccaucggcuaccucggccuccucucccagcgcacccgcgacaucuacaucucccgccgccuccucggcaccuucaccuggacccucuccgacuccgagggcaaggacacccccggcggcuacugccucacccgcuggaugcucaucgaggccgagcucaagugcuucggcaacaccgccgucgccaagugcaacgagaagcacgacgaggaguucugcgacaugcuccgccucuucgacuucaacaagcaggccauccagcgccucaaggccgaggcccagauguccauccagcucaucaacaaggccgucaacgcccucaucaacgaccagcucaucaugaagaaccaccuccgcgacaucaugggcauccccuacugcaacuacuccaaguacugguaccucaaccacaccaccaccggcaagaccucccuccccaagugcuggcucgucuccaacggcuccuaccucaacgagacccacuucuccgacgacaucgagcagcaggccgacaacaugaucaccgagaugcuccagaaggaguacauggagcgccagggcaagaccccccucggccucgucgaccucuucgucuucuccaccuccuucuaccucaucuccaucuuccuccaccucgucaagauccccacccaccgccacaucgucggcaaguccugccccaagccccaccgccucaaccacaugggcaucugcuccugcggccucuacaagcagcccggcguccccguccgcuggaagcgcugaggacuaguuauaagacugacuagcccgaugggccucccaacgggcccuccuccccuccuugcaccgagauuaauaaaaaaaaaaaaaaaaaaaaaaaaaaaaaaaaaaaaaaaaaaaaaaaaaaaaaaaaaaaaaaaaugcaucccccccccccccccccccccccccccccccaaaggcucuuuucagagccaccagaauu

SEQ ID NO: 3405 - RNA, 1693 nt, Artificial Sequence
  mRNA product Design i-3 comprising derived and/or modified sequence from LASV(Mad39;Clade IV)__ANH09722__GPC (opt2)
gggagaaagcuuaccaugggccagaucgucaccuucuuccaggaggucccccacgucaucgaggaggucaugaacaucguccucaucgcccucuccauccucgccguccucaagggccucuacaacgucgccaccugcggccucaucggccucgucaccuuccuccuccucugcggccgcuccugcaccaccacccucuacaagggcgucuacgagcuccaggcccucgagcucaacauggagacccucaacaugaccaugccccucuccugcaccaagaacaacucccaccacuacauccgcgucggcaacgagaccggccucgagcucacccucaccaacaccucccucaucaaccacaaguucugcaaccucuccgacgcccacaagaagaaccucuacgaccacgcccucauguccaucaucuccaccuuccaccucuccauccccaacuucaaccaguacgaggccauguccugcgacuucaacgacggcaagaucuccguccaguacaaccucucccacaccuacgccggcgacaccgccaaccacugcggcaccgucgccaacggcguccuccagaccuucaugcgcauggccuggggcggcuccuacaucgcccucgacuccggccgcggcggcugggacugcaucaugaccuccuaccaguaccucaucauccagaacaccaccugggaggaccacugccaguucucccgccccucccccaucggcuaccucggccuccucucccagcgcacccgcgacaucuacaucucccgccgccuccucggcaccuucaccuggacccucuccgacuccgagggcaaggacacccccggcggcuacugccucacccgcuggaugcucaucgaggccgagcucaagugcuucggcaacaccgccgucgccaagugcaacgagaagcacgacgaggaguucugcgacaugcuccgccucuucgacuucaacaagcaggccauccagcgccucaaggccgaggcccagauguccauccagcucaucaacaaggccgucaacgcccucaucaacgaccagcucaucaugaagaaccaccuccgcgacaucaugggcauccccuacugcaacuacuccaaguacugguaccucaaccacaccgucaccggcaagaccucccuccccaagugcuggcucgucuccaacggcuccuaccucaacgagacccacuucuccgacgacaucgagcagcaggccgacaacaugaucaccgagaugcuccagaaggaguacauggagcgccagggcaagaccccccucggccucgucgaccucuucgucuucuccaccuccuucuaccucaucuccaucuuccuccaccucgucaagauccccacccaccgccacgucgucggcaagcccugccccaagccccaccgccucaaccacaugggcaucugcuccugcggcuucuacaagcagcccggcguccccguccgcuggaagcgcugaggacuaguuauaagacugacuagcccgaugggccucccaacgggcccuccuccccuccuugcaccgagauuaauaaaaaaaaaaaaaaaaaaaaaaaaaaaaaaaaaaaaaaaaaaaaaaaaaaaaaaaaaaaaaaaaugcaucccccccccccccccccccccccccccccccaaaggcucuuuucagagccaccagaauu

SEQ ID NO: 3406 - RNA, 1693 nt, Artificial Sequence
  mRNA product Design i-3 comprising derived and/or modified sequence from LASV(Z0947-SLE-2011;Clade IV)__AIT17840__GPC (opt2)
gggagaaagcuuaccaugggccagaucgucaccuucuuccaggaggucccccacgucaucgaggaggucaugaacaucguccucaucgcccucuccauccucgccguccucaagggccucuacaacuucgccaccugcggccucgucggccucgucaccuuccuccuccucugcggccgcuccugcaccaucucccucuacaagggcgucuacgagcuccagacccucgagcucaacauggagacccucaacaugaccaugccccucuccugcaccaagaacaacucccaccacuacaucauggucggcaacgagaccggccucgagcucacccucaccaacaccuccaucaucaaccacaaguucugcaaccucuccgacgcccacaagaagaaccucuacgaccacgcccucauguccaucaucuccaccuuccaccucuccauccccaacuucaaccaguacgaggccauguccugcgacuucaacggcggcaagaucuccguccaguacaaccucucccacuccuacgccggcgacgccgccaaccacugcggcaccgucgccaacggcguccuccagaccuucaugcgcauggccuggggcggcuccuacaucgcccucgacuccggccgcgaccgcugggacugcaucaugaccuccuaccaguaccucaucauccagaacaccaccugggaggaccacugccaguucucccgccccucccccaucggcuaccucggccuccucucccagcgcacccgcgacaucuacaucucccgccgccuccucggcaccuucaccuggacccucuccgacuccgagggcaaggacacccccggcggcuacugccucacccgcuggaugcucaucgaggccgagcucaagugcuucggcaacaccgccgucgccaagugcaacgagaagcacgacgaggaguucugcgacaugcuccgccucuucgacuucaacaagcaggccauccagcgccucaaggccgaggcccagauguccauccagcucaucaacaaggccgucaacgcccucaucaacgaccagcucaucaugaagaaccaccuccgcgacaucaugggcauccccuacugcaacuacuccaaguacugguaccucaaccacaccaccaccggcaagaccucccuccccaagugcuggcucgucuccaacggcuccuaccucaacgagacccacuucuccgacgacaucgagcagcaggccgacaacaugaucaccgagaugcuccagaaggaguacauggagcgccagggcaagaccccccucggccucgucgaccucuucgucuucuccaccuccuucuaccucaucuccaucuuccuccaccucgucaagauccccacccaccgccacaucgucggcaagcccugccccaagccccaccgccucaaccacaugggcaucugcuccugcggccucuacaagcagcccggcguccccgucaaguggaagcgcugaggacuaguuauaagacugacuagcccgaugggccucccaacgggcccuccuccccuccuugcaccgagauuaauaaaaaaaaaaaaaaaaaaaaaaaaaaaaaaaaaaaaaaaaaaaaaaaaaaaaaaaaaaaaaaaaugcaucccccccccccccccccccccccccccccccaaaggcucuuuucagagccaccagaauu

SEQ ID NO: 3407 - RNA, 1693 nt, Artificial Sequence
  mRNA product Design i-3 comprising derived and/or modified sequence from LASV(Josiah;Clade IV)__NP_694870__GPC (opt3)
gggagaaagcuuaccaugggccagaucgugaccuucuuucaagaggucccccacguuauugaagaggugaugaacauaguacugaucgcccucagcgugcuugcuguccugaagggguuguacaauuucgcaacaugcggauuagugggucugguuacuuuucuacuccuguguggcagauccugcacgaccucucuuuauaaagggguguacgaacugcagacauuggagcucaacauggaaacucugaauaugaccaugccucugucauguacaaagaacaauagucaucacuauauuauggucggaaacgagaccggccucgaguuaacucugacaaauaccagcaucauuaaccauaaauucugcaaucuuuccgacgcccacaagaaaaacuuguacgaucaugcgcugaugucuaucauaucgacguuucaccuaucaaucccaaauuucaaccaguaugaagcuaugagcugugacuuuaauggugggaagauuagugugcaguacaaccucucccacucuuaugccggagaugcagccaaucauugcggcacuguagcuaacggcguucugcaaaccuucaugaggauggcauggggagggagcuacaucgcccuugacuccggucggggcaacugggauuguauuaugacaucauaccaguaucugaucauacagaauacuaccugggaggaccacugccaguuuagucgcccgagccccauuggguacuugggacuccugucucaacgaacacgugauaucuauauuuccagaagguuacugggcaccuucacguggacucucucagacagcgaagguaaggauacaccugggggauacugucuuacccgguggaugcugaucgaggcugaguugaaaugcuuuggcaacacugccguggcgaaguguaaugaaaaacaugacgaggaguucugcgauaugcuacgccuguuugacuucaacaagcaggcaauccagagacucaaagccgaagcucagaugaguauucaacugauaaauaaggccgucaacgcacuuaucaaugaucagcugauuaugaagaaccacuugagggacaucaugggcauaccauauugcaauuacucuaaauauugguaccucaaccacacaaccacggggcggaccucccugcccaaguguugguuagugagcaauggaucguaccugaacgaaacacauuucucugacgauauugagcagcaagcugacaauaugaucacugagaugcuacagaaagaauauauggagcgccaggguaagaccccucucggccugguggaucuuuuugucuucuccacaucauuuuacuugaucaguauuuuccugcaccucguuaaaaucccaacucaucgacacauugugggaaagagcugccccaaaccucauagacugaaccacauggggauauguuccugcggccuuuauaagcagccagguguaccggugaaguggaaaaggugaggacuaguuauaagacugacuagcccgaugggccucccaacgggcccuccuccccuccuugcaccgagauuaauaaaaaaaaaaaaaaaaaaaaaaaaaaaaaaaaaaaaaaaaaaaaaaaaaaaaaaaaaaaaaaaaugcaucccccccccccccccccccccccccccccccaaaggcucuuuucagagccaccagaauu

SEQ ID NO: 3408 - RNA, 1690 nt, Artificial Sequence
  mRNA product Design i-3 comprising derived and/or modified sequence from LASV(LP;Clade I)__AAF86701__GPC (opt3)
gggagaaagcuuaccaugggccagaucauuaccuucuuucaagaggugccccacgucauagaagagguuaugaacaucgugcugauugcccucagccuucuggcuaucuugaagggguuauacaauauugcaacaugcggaaucauaggucugguagccuuccuauuucucuguggcaaauccugcucucugacucuuaaagggggauaugaacugcagacguuggagcucaacauggaaacccugaauaugacaaugccucugucauguacuaagaacaguagccaucacuacaucagagugggcaaugagaccggucucgaguuaacacugaccaacacuuccauuaucaaucauaaguucugcaaccuuucugacgcgcacaaaaagaauuuguaugaucaugcucugaugucgauuaucucaacauuucaccuaagcauaccaaacuucaaucaguacgaagccaugaguugugacuuuaacgggggaaagauuuccguccaguauaaucucucucacagcuacgcaggcgaugccgcugagcauugcggcaccguggcaaacgggguucugcaaacguucaugaggauggccuggggaggucgguauaucgcucuugacuccggcaaagggaauugggauuguauuaugacuucauaccaguaccugaucauccagaacaccacaugggaagaccacugccaguuuagucgcccgagccccauuggauauuugggccuccugucucaacgaacucgugauauauacaucuccagaagguuacuggguaccuucacauggacccucucagacagcgaggggaacgagacgccuggaggcuauugucuuacucgguggaugcugauugaagccgaguugaagugcuuuggcaauacagcgguggcaaaauguaacgaaaagcaugaugaggaguucugcgacaugcuacgccuguuugauuucaauaaacaggccaucagaaggcucaaggcugaagcccagaugaguauacagcugauuaacaaggcagucaaugcucuuaucaacgaccaacugaucaugaaaaaucacuugcgggauauuauggggaucccauacugcaacuauucuaaguacugguaucucaaucacaccuccagcggacgcacuucgcugcccaaauguugguuaauuucuaacgguuccuaccugaaugagacacaguucucagacgacauagaacagcaagccgauaacaugaucaccgagaugcuacagaaggaauacauugagcgacagggcaaaacgccucucgggcugguggacaucuuuaucuucaguaccagcuuuuaucuuauuuccauauucuugcaucugaucaagauuccaacacacagacauaucguaggaaaacccugcccuaagccacacaggcucaaucauaugggcguuuguucuugcggucuguacaagcacccgggggugcccacuaaauggaagcggugaggacuaguuauaagacugacuagcccgaugggccucccaacgggcccuccuccccuccuugcaccgagauuaauaaaaaaaaaaaaaaaaaaaaaaaaaaaaaaaaaaaaaaaaaaaaaaaaaaaaaaaaaaaaaaaaugcaucccccccccccccccccccccccccccccccaaaggcucuuuucagagccaccagaauu

SEQ ID NO: 3409 - RNA, 1690 nt, Artificial Sequence
  mRNA product Design i-3 comprising derived and/or modified sequence from LASV(803213;Clade II)__AAF86703__GPC (opt3)
gggagaaagcuuaccaugggccagaucauuaccuucuuucaagaggugccccacgucauagaagagguuaugaacaucgugcugauugcccucagccuucuggcuaucuugaaggggauuuacaauguagcaacaugcggauuauucggucugaucuccuuucuacuccuguguggcagaucuugcucagugacuuauaaaggggucuacgaacuucagacgcuggaguugaacauggccaaucucaacaugaccaugccucugaguuguacaaagaauaacagccaucacuauauaauggugggaaaugaaacuggccuggagcucaccuuaacaaacaccuccaucauuaaucauaaauucugcaaccugucugacgcgcacaagaaaaaucuuuacgaucaugcuuugaugucgaucauuucaacuuuucaccugagcaucccaaacuucaaucaguaugaggccaugaguugugacuuuaacggugggaagauauccguucaguacaaucuaucucacagcuucgcaguggaugccgcuaaccauugcggaacaauugcaaacggcguccuccaaaccuuuaugaggauggccuggggcggguccuauaucgcucuggacucaggaaaggguaauugggauuguauuaugacgaguuaccaguaccuuaucauccagaacacuaccugggaagaccacugccaguucagccggccgucucccauuggcuaucugggguugcucucccaacgcacacgagauauauacaucucacguagacuguuaggaacuuuuaccuggacacugagcgacagugagggcaaugaagccccugguggguauugucucaccagguggaugcuuauugaggcggagcugaaaugcuucggaaacacggcaguggccaaguguaaugaaaaacaugaugaggaauuuugcgacauguugcggcuauucgauuucaacaagcaggcuaucaaacgccugaagacugaggcccagaugucuauacagcucauuaauaaggcaguaaacgcucugaucaaugaccaacuuaucaugaaaaaccaccugagagauauuaugggcaucccauacugcaauuauuccagguacugguauuugaaccacacaguuaccggcaagacuagccucccccgguguuggcuggugucgaaugggucuuacuuaaacgaaacacauuuuuccgacgacauugagcagcaggccgauaauaugauaaccgagaugcugcaaaaagaauacauggaccgccagggaaagacgccucuaggucucgucgaucuguucguguuuucaaccaguuucuaucuuaucagcaucuuuuugcaccuggugaaaauuccaacacaucgacacaucgucggcaagcccugcccuaaaccacauagacucaaccacauggggauuuguuccugcggacuguacaagcacccgggcguucccgugaaguggaaaaggugaggacuaguuauaagacugacuagcccgaugggccucccaacgggcccuccuccccuccuugcaccgagauuaauaaaaaaaaaaaaaaaaaaaaaaaaaaaaaaaaaaaaaaaaaaaaaaaaaaaaaaaaaaaaaaaaugcaucccccccccccccccccccccccccccccccaaaggcucuuuucagagccaccagaauu

SEQ ID NO: 3410 - RNA, 1690 nt, Artificial Sequence
  mRNA product Design i-3 comprising derived and/or modified sequence from LASV(GA391;Clade III)__CAA36645__GPC (opt3)
gggagaaagcuuaccaugggccagaucgugaccuucuuucaagaggucccccacguuauugaagaggugaugaacauaguacugaucgcccucagcauucuugcuauccugaagggguuguacaauguggcaacaugcggauuaauuggucuggucacuuuccuacuccuguccggcagaucuuguucacuuaucuauaaagggacguacgaacugcagaccuuggagcucaacauggaaacacugaauaugacuaugccucugaguugcaccaagaacaauagccaucacuauauaagggugggaaacgagacaggccucgaguuaacccugacuaauacauccauccuuaaccauaaauuuuguaauuugucugacgcccacaagcggaaccuguacgaucauucgcuaaugucaauuaucagcaccuuccaccucaguauuccaaauuuuaaccaguaugaagcgauguccugcgacuucaauggugggaaaaucacgguucaguacaaccugucucacagcuuugcuguggaugccgcaggacauuguggcacucuugccaauggcguccugcaaaccuucaugcgcauggcuuggggaggguccuauauagcauuggacucaggucgaggcaacugggauugcauuaugacaaguuaccaguaccucaucauucagaacacuaccugggacgaucacugucaguuuagccguccgucucccaucggguaucugggauuacugucccaaagaacaagggacaucuacauuucacggcgccuccuuggcaccuucacguggacucugagcgauagugaggguaaugaaacaccugggggauauugcuugaccagauggaugcuaauagaggccgagcugaaguguuuuggcaacacugcuguggccaagugcaaugaaaaacaugacgaggaguucugugauaugcucaggcuguuugacuucaacaagcaggcgauccggcgccuuaaaacagaagcacagaugucuauucagcugaucaauaaggccguaaacgcuuugauaaaugaucaacucauuaugaaaaaccaucugcgagacaucaugggcaucccauacugcaauuauuccagauacugguauuuaaaccacaccagcacggggaagaccucgcugcccaggugcuggcuaauuucuaauggauccuaccucaacgaaacaaaguucucagacgauaucgagcagcaggccgacaauaugauuacugagaugcugcaaaaagaauacauagaucggcaggguaagaccccucuuggcuugguugaccuguuuguguucaguacuagcuuuuaucucaucuccauuuuccugcaccuugucaaaaucccaacacaccgucauaucguggggaagcccuguccuaaaccacaccgccugaaccauaugggaauuugcucuuguggcuuguacaagcagccgggugugcccgucagauggaaaaggugaggacuaguuauaagacugacuagcccgaugggccucccaacgggcccuccuccccuccuugcaccgagauuaauaaaaaaaaaaaaaaaaaaaaaaaaaaaaaaaaaaaaaaaaaaaaaaaaaaaaaaaaaaaaaaaaugcaucccccccccccccccccccccccccccccccaaaggcucuuuucagagccaccagaauu

SEQ ID NO: 3411 - RNA, 1693 nt, Artificial Sequence
  mRNA product Design i-3 comprising derived and/or modified sequence from LASV(AV;Clade V)__CCA30314__GPC (opt3)
gggagaaagcuuaccaugggccagaucgugaccuucuuucaagaggucccccacguuauugaagaggugaugaacauaguacugaucgcccucagcauucuugcugugcugaagggguuguacaauaucgcaacaugcggauuaauuggucugaucacuuuccuacuccuguguggcagauccugcagcucaaaccuuuauaaaggggucuacgaacugcagaguuuggaccucaauauggagacgcugaacaugaccaugccucugagcuguacaaagaauaacucccaucacuauauaagggugggaaaugauacuggccucgaauuaacccugacaaacaccucuauccuuaaucauaaauuuugcaacuugucggacgcccacaagaaagaucuguacgaccaugcgcuaaugucaauuaucagcacuuuccaccucaguauuccaaauuuuaaccaguaugaggcuauguccugugauuucaauggugggaagaucucuguucaguacaaccugagccacuccuaugccauagacgcagccaaucauugcggaacaguggcuaacggcauucuucaaaccuuuaugcggauggcauggggcgggucauacaucgcccuggauaguggacgcgguaacugggacuguauuaugacgagcuaccaguauuugaucauccagaauacuaccugggagaaccacugccaguucucucgaccgucccccauuggcuaccucgggcuguuaucacaacguacaagagauauauauaucagcaggcggcugcucggaacuuuuaccuggacacuuagugacucugaaggcaaugcuaccccugguggguacugucugacgcgcuggauguugauugaggccgaacuaaagugcuucggaaacacugcggucgcaaaauguaaugagaagcaugaugaggaauuuugcgacaugcugagacucuucgauuuuaacaaacaggccaucuccaggcugaagucugaggcucagaugucgauacagcuuauuaauaaagccgugaacgcacugaucaaugaccaauugaucaugaagaaccaccuccgggacauuaugggcaucccauauugcaauuacucuaaguauugguaccugaaccacacaauuaccggcaaaacuuccuuacccaaguguuggcugguaucaaaugggaguuaccuaaacgaaacacauuucagcgaugacauagagcagcaggcugauaauaugaucaccgaaaugcuccaaaaagaguauauggagcgccagggaaagacgccucugggucuuguugacuuguucguguuuuccaccucuuucuaccugauuagcaucuuucuccgacuggucaaaaucccaacacacagacauauugugggcaagcccugcccuaaaccacacaggcuuaaccauauggggauauguucaugcggacuguauaagcagccgggcgugcccguccgguggaagcguugaggacuaguuauaagacugacuagcccgaugggccucccaacgggcccuccuccccuccuugcaccgagauuaauaaaaaaaaaaaaaaaaaaaaaaaaaaaaaaaaaaaaaaaaaaaaaaaaaaaaaaaaaaaaaaaaugcaucccccccccccccccccccccccccccccccaaaggcucuuuucagagccaccagaauu

SEQ ID NO: 3412 - RNA, 1690 nt, Artificial Sequence
  mRNA product Design i-3 comprising derived and/or modified sequence from LASV(Togo/2016/7082;Clade VI)__AMR44577__GPC (opt3)
gggagaaagcuuaccaugggccagaucauuaccuucuuucaagaggugccccacgucauagaagagguuaugaacaucgugcugauugcccucagccuucuggcuaucuugaaggggguauacaauguggcaacaugcggaauuaucgguuuagucacuuuccuguuucuauguggcagauccugcucucucauauauaaagggucauacgaacugcagacgcuugagcugaacauggaaaccuugaauaugacaaugccucucaguuguacuaagaacagcucccaucacuauaucagggugggaaaugagaccggccuggagcugacacucaccaacacuucuauuaucaaucauaaauucugcaacuuaucggacgcccacaagcggaaucuguacgaucaugcgcuuaugucaauuuugagcacauuucaccugaguaucccaaacuucaaucaguaugaagcuauguccugugacuuuaacggugggaaaauaucuguucaguacaaucuaagccacgccuaugcaguggaugccgcugagcauugcggaaccgucgcaaacggcgugcuccaaacguucaugcgcauggccuggggcggguccuacauugcucuggacucaggacgagguaauugggauuguaucaugaccaguuaccaguaucuuauuauccagaacacuacaugggaagaccacugccaguuuagccguccgucucccaucggcuaccugggguugcucucccaaagaacuagggauauuuauauaucacggcgccuguuaggaaccuucacauggacccugagcgacagugagggcaacgagacgccugguggguacugucucacuagauggaugcuuaucgaagccgagcugaagugcuuuggaaauacagcgguagcaaaguguaacgaaaaacaugaugaggaguucugcgacauguugaggcuauuugauuucaauaagcaggccauucagcggcugaaaucugaagcucagauguccauccaacucauaaacaaggccguuaaugcacugauuaacgaccagcuuaucaugaaaaaucaucugcgcgauaugaugggcaucccauauugcaacuacagcaaguauugguacuugaaucacaccucgucuggccgaacuucccuccccaaguguuggcuggugucaaacgggaguuacuuaaaugagacacacuucagcgacgacauugaacagcaagcugauaacaugaucaccgagaugcugcagaaagaauauauugacagacagggaaagacgccucuaggucucgucgaucuguuuguguucuccaccucuuuuuaccuuauaagcaucuucuugcaccugauuaaaaucccaacacauaggcacaucgugggcaagcccugcccuaaaccacaucggcucaaucacauggggauuuguucaugcggacuguauaagcagccgggcguccccacucguuggaaacgcugaggacuaguuauaagacugacuagcccgaugggccucccaacgggcccuccuccccuccuugcaccgagauuaauaaaaaaaaaaaaaaaaaaaaaaaaaaaaaaaaaaaaaaaaaaaaaaaaaaaaaaaaaaaaaaaaugcaucccccccccccccccccccccccccccccccaaaggcucuuuucagagccaccagaauu

SEQ ID NO: 3413 - RNA, 1690 nt, Artificial Sequence
  mRNA product Design i-3 comprising derived and/or modified sequence from LASV(KAK-428;Clade n.d. (VII))__ANH09740__GPC (opt3)
gggagaaagcuuaccaugggccagaucgugaccuucuuucaagaggucccccacguuauugaagaggugaugaacauaguacugaucgcccucagccuucuggcuauuuugaagggguuauacaauuucgcaacaugcggagugaucggucugauuacuuuucuacuccuguguggcagauccugcucugccacguauaaagggcaguacgaacuucagacccuggaguugaacauggaaucacucaauaugacaaugccucugaguuguacuaagaacaauagccaucacuauaucagggcgggaaacaauaccggccuggagcucacauuaaccaacacuuccauaaucucucauaaauucugcaaucugucggacgcucacaagaaaaaccuuuacgaucauacauugaugucaauuaucaccacguuucaccugagcauuccaaauuucaaccaguaugaggccaugaguugugacuuuaauggugggaagaucuccauacaauacaaccuaucucacagcuaugcaggagaugccgcucagcauugcggcacugucgcaaauggcgugcuccagaccuucaugcggauggccuggggaggguccuaccuggcucuugacucaggucgccgaggcugggauuguauuaucaguagcuaccaguaucugauuauccaaaacacaacuugggacgaucacugccaguuuucucguccgucccccaucggguacuugggauucguuucacagaagaccagagacauuuauauaagcaggcggcuccugggcacauuuaccuggacguuaagugauucugaaggucaugacaugccugggggauacugucugacucgcuggaugcucaucgaggccgaucuuaaaugcuucggcaacacagcgguggcaaaguguaaugaaaaacacgacgaggaguuuugcgauauguggagacuguucgacuucaacaagcaggccauucaaagguugaaagcugaagcccagaugaauauccagcuaauaaacaaggcagucaaugcucugauuaacgaccaacucaugaugaagaaucaucugcgggauaucaugggcaucccauauugcaacuacuccaaauuuugguaucuuaauaacaccacuacagggcgcaccagccugccccgauguugguugauuucgaauggaucuuaccucaacgagacgcacuucuccgacgauaucgaacagcaggccgacaauaugauuaccgagaugcugcagaaggaauacauggauagacaagguaaaacaccuuuaggccugguggaccuauuuguauucucaaccaguuuuuaucucauaacuaucuuccugcaccuuguuaagauuccaacacauaggcacaucguggggaaacccugcccuaagccacaucgguugaaccacaugggaaucuguagcugcggccuguacaaacagccggguguccccgugcguuggaagcgcugaggacuaguuauaagacugacuagcccgaugggccucccaacgggcccuccuccccuccuugcaccgagauuaauaaaaaaaaaaaaaaaaaaaaaaaaaaaaaaaaaaaaaaaaaaaaaaaaaaaaaaaaaaaaaaaaugcaucccccccccccccccccccccccccccccccaaaggcucuuuucagagccaccagaauu

SEQ ID NO: 3414 - RNA, 1690 nt, Artificial Sequence; identical to SEQ ID NO: 3408
  mRNA product Design i-3 comprising derived and/or modified sequence from LASV(Pinneo-NIG-1969;Clade I)__AIT17836__GPC (opt3)

SEQ ID NO: 3415 - RNA, 1690 nt, Artificial Sequence
  mRNA product Design i-3 comprising derived and/or modified sequence from LASV(ISTH0009-NIG-2011;Clade II)__AIT17404__GPC (opt3)
gggagaaagcuuaccaugggccagaucauuaccuucuuucaagaggugccccacgucauagaagagguuaugaacaucgugcugauugcccucagccuucuggcuaucuugaaggggauuuacaauguagcaacaugcggauuauucggucugguguccuuucuacuccuguguggcagaucuugcucaacuacguauaaaggggucuacgaacuucagacccuggaguuggacauggccagucucaacaugacaaugccucugagcuguacuaagaauaacucccaucacuauaucauggugggaaaugaaaccggccuggagcucacauuaaccaacacuucuauaaucaaucauaaauucugcaaccugucggaugcgcacaagaaaaaucuuuacgaccaugcuuugaugucaauuaucagcacauuucaccugaguauuccaaacuucaaucaguaugaggccauguccugugauuuuaacggugggaagaucucuguucaguacaaucuaagccacgcauaugccguggacgcugcaaaccauugcggaaccauagccaauggcguccuccaaacguucaugaggauggcuuggggcggguccuacauugcccuggauucaggaaaggguaguugggacuguaucaugacuagcuaccaguaucuuauuauccagaacaccacaugggaagaucacugccaguuuucucggccgucccccaucggcuaccugggguugcucucacaacgcacucgagacauuuauauaagccguagacuguuaggaaccuucacauggacccugagugauucugagggcaacgaaacgccugguggguacugucucacuagguggaugcuuaucgaggcggagcugaaaugcuuuggaaauacagcaguggccaaguguaacgaaaaacaugacgaggaguucugcgauauguugcggcuauuugacuucaauaagcaggcuauucgcagacugaaaaccgaagcccagauguccauccagcucauaaacaaggcaguaaaugcucugauuaacgaucaacuuaucaugaagaaucaccugagggacaucaugggcauuccauauugcaacuacagcaaauauugguacuugaaucacacuguuacaggcaagaccucgcucccccgguguuggcuggugucuaacggguccuacuuaaaugaaacgcauuucucagacgauaucgagcagcaggccgacaacaugauuaccgagcugcuacaaaaagaauauauggaucgccagggaaagacaccucucggucuggucgaccuuuuuguguucaguacuagcuuuuacuugauauccaucuuccugcaccucauuaaaaucccaacccaucgacacaucacaggcaagcccugcccuaaaccacauagacugaaucacauggggauuuguucuugcggacuuuauaagcacccgggcgugcccgucaaguggaaaaggugaggacuaguuauaagacugacuagcccgaugggccucccaacgggcccuccuccccuccuugcaccgagauuaauaaaaaaaaaaaaaaaaaaaaaaaaaaaaaaaaaaaaaaaaaaaaaaaaaaaaaaaaaaaaaaaaugcaucccccccccccccccccccccccccccccccaaaggcucuuuucagagccaccagaauu

SEQ ID NO: 3416 - RNA, 1690 nt, Artificial Sequence
  mRNA product Design i-3 comprising derived and/or modified sequence from LASV(ISTH2010-NIG-2012;Clade II)__AIT17482__GPC (opt3)
gggagaaagcuuaccaugggccagaucauuaccuucuuucaagaggugccccacgucauagaagagguuaugaacaucgugcugauugcccucagccuucuggcuaucuugaaggggauuuacaauguagcaacaugcggauuauucggucugguguccuuucuacuccuguguggcagaucuugcucaacuacguauaaaggggucuacgaacuucagacccuggaguuggacauggccagucucaacaugacaaugccucugagcuguacuaagaauaacucccaucacuauaucauggugggaaaugaaaccggccuggagcucacauuaaccaacacuucuauaaucaaucauaaauucugcaaccugucggaugcgcacaagaaaaaucuuuacgaccaugcuuugaugucaauuaucagcacauuucaccugaguauuccaaacuucaaucaguaugaggccauguccugugauuuuaacggugggaagaucucuguucaguacaaucuaagccacgcauaugccguggacgcugcaaaccauugcggaaccauagccaauggcguccuccaaacguucaugaggauggcuuggggcggguccuacauugcccuggauucaggaaaggguaguugggacuguaucaugacuagcuaccaguaucuuauuauccagaacaucaccugggaagaucacugccaguuuucucggccgucccccauuggcuaccugggguugcucucacaacgcacacgagacauauauaucagccguagacuguuaggaacuuucaccuggacacugagugauucugagggcaacgaaaccccugguggguacugucucacgagguggaugcuuauugaggcggagcugaaaugcuuuggaaauacugcaguggccaaguguaacgaaaaacaugacgaggaguucugcgauauguugcggcuauuugacuucaauaagcaggcuauccgcagacugaaaacagaagcccagauguccauacagcucauuaacaaggcaguaaaugcucugaucaacgaucaacuuaucaugaagaaucaccugagggacauuaugggcaucccauauugcaacuacagcaaauauugguacuugaaucacaccguuacuggcaagacaucgcucccccgguguuggcuggugucuaacggguccuacuuaaaugaaacccauuucucagacgauauugagcagcaggccgacaacaugauaacggagcugcuacaaaaagaauauaucgaucgccagggaaagaccccucucggucuggucgaccuuuuuguguucaguacuagcuuuuacuugauuuccaucuuccugcaccucgugaaaaucccaacacaucgacacgucguuggcaagcccugcccuaaaccacauagacugaaucacauggggauuuguucuugcggacuuuauaagcacccgggcgugcccguaaaguggaaaaggugaggacuaguuauaagacugacuagcccgaugggccucccaacgggcccuccuccccuccuugcaccgagauuaauaaaaaaaaaaaaaaaaaaaaaaaaaaaaaaaaaaaaaaaaaaaaaaaaaaaaaaaaaaaaaaaaugcaucccccccccccccccccccccccccccccccaaaggcucuuuucagagccaccagaauu

SEQ ID NO: 3417 - RNA, 1690 nt, Artificial Sequence
  mRNA product Design i-3 comprising derived and/or modified sequence from LASV(Lassa virus/H.sapiens-wt/NGA/2015/ISTH_0543;Clade II)__AVO03639__GPC (opt3)
gggagaaagcuuaccaugggccagaucauuaccuucuuucaagaggugccccacgucauagaagagguuaugaacaucgugcugauugcccucagccuucuggcuaucuugaaggggauuuacaauguagcaacaugcggauuauucggucugguguccuuucuacuccuguguggcagaucuugcucaacuacguauaaaggggucuacgaacuucagacccuggaguuggacauggccaaccucaauaugacaaugccucugaguuguacuaagaacaauagccaucacuauaucauggugggaaacgaaaccggccuggagcucacauuaaccaauacuuccauaaucaaccauaaauucugcaaucugucugaugcgcacaagaaaaaccuuuacgaccaugcuuugaugucgauuaucucaacauuucaccugagcauuccaaauuucaaccaguaugaggccaugaguugugauuuuaauggugggaagaucuccguucaguacaaccuaucucacaccuaugcaguggacgccgcuaaucauugcggaacgauagcaaacggcguccuccaaacuuucaugaggauggccuggggcgggagcuacauugcucuggauuccggaaaggguucaugggacuguaucaugaccaguuaccaguaucuugugauucagaacacaacuugggaagaucacugccaguuuagccggccgucucccaucggcuaccugggguugcucucccaacgcacccgagacaucuauauuucacguagacuguuaggaacauucaccuggacgcugagcgauagugagggcaaugaaacuccugguggguacugucucacaagguggaugcuuauagaggccgagcugaaaugcuuuggaaacaccgcgguagcaaaguguaaugaaaaacaugacgaggaguucugcgauauguugcggcuauuugacuucaacaagcaggccauccgcagacugaaaacugaagcucagaugucuauucagcucaucaauaaggccguuaacgcacugauaaaugaucaacuuauuaugaagaaccaccugagggacaucaugggcaucccauauugcaauuacuccaaauauugguacuugaaccacacagugaccggcaagacgagccucccccgguguuggcuggucucgaaugggucuuacuuaaacgaaacccauuucuccgacgauauugagcagcaggcugacaauaugaucacagagcugcuacaaaaagaauauauugaucgccagggaaagacuccucucggucugguggaccuuuuuguguucucaaccaguuuuuacuugauaagcaucuuccugcaccucgucaaaauuccaacacaucgacacaucacuggcaagcccugcccuaaaccacauagacugaaccacauggggaucuguuccugcggacuuuauaagcacccgggcguucccgugaaguggaaaaggugaggacuaguuauaagacugacuagcccgaugggccucccaacgggcccuccuccccuccuugcaccgagauuaauaaaaaaaaaaaaaaaaaaaaaaaaaaaaaaaaaaaaaaaaaaaaaaaaaaaaaaaaaaaaaaaaugcaucccccccccccccccccccccccccccccccaaaggcucuuuucagagccaccagaauu

SEQ ID NO: 3418 - RNA, 1690 nt, Artificial Sequence
  mRNA product Design i-3 comprising derived and/or modified sequence from LASV(Lassa virus/H.sapiens-wt/NGA/2016/ISTH_0009;Clade II)__AVO03571__GPC (opt3)
gggagaaagcuuaccaugggccagaucauuaccuucuuucaagaggugccccacgucauagaagagguuaugaacaucgugcugauugcccucagccuucuggcuaucuugaaggggauuuacaauguagcaacaugcggauuacugggucuaguguccuuccuccugcuuuguggcagaucuugcucaacuacguauaaaggggucuacgaacugcagaccuuggagcucgacauggccagucugaacaugacaaugccucugagcuguacuaagaauaacucccaucacuauaucauggugggaaaugaaaccggccucgaguuaacacugaccaacacuucuauaaucaaucauaaauuuugcaaccuuucggaugcgcacaagaaaaauuuguacgaccaugcucugaugucaauuaucagcacauuccaccuaaguauuccaaacuuuaaucaguaugaggccauguccugugauuucaacggugggaggaucucuguucaguacaaucucagccacuccuaugcaguggacgccgcuaaccauugcggaaccauagcaaauggcguccugcaaacguuuaugcggauggccuggggcgggucauacauugcucuugauaguggaaaggguagcugggacuguaucaugacuucuuaccaguaucugauuauccagaacaccacaugggaagaucacugccaguucucccgcccgucacccaucggcuacuuggggcuccugagccaacgaacucgugacauuuauauaaguagaagguuacugggaaccuuuacauggacccucucugauuccgagggcaacgaaacgccugguggguacugucuuacucgguggaugcugaucgaggccgaguugaagugcuucggaaauacagcgguggcaaaauguaacgaaaagcaugacgaggaauuuugcgauaugcuacgccuguucgacuuuaauaaacaggccauuagaaggcucaagaccgaggcucagaugagcauccagcugauaaacaaagccguaaaugcacuuauuaacgaucaacugaucaugaagaaucacuugcgggacaucaugggcauuccauauugcaacuacucgaaguauugguaccucaaucacacuguuacaggcaaaaccucucugccccgcuguugguuaguguccaacgggucauaccugaaugaaacgcauuucagugacgauaucgagcagcaggcugacaacaugauuaccgagcuacuccaaaaggaauauauagaucgacagggaaaaacaccucugggucuugucgacuuguucguguuuagcacuuccuucuaccugaucucuauuuuucuccaccuggugaagaucccaacccauagacacaucacaggcaaacccugcccuaagccacauaggcuuaaucacauggggauuuguagcugcggacuguauaaccacccgggcguccccguuaaauggaagcggugaggacuaguuauaagacugacuagcccgaugggccucccaacgggcccuccuccccuccuugcaccgagauuaauaaaaaaaaaaaaaaaaaaaaaaaaaaaaaaaaaaaaaaaaaaaaaaaaaaaaaaaaaaaaaaaaugcaucccccccccccccccccccccccccccccccaaaggcucuuuucagagccaccagaauu

SEQ ID NO: 3419 - RNA, 1690 nt, Artificial Sequence
  mRNA product Design i-3 comprising derived and/or modified sequence from LASV(Lassa virus/H.sapiens-wt/NGA/2016/ISTH_0017;Clade II)__AVO03567__GPC (opt3)
gggagaaagcuuaccaugggccagaucauuaccuucuuucaagaggugccccacgucauagaagagguuaugaacaucgugcugauugcccucagccuucuggcuaucuugaaggggauuuacaauguagcaacaugcggauuauucggucugguguccuuucuacuccuguguggcagaucuugcucaacuacguauaaaggggucuacgaacuucagacccuggaguuggacauggccagucucaacaugacaaugccucugagcuguacuaagaauaacucccaucacuauaucauggugggaaaugaaaccggccuggagcucacauuaaccaacacuucuauaaucaaucauaaauucugcaaccugucggaugcgcacaagaaaaaucuuuacgaccaugcuuugaugucaauuaucagcacauuucaccugaguauuccaaacuucaaucaguaugaggccauguccugugauuuuaacggugggaagaucucuguucaguacaaucuaagccacaccuaugcaauagacgccgcuaaccauugcggaacgauugcaaauggcgugcuccaaacuuucaugaggauggccuggggcggguccuacaucgcucuggauucaggaaaggguaguugggacuguauuaugaccagcuaccaguaucuuaucauccagaacacaacuugggaagaucacugccaguuuucucggccgucccccauuggcuaccugggguugcucucacaacgcacccgagacauauauaucagccguagacuguuaggaacauucaccuggacgcugagugauucugagggcaacgaaacuccugguggguacugucucacaagguggaugcuuauugaggccgagcugaaaugcuuuggaaauaccgcggucgcaaaguguaacgaaaaacaugacgaggaguucugcgauauguugcggcuauuugacuucaauaagcaggccauccgcagacugaaaacugaagcucagauguccauacagcucauuaacaaggccgugaaugcacugaucaacgaucaacuuaucaugaagaaucaccugagggacauuaugggcaucccauauugcaacuacagcaaauauugguacuugaaucacacaguaaccggcaagacgucgcucccccgguguuggcugguuucuaacggguccuacuuaaaugaaacccauuucucagacgauauugagcagcaggcugacaacaugauaacagagcugcuacaaaaagaauauauggaucgccagggaaagacuccucucggucugguggaccuuuuugucuucaguaccagcuuuuacuugaucuccauuuuccugcaccucgugcgaaucccaacacauagacacgugaucggcaaacccugcccuaagccacauaggcugaaucacauggggauuuguucuugcggacuuuauaaacacccgggcguccccguuaaguggaagcggugaggacuaguuauaagacugacuagcccgaugggccucccaacgggcccuccuccccuccuugcaccgagauuaauaaaaaaaaaaaaaaaaaaaaaaaaaaaaaaaaaaaaaaaaaaaaaaaaaaaaaaaaaaaaaaaaugcaucccccccccccccccccccccccccccccccaaaggcucuuuucagagccaccagaauu

SEQ ID NO: 3420 - RNA, 1690 nt, Artificial Sequence
  mRNA product Design i-3 comprising derived and/or modified sequence from LASV(Lassa virus/H.sapiens-wt/NGA/2018/ISTH_0959;Clade II)__AVV65099__GPC (opt3)
gggagaaagcuuaccaugggccagaucauuaccuucuuucaagaggugccccacgucauagaagagguuaugaacaucgugcugauugcccucagccuucuggcuaucuugaaggggauuuacaauguagugacaugcggauuauucggucuggucuccuuucuacuccuguguggcagaucuugcucaacuacguauaaagggguguacgaacuucagacccuggaguuggacauggcaagucucaacaugacaaugccucugagcuguacuaagaauaacucccaucacuauaucaugguuggaaaugaaaccggccuggagcucacauuaaccaacacuucuauaaucaaucauaaauucugcaaccugucggaugcccacaagaaaaaucuuuacgaccaugcguugaugucaauuaucagcacauuucaccugaguauuccaaacuucaaucaguaugaggcuauguccugugauuuuaacggugggaagaucucugugcaguacaaucuaagccacgccuaugcaauagacgccgcuaaccauugcggaaccauugcaaauggcguccuccaaacguucaugaggauggccuggggcggguccuacaucgcucuggauucaggaaaggguaguugggacuguauuaugacuagcuaccaguaucuuaucauccagaacaccacaugggaagaucacugccaguuuucucggccgucccccauuggcuaccugggguugcucucacaacgcacucgagacauauauaucagccguagacuguuaggaaccuucacauggacccugagugauucugagggcaacgaaacgccugguggguacugucucacuagguggaugcuuauugaggccgagcugaaaugcuuuggaaauacagcgguggcaaaguguaacgaaaaacaugacgaggaguucugcgauauguugcggcuauuugacuucaauaagcaggccauccgcagacugaaaaccgaagcucagauguccauacagcucauuaacaaggccguaaaugcacugaucaacgaucaacuuaucaugaagaaucaccugagggacauuaugggcaucccauauugcaacuacagcaaauauugguacuugaaucacacuguuacaggcaagaccucgcucccccgguguuggcuggugucuaacggguccuacuuaaaugaaacgcauuucucagacgauauugagcagcaggcugacaacaugauaaccgagcugcuacaaaaagaauauaucgaucgccagggaaagacaccucucggucuggucgaccuuuuuguguucaguacuagcuuuuacuugauuuccaucuuccugcaccucgugaaaaucccaacccaucgacacgucauuggcaagcccugcccuaaaccacauagacugaaucacauggggauauguucuugcggacuuuauaagcacccgggcguucccgugaaguggaaaaggugaggacuaguuauaagacugacuagcccgaugggccucccaacgggcccuccuccccuccuugcaccgagauuaauaaaaaaaaaaaaaaaaaaaaaaaaaaaaaaaaaaaaaaaaaaaaaaaaaaaaaaaaaaaaaaaaugcaucccccccccccccccccccccccccccccccaaaggcucuuuucagagccaccagaauu

SEQ ID NO: 3421 - RNA, 1690 nt, Artificial Sequence
  mRNA product Design i-3 comprising derived and/or modified sequence from LASV(LASV003-NIG-2008;Clade II)__AIT17580__GPC (opt3)
gggagaaagcuuaccaugggccagaucauuaccuucuuucaagaggugccccacgucauagaagagguuaugaacaucgugcugauugcccucagccuucuggcuaucuugaaggggauuuacaauguagcaacaugcggauuauucggucugguguccuuucuacuccuguguggcagaucuugcucaacuacguauaaaggggucuacgaacuucagacccuggaguuggacauggccagucucaacaugacaaugccucugagcuguacuaagaauaacucccaucacuauaucauggugggaaaugaaaccggccuggagcucacauuaaccaacacuucuauaaucaaucauaaauucugcaaccugucggaugcgcacaagaaaaaucuuuacgaccaugcuuugaugucaauuaucagcacauuucaccugaguauuccaaacuucaaucaguaugaggccauguccugugauuuuaacggugggaagaucucuguucaguacaaucuaagccacaccuaugcaguggacgccgcuaaccauugcggaacgauagcaaauggcguccuccaaacuuucaugaggauggccuggggcggguccuacauugcucuggauucaggaaaggguaguugggacuguaucaugaccagcuaccaguaucuuauuauccagaacacaacuugggaagaucacugccaguuuucucggccgucccccaucggcuaccugggguugcucucacaacgcacccgagacauuuauauaagccguagacuguuaggaacauucaccuggacgcugagugauucugaguccaacgaaacuccuggcgguuacugucucacaagguggaugcuuaucgaggccgagcugaaaugcuuugggaauaccgcgguggcaaaguguaacgaaaaacaugacgaggaguucugcgauauguugcggcuauuugacuucaauaagcaggccauucgcagacugaaagcugaagcccagaugagcauccagcucauaaacaaggcaguaaaugcucugauuaacgaucaacuuaucaugaagaaucaccugagggacaucaugggcauuccauauugcaacuacucgaaauauugguacuugaaucacacuguuacaggacggaccucucucccccgcuguuggcugguguccaacggcucauacuuaaaugaaacgcauuucagugacgauaucgagcagcaggccgacaacaugauuaccgagcugcuacaaaaggaauauauggaucgacaggggaaaacaccucucggacuggucgaccuuuuuguguucagcacuuccuuuuacuugauaucuaucuuccugcaccucgugaagauuccaacccauagacacgucaucgguaaacccugcccuaagccacauaggcugaaucacaugggcaucuguagcugcgggcuuuauaaacacccgggaguucccgugaaguggaagcggugaggacuaguuauaagacugacuagcccgaugggccucccaacgggcccuccuccccuccuugcaccgagauuaauaaaaaaaaaaaaaaaaaaaaaaaaaaaaaaaaaaaaaaaaaaaaaaaaaaaaaaaaaaaaaaaaugcaucccccccccccccccccccccccccccccccaaaggcucuuuucagagccaccagaauu

SEQ ID NO: 3422 - RNA, 1690 nt, Artificial Sequence
  mRNA product Design i-3 comprising derived and/or modified sequence from LASV(LASV035-NIG-2009;Clade II)__AIT17588__GPC (opt3)
gggagaaagcuuaccaugggccagaucauuaccuucuuucaagaggugccccacgucauagaagagguuaugaacaucgugcugauugcccucagccuucuggcuaucuugaaggggauuuacaauguagcaacaugcggauuauucggucugguguccuuucuacuccuguguggcagaucuugcucaacuacguauaaaggggucuacgaacuucagacccuggaguuggacauggccagucucaacaugacaaugccucugagcuguacuaagaauaacucccaucacuauaucauggugggaaaugaaaccggccuggagcucacauuaaccaacacuucuauaaucaaucauaaauucugcaaccugucggaugcgcacaagaaaaaucuuuacgaccaugcuuugaugucaauuaucagcacauuucaccugaguauuccaaacuucaaucaguaugaggccauguccugugauuuuaacggugggaagaucucuguucaguacaaucuaagccacgcauaugccguggacgcugcaaaccauugcggaaccauagccaauggcguccuccaaacguucaugaggauggcuuggggcggguccuacauugcccuggauucaggaaaggguaguugggacuguaucaugacuagcuaccaguaucuuauuauccagaacaccacaugggaagaucacugccaguuuucucggccgucccccaucggcuaccugggguugcucucacaacgcacucgagacauuuauauaagccguagacuguuaggaaccuucacauggacccugagugauucugagggcaacgaaacgccugguggguacugucucacuagguggaugcuuaucgaggcggagcugaaaugcuuuggaaauacagcaguggccaaguguaacgaaaaacaugacgaggaguucugcgauauguugcggcuauuugacuucaauaagcaggcuauucgcagacugaaagccgaagcacagauguccauccagcucauaaacaaggcuguaaaugcccugauuaacgaucaacuuaucaugaagaaucaccugagggacaucaugggcauuccauauugcaacuacagcaaauauugguacuugaaucacaccguuacuggcaagacaucgcucccccgguguuggcuggugucuaacggguccuacuuaaaugaaacccauuucucagacgauaucgagcagcaggcggacaacaugauuacggagcugcuacaaaaagaauauauagaucgccagggaaagaccccucucggucuggucgaccuuuuuguguucaguacuagcuuuuacuugaucuccauuuuccugcaccucgugaaaaucccaacacaucgacacgucaucggcaagcccugcccuaaaccacauagacugaaucacauggggauuuguucuugcggacuuuauaagcacccgggcguucccgugaaguggaaaaggugaggacuaguuauaagacugacuagcccgaugggccucccaacgggcccuccuccccuccuugcaccgagauuaauaaaaaaaaaaaaaaaaaaaaaaaaaaaaaaaaaaaaaaaaaaaaaaaaaaaaaaaaaaaaaaaaugcaucccccccccccccccccccccccccccccccaaaggcucuuuucagagccaccagaauu

SEQ ID NO: 3423 - RNA, 1690 nt, Artificial Sequence
  mRNA product Design i-3 comprising derived and/or modified sequence from LASV(LASV1000-NIG-2009;Clade II)__AIT17782__GPC (opt3)
gggagaaagcuuaccaugggccagaucauuaccuucuuucaagaggugccccacgucauagaagagguuaugaacaucgugcugauugcccucagccuucuggcuaucuugaaggggauuuacaauguagcaacaugcggauuauucggucugguguccuuucuacuccuguguggcagaucuugcucaacuacguauaaaggggucuacgaacuucagacccuggaguuggacauggccagucucaacaugacaaugccucugagcuguacuaagaauaacucccaucacuauaucauggugggaaaugaaaccggccuggagcucacauuaaccaacacuucuauaaucaaucauaaauucugcaaccugucggaugcgcacaagaaaaaucuuuacgaccaugcuuugaugucaauuaucagcacauuucaccugaguauuccaaacuucaaucaguaugaggccauguccugugauuuuaacggugggaagaucucuguucaguacaaucuaagccacaccuaugcaguggacgccgcuaaccauugcggaacgauagcaaauggcguccuccaaacuuucaugaggauggccuggggcggguccuacauugcucuggauucaggaaaggguaguugggacuguaucaugaccagcuaccaguaucuuauuauccagaacacaacuugggaagaucacugccaguuuucucggccgucccccaucggcuaccugggguugcucucacaacgcacccgagacauuuauauaagccguagacuguuaggaacauucaccuggacgcugagugauucugagggcaacgaaacuccugguggguacugucucacaagguggaugcuuaucgaggccgagcugaaaugcuuuggaaauaccgcgguggcaaaguguaacgaaaaacaugacgaggaguucugcgauauguugcggcuauuugacuucaauaagcaggccauuaaacgccugaagacugaagcucagauguccauccagcucauaaacaaggccguaaaugcacugauuaacgaucaacuuaucaugaaaaaucaccugagagacaucaugggcauuccauauugcaacuacagcaaguauugguacuugaaucacacaguuaccggcaaaacgucgcuccccagguguuggcuggugucuaacggguccuacuuaaaugaaacccauuucucagacgauaucgagcagcaggcugacaacaugauuacagagcugcuacaaaaggaauauauagaucggcagggaaaaacuccucucggucuggucgaccuuuuuguguucaguaccagcuuuuacuugaucuccauuuuccugcaccucgugaagaucccaacacaucgccacgucguuggcaaacccugcccuaagccacaucgacugaaucacauggggaucuguucuugcggacuuuauaagcacccgggcgugcccguaaaauggaagagaugaggacuaguuauaagacugacuagcccgaugggccucccaacgggcccuccuccccuccuugcaccgagauuaauaaaaaaaaaaaaaaaaaaaaaaaaaaaaaaaaaaaaaaaaaaaaaaaaaaaaaaaaaaaaaaaaugcaucccccccccccccccccccccccccccccccaaaggcucuuuucagagccaccagaauu

SEQ ID NO: 3424 - RNA, 1690 nt, Artificial Sequence
  mRNA product Design i-3 comprising derived and/or modified sequence from LASV(LASV221-NIG-2010;Clade II)__AIT17624__GPC (opt3)
gggagaaagcuuaccaugggccagaucauuaccuucuuucaagaggugccccacgucauagaagagguuaugaacaucgugcugauugcccucagccuucuggcuaucuugaaggggauuuacaauguagcaacaugcggauuauucggucugguguccuuucuacuccuguguggcagaucuugcucaacuacguauaaaggggucuacgaacuucagacccuggaguuggacauggccagucucaacaugacaaugccucugagcuguacuaagaauaacucccaucacuauaucauggugggaaaugaaaccggccuggagcucacauuaaccaacacuucuauaaucaaucauaaauucugcaaccugucggaugcgcacaagaaaaaucuuuacgaccaugcuuugaugucaauuaucagcacauuucaccugaguauuccaaacuucaaucaguaugaggccauguccugugauuuuaacggugggaagaucucuguucaguacaaucuaagccacaccuaugcaauagacgccgcuaaccauugcggaacgauugcaaauggcgugcuccaaacuuucaugaggauggccuggggcggguccuacaucgcucuggauucaggaaaggguaguugggacuguauuaugaccagcuaccaguaucuuaucauccagaacacaacuugggaagaucacugccaguuuucucggccgucccccauuggcuaccugggguugcucucacaacgcacccgagacauauauaucagccguagacuguuaggaacauucaccuggacgcugagugauucugagggcaacgaaacuccugguggguacugucucacaagguggaugcuuauugaggccgagcugaaaugcuuuggaaauaccgcggucgcaaaguguaacgaaaaacaugacgaggaguucugcgauauguugcggcuauuugacuucaauaagcaggccauccgcagacugaaaacugaagcucagauguccauacagcucauuaacaaggccgugaaugcacugaucaacgaucaacuuaucaugaagaaucaccugagggacauuaugggcaucccauauugcaacuacagcaaauauugguacuugaaucacacaguaaccggcaagacgucgcucccccgguguuggcugguuucuaacggguccuacuuaaaugaaacccauuucucagacgauauugagcagcaggcugacaacaugauaacagagaugcugcaaaaagaauauauggaucgccagggaaagacuccucuaggucucguggaccuguuugucuucaguaccagcuuuuaccuuaucuccauuuucuugcaccuggugaaaaucccaacacaucgacacgugaucggcaagcccugcccuaaaccacauagacucaaucacauggggauuuguucuugcggacuguauaagcacccgggcguccccguuaaguggaaaaggugaggacuaguuauaagacugacuagcccgaugggccucccaacgggcccuccuccccuccuugcaccgagauuaauaaaaaaaaaaaaaaaaaaaaaaaaaaaaaaaaaaaaaaaaaaaaaaaaaaaaaaaaaaaaaaaaugcaucccccccccccccccccccccccccccccccaaaggcucuuuucagagccaccagaauu

SEQ ID NO: 3425 - RNA, 1690 nt, Artificial Sequence
  mRNA product Design i-3 comprising derived and/or modified sequence from LASV(LASV237-NIG-2010;Clade II)__AIT17638__GPC (opt3)
gggagaaagcuuaccaugggccagaucauuaccuucuuucaagaggugccccacgucauagaagagguuaugaacaucgugcugauugcccucagccuucuggcuaucuugaaggggauuuacaauguagcaacaugcggauuauucggucugguguccuuucuacuccuguguggcagaucuugcucaacuacguauaaaggggucuacgaacuucagacccuggaguuggacauggccagucucaacaugacaaugccucugagcuguacuaagaauaacucccaucacuauaucauggugggaaaugaaaccggccuggagcucacauuaaccaacacuucuauaaucaaucauaaauucugcaaccugucggaugcgcacaagaaagaccuuuacgaucaugcuuugaugucaauuaucagcacauuucaccugaguauuccaaauuucaaccaguaugaggccauguccugugacuuuaauggugggaagaucucuguucaguacaaccuaagccacaccuaugcaguggaugccgcuaaucauugcggaacgauagcaaacggcguccuccaaacuuucaugaggauggccuggggcggguccuacauugcucuggacucaggaaaggguaguugggauuguaucaugaccagcuaccaguaucuuauuauccagaauacaacuugggaagaccacugccaguuuucucggccgucccccaucggcuaccugggguugcucucacaacgcacccgagauauuuauauaagccguagacuguuaggaacauucaccuggacgcugagugacucugagggcaacgaaacuccugguggguacugucucacaagguggaugcuuaucgaggccgagcugaaaugcuuuggaaacaccgcgguggcaaaguguaaugaaaaacaugaugaggaguucugcgacauguugcggcuauuugauuucaacaagcaggccauucgcagacugaaaacugaagcucagauguccauccagcucauaaauaaggccguaaacgcacugauuaaugaccaacuuaucaugaagaaccaccugagggacaucaugggcauuccauauugcaauuacagcaaauauugguacuugaaccacacaguuaccggcaagacgucgcucccccgguguuggcuggugucuaauggguccuacuuaaacgaaacccauuucucagaugacaucgagcagcaggcugauaauaugauuacagagcugcuacaaaaagaauauauggaccgccagggaaagacuccucucggucuggucgaucuuuuuguguucaguaccagcuuuuacuugauauccaucuuccugcaccucauuaaaaucccaacacaucgacacaucacuggcaagcccugcccuaaaccacauagacugaaccacauggggauuuguucuugcggacuuuauaagcacccgggcgugcccgucaaguggaaaaggugaggacuaguuauaagacugacuagcccgaugggccucccaacgggcccuccuccccuccuugcaccgagauuaauaaaaaaaaaaaaaaaaaaaaaaaaaaaaaaaaaaaaaaaaaaaaaaaaaaaaaaaaaaaaaaaaugcaucccccccccccccccccccccccccccccccaaaggcucuuuucagagccaccagaauu

SEQ ID NO: 3426 - RNA, 1690 nt, Artificial Sequence
  mRNA product Design i-3 comprising derived and/or modified sequence from LASV(LASV253-NIG-2011;Clade II)__AIT17670__GPC (opt3)
gggagaaagcuuaccaugggccagaucauuaccuucuuucaagaggugccccacgucauagaagagguuaugaacaucgugcugauugcccucagccuucuggcuaucuugaaggggauuuacaauguagcaacaugcggauuauucggucugguguccuuucuacuccuguguggcagaucuugcucaacuacguauaaaggggucuacgaacuucagacccuggaguuggacauggccagucucaacaugacaaugccucugagcuguacuaagaauaacucccaucacuauaucauggugggaaaugaaaccggccuggagcucacauuaaccaacacuucuauaaucaaucauaaauucugcaaccugucggaugcgcacaagaaaaaucuuuacgaccaugcuuugaugucaauuaucagcacauuucaccugaguauuccaaacuucaaucaguaugaggccauguccugugauuuuaacggugggaagaucucuguucaguacaaucuaagccacaccuaugcaguggacgccgcuaaccauugcggaacgauagcaaauggcguccuccaaacuuucaugaggauggccuggggcggguccuacauugcucuggauucaggaaaggguaguugggacuguaucaugaccagcuaccaguaucuuauuauccagaacacaacuugggaagaucacugccaguuuucucggccgucccccaucggcuaccugggguugcucucacaacgcacccgagacauuuauauaagccguagacuguuaggaacauucaccuggacgcugagugauucugagggcaacgaaacuccugguggguacugucucacaagguggaugcuuaucgaggccgagcugaaaugcuuuggaaauaccgcgguggcaaaguguaacgaaaaacaugacgaggaguucugcgauauguugcggcuauuugacuucaauaagcaggccauucgcagacugaaagcugaagcccagauguccauccagcucauaaacaaggcaguaaaugcucugauuaacgaucaacuuaucaugaagaaucaccugagggacaucaugggcauuccauauugcaacuacagcaaauauugguacuugaaucacacuguuacaggccggaccucgcucccccgcuguuggcuggugucuaacggguccuacuuaaaugaaacgcauuucucagacgauaucgagcagcaggccgacaacaugauuaccgagcugcuacaaaaggaauauauagaucgacagggaaaaacaccucucggucuggucgaccuuuuuguguucaguacuagcuuuuacuugaucuccauuuuccugcaccucgugaagaucccaacccauagacacaucauuggcaaacccugcccuaagccacauaggcugaaucacauggggauauguucuugcggacuuuauaaacacccgggcguccccguuaaguggaagcggugaggacuaguuauaagacugacuagcccgaugggccucccaacgggcccuccuccccuccuugcaccgagauuaauaaaaaaaaaaaaaaaaaaaaaaaaaaaaaaaaaaaaaaaaaaaaaaaaaaaaaaaaaaaaaaaaugcaucccccccccccccccccccccccccccccccaaaggcucuuuucagagccaccagaauu

SEQ ID NO: 3427 - RNA, 1690 nt, Artificial Sequence
  mRNA product Design i-3 comprising derived and/or modified sequence from LASV(LASV254-NIG-2011;Clade II)__AIT17674__GPC (opt3)
gggagaaagcuuaccaugggccagaucauuaccuucuuucaagaggugccccacgucauagaagagguuaugaacaucgugcugauugcccucagccuucuggcuaucuugaaggggauuuacaauguagcaacaugcggauuauucggucugguguccuuucuacuccuguguggcagaucuugcucaacuacguauaaaggggucuacgaacuucagacccuggaguuggacaugacaaaccucaauaugacuaugccucugaguuguaccaagaacaauagccaucacuauaucauggugggaaacgaaacaggccuggagcucaccuuaacuaauacauccauaaucaaccauaaauucugcaaucugucugaugcccacaagaaaaaccuuuacaaucaugcguugaugucgauuaucucaaccuuucaccugagcauuccaaacuucaaucaguaugaggcuaugaguugugacuuuaacggugggaagaucuccguucaguacaaucuaucucacagcuaugccguggaugcagccaaccauugcggaacgauagcuaacggcguccuccaaacuuucaugaggauggcauggggcggguccuacauugcccuggacucaggaaaggguaauugggauuguaucaugaccaguuaccaguaucuuauuauccagaacacaacuugggaagaccacugccaguuuagccggccgucucccaucggcuaccugggguugcucucccaacgcacccgagauauuuauauaucacguagacuguuaggaacauucaccuggacgcugagcgacagugagggcaaugaaacuccugguggguacugucucacaagguggaugcuuaucgaggcugagcugaaaugcuuuggaaacaccgccguggcgaaguguaaugaaaaacaugaugaggaguucugcgacauguugcggcuauuugauuucaacaagcaggcaauucgcagacugaaaacugaagcccaggcuaauauccagcucauaaacaaggccguaaaugcacugauuaacgaccaacuuaucaugaagaaucaccugagggauaucaugggcauuccauauugcaacuacucuaaauauugguacuugaaucacacaguuaccggcaagacgucccucccccgguguuggcuggugagcaacgggucguacuuaaaugaaacccauuucucugacgacaucgagcagcaggcugauaacaugauuacagagcugcuacaaaaagaauauauggaccgccagggaaagacuccucucggucuggucgaucuuuuuguguucuccaccucauuuuacuugauaaguaucuuccugcaccucgugaaaauuccaacacaucgacacgucaucggcaagcccugcccuaaaccacauagacugaaccacauggggaucuguagcugcggacuuuauaagcacccgggcguucccgugaaguggaaaaggugaggacuaguuauaagacugacuagcccgaugggccucccaacgggcccuccuccccuccuugcaccgagauuaauaaaaaaaaaaaaaaaaaaaaaaaaaaaaaaaaaaaaaaaaaaaaaaaaaaaaaaaaaaaaaaaaugcaucccccccccccccccccccccccccccccccaaaggcucuuuucagagccaccagaauu

SEQ ID NO: 3428 - RNA, 1690 nt, Artificial Sequence
  mRNA product Design i-3 comprising derived and/or modified sequence from LASV(Nig08-A19;Clade III)__ADU56618__GPC (opt3)
gggagaaagcuuaccaugggccagaucgugaccuucuuucaagaggucccccacguuauugaagaggugaugaacauaguacugaucgcccucagcauucuugcuauccugaagggguuguacaauauugcaacaugcggauuaaucggucuggugacuuuccuacuccuguccggcagaucuuguucaaugacguauaaaggggucuacgaacuucagacccuggaguugaacaugaauacacucaacaugacuaugccucugaguugcaccaagaauaacagccaucacuauauaauggugggaaaugaaacaggccuggagcucaccuuaacuaacacaucccugcuucaucacaaauuuuguaauuugucugacgcccauaagaaaaaccuguacgaucacacccuaaugucgaucauuucaacguuccaccucagcaucccaaauuuuaaccaguaugaggcgaugaguugcgacuucaauggugggaagauuacuguucaguacaaccugucccauucuuaugcuaucgaugccgcaaaucacuguggaaccguggccaacggcguccuucaaacauuuaugaggauggcuuggggcgggagcuacauagcacuggacuccggacgggguaagugggauugcauuaugacuucauaccaguauuugaucauucagaacaccacaugggaagaccauugucaguucagucgcccgagccccaucggcuaccucgggcuguuaucucaacgaacccgugauaucuauauuuccagaaggcugcucggaacguuuacuuggacacuuucagacagcgagggcaaugaaaccccugguggguacugccugacucgguggauguugauagaggccgagcuaaaauguuucggaaacacagcuguggccaagugcaaugaaaaacacgaugaggaauuuugugacaugcugcgccucuucgauuuuaacaagcaggcgaucagaaggcugaaagcagaggcccagaugaguauucagcuuaucaauaaggcuguaaacgcccugauaaaugaccaauugauuaugaagaaccaccuccgggauaucaugggcaucccauauugcaauuacucuaaauauugguaccugaaccauaccuccacgggccgcaccagcuuaccccgaugcuggcugguuucgaaugggucuuaccuaaacgaaacacacuucuccgacgacauugagcagcaggcagauaauaugaucacugagaugcuccaaaaggaauaucuggacagacagggaaaaaccccucuugguuugguggaucuguucgucuuuucaacaaguuucuaccucauuagcauauuucugcaucuugugaagaucccaacucacaggcauauugugggcaaacccuguccuaagccacaccggcugaaccacauggggaucugcuccuguggauuguauaaacagccgggcguccccguucguuggaagcgcugaggacuaguuauaagacugacuagcccgaugggccucccaacgggcccuccuccccuccuugcaccgagauuaauaaaaaaaaaaaaaaaaaaaaaaaaaaaaaaaaaaaaaaaaaaaaaaaaaaaaaaaaaaaaaaaaugcaucccccccccccccccccccccccccccccccaaaggcucuuuucagagccaccagaauu

SEQ ID NO: 3429 - RNA, 1693 nt, Artificial Sequence
  mRNA product Design i-3 comprising derived and/or modified sequence from LASV(G1180-SLE-2010;Clade IV)__AIT17168__GPC (opt3)
gggagaaagcuuaccaugggccagaucgugaccuucuuucaagaggucccccacguuauugaagaggugaugaacauaguacugaucgcccucagcauucuugcugugcugaagggguuguacaauuucgcaacaugcggauuagucggucugcuaacuuuucuccugcuuuguggcagauccugcacggccucuagguauaaagggguguacgaacugcagaccuuggagcucaacauggaaacacugaauaugacuaugccucugucauguaccaagaacaauagucaucacuauaucaugguuggaaacgagacaggccucgaguuaacccugacuaauacaagcauuaucaaccauaaauucugcaaucuuuccgacgcgcacaagaaaaacuuguacgaucaugcucugaugucuauaaucucgaccuuucaccuaucaauuccaaauuucaaccaguaugaagccaugagcugugacuuuaauggugggaagaucagugugcaguacaaccucucccacucuuaugcaggagaugccgcuaaucauugcggcacggucgcaaacggcgugcugcaaacuuucaugcggauggccuggggagggagcuacauugcucuugacuccggucacggcucaugggauuguaucaugaccaguuaccaguaucugauaauucagaacacaacuugggaggaccauugccaguuuagccgcccgucucccaucggguacuugggacuccugucccaacgaacccgugauauuuauaucucaagaagguuacugggcacauucaccuggacgcucagcgacagugaagguaaggauacuccugggggauacugucuuacacgguggaugcugaucgaggccgaguugaaaugcuuuggcaauaccgcgguagcaaaguguaacgaaaaacacgacgaggaguucugcgauaugcuacgccuguuugacuucaauaagcaggccauucagagacucaaagcugaagcccagaugucuauacaacugaucaacaaggcaguuaaugcucuuauuaacgaucagcugaucaugaagaaucacuugagggacauaaugggcauuccauauugcaacuacuccaaauauugguaccucaaucauacuacaaccgggaagacgagccugcccaaauguugguuagugucgaacggaucuuaccugaaugaaacccacuucuccgacgauaucgagcagcaagccgacaacaugaucacagagaugcuacagaaggaauauauggagcggcaggguaaaacuccucucggccuggucgaucuuuuuguguucucaaccaguuuuuacuugauuagcaucuuccugcaucucgugaagauuccaacacaccgccauauagucgggaaauccugccccaagccucaccgacugaaucacaugggaaucuguucuugcggccuuuauaagcagccagguguuccggugaaauggaagagaugaggacuaguuauaagacugacuagcccgaugggccucccaacgggcccuccuccccuccuugcaccgagauuaauaaaaaaaaaaaaaaaaaaaaaaaaaaaaaaaaaaaaaaaaaaaaaaaaaaaaaaaaaaaaaaaaugcaucccccccccccccccccccccccccccccccaaaggcucuuuucagagccaccagaauu

SEQ ID NO: 3430 - RNA, 1693 nt, Artificial Sequence
  mRNA product Design i-3 comprising derived and/or modified sequence from LASV(G1442-SLE-2011;Clade IV)__AIT17180__GPC (opt3)
gggagaaagcuuaccaugggccagaucgugaccuucuuucaagaggucccccacguuauugaagaggugaugaacauaguacugaucgcccucagcauucuugcugugcugaagggguuguacaaugucgcaacaugcggauuaaucggucuggugacuuuccuacuccuguguggcagauccugcacgaccacacuuuauaaagggguuuacgaacugcagacuuuggagcucaacauggaaacccugaauaugacaaugccucugucuuguaccaagaacaauucacaucacuauauuagggugggaaacgagacuggccucgaguuaacacugaccaauacgaguaucauaaaccauaaauuuugcaaucuuagcgacgcccacaagaaaaacuuguacgaucaugcgcugauguccaucauuucuacuuuccaccuaucgaucccaaauuuuaaccaguaugaagcuaugucaugugacuucaauggugggaagauuagcguccaguacaaccucagucacuccuaugccggagaugcagccaaucauugcggcaccguggcuaacggcguacugcaaacauuuaugcggauggcauggggagggucuuacaucgcccuugacagcggucgcggcaacugggauuguauaaugacuuccuaccaguaucugauuauccagaauaccacaugggacgaucacugccaguucucacgaccgagucccauuggguacuugggacuccugagccaacguaccagagacguuuauaucucuaggcgguuacugggcacguuuacuuggacacucuccgauucagaggguaaggacaccccugggggauacugucuuacucgcuggaugcugaucgaagcugaguugaaaugcuucggcaacacagccguggcgaaguguaaugagaaacaugaugaagaguuuugcgacaugcuaagacuguucgauuuuaacaagcaggcaauucagaggcucaaagccgaagcucagaugagcauacaacugaucaauaaggccgucaacgcacuuauuaaugaccagcugaucaugaagaaccacuugcgggacauaaugggcauuccauauugcaauuacaguaaauauugguaccucaacaauaccgcuacggggaagaccucucugcccaaauguugguuaaucuccaacggaagcuaccugaaugagacacacuucucggaugacaucgaacaggaggccgauaacaugauuacugagaugcuacaaaaggaauauauggagcgccaggguaaaaccccucucggccugguggaccuuuucguguuuucuacauccuucuacuugaucucaauuuuucugcaucucgucaagauaccaacucaccgacauaucguugggaaaaguugccccaagccucacagacugaaucauaugggaauuuguagcugcggccuuuauaagcagccaggugugccgguaagguggaaacggugaggacuaguuauaagacugacuagcccgaugggccucccaacgggcccuccuccccuccuugcaccgagauuaauaaaaaaaaaaaaaaaaaaaaaaaaaaaaaaaaaaaaaaaaaaaaaaaaaaaaaaaaaaaaaaaaugcaucccccccccccccccccccccccccccccccaaaggcucuuuucagagccaccagaauu

SEQ ID NO: 3431 - RNA, 1693 nt, Artificial Sequence
  mRNA product Design i-3 comprising derived and/or modified sequence from LASV(G3010-SLE-2013;Clade IV)__AIT17344__GPC (opt3)
gggagaaagcuuaccaugggccagaucgugaccuucuuucaagaggucccccacguuauugaagaggugaugaacauaguacugaucgcccucagcauucuugcugugcugaagggguuguacaauuucgcaacaugcggauuagucggucuggugacuuuucuacuccuguguggcagauccugcacgaccucucuuuauaaagggguuuacgaacugcagacauuggagcucaacauggaaacucugaauaugaccaugccucugucauguacaaagaacaauagucaucacuauaucauggugggaaacgagaccggccucgaguuaacucugacaaauaccagcauuaucaaccauaaauucugcaaucuuuccgacgcccacaagaaaaacuuguacaaucaugcgcugaugucuauaaucucgacguuucaccuaucaauuccaaacuucaaucaguaugaagcuaugagcugugauuuuaacggugggaagaucaguguccaguacaaucucucccacucuuaugccggagacgcagccagccauugcggcacuguggcuaacggcguacugcaaaccuucaugaggauggcauggggaggguccuacauugcccuugauucagguuacggcaagugggacuguaucaugacaaguuaucaguaccugauaauucagaacacuaccugggaggaucacugccaguuuagccggccgucucccaucggguauuugggacuccugucccaacgcacacgagacauuuacaucucacguagauuacugggcaccuucacguggacucucagcgauagugaagguaaagacacaccugggggauauugucuuaccagguggaugcugaucgaggcugaguugaagugcuuuggcaauacugccguugcgaaauguaacgaaaagcaugaugaggaguucugcgacaugcuacggcuguuugauuucaauaaacaggcaauucagcgccucaagacagaagcccagaugucuauacaacugaucaacaaggcugugaaugcccuuauuaacgaccagcugaucaugaaaaaucacuugagagauauaaugggcauuccauacugcaacuauuccaaguacugguaccucaaucacaccacgaccgggaaaacaagccugcccaaguguugguuagucucgaacggaucuuaucugaaugaaacucauuucuccgacgacaucgagcagcaagcagauaacaugaucaccgagaugcuacagaaagaauacauggagaggcaggguaagacaccucucggccugguggaccuuuuuguguucucaaccaguuuuuauuugauuagcaucuuccugcaccucgucaaaauuccaacucaucggcacauaguugggaaguccugccccaagccucaucgccugaaucacaugggaaucuguucuugcggccuuuacaaacagccaggugugccgguacgauggaagagaugaggacuaguuauaagacugacuagcccgaugggccucccaacgggcccuccuccccuccuugcaccgagauuaauaaaaaaaaaaaaaaaaaaaaaaaaaaaaaaaaaaaaaaaaaaaaaaaaaaaaaaaaaaaaaaaaugcaucccccccccccccccccccccccccccccccaaaggcucuuuucagagccaccagaauu

SEQ ID NO: 3432 - RNA, 1693 nt, Artificial Sequence
  mRNA product Design i-3 comprising derived and/or modified sequence from LASV(G502-SLE-2009;Clade IV)__AIT17126__GPC (opt3)
gggagaaagcuuaccaugggccagaucgugaccuucuuucaagaggucccccacguuauugaagaggugaugaacauaguacugaucgcccucagcauucuugcugugcugaagggguuguacaauuucgcaacaugcggauuagucggucugcuaacuuuucuccugcuuuguggcagauccugcacgaccgggcuguauaaaggaguguacgaauugcagacacucgagcugaacauggaaacucugaauaugaccaugccucucucuuguacaaagaacaauucacaucacuauaucaugguuggcaacgagaccgguuuagagcugacucuuacaaauaccaguauuaucaaccauaaauucugcaauuugagcgacgcccacaagaaaaaccuguacgaucaugcgcuaauguccauaaucucuacguuucaccucucgauuccaaauuucaaccaguaugaagcuaugucaugugacuuuaaugggggaaagaucagcgugcaguacaaccugagucacuccuaugccggcgaugcagccgaccauugcggcacugucgcuaauggggugcuucaaaccuucaugaggauggcauggggagguucuuacauugcccuggauagcggccgggggcgcugggacuguaucaugacauccuaccaguauuugauaauucagaacacuaccugggaggaucacugccaguuuucacgaccgagucccaucggauaccucggccuguuaagccaacguacaagagacauuuauaucucuaggcggcugcucgguaccuucacguggacucuuuccgauucagaagggaaggacacaccuggaggcuacugucugacccgcuggauguugaucgaggcugagcuaaaaugcuuuggcaacacugccguagcgaaguguaaugaaaaacaugaugaggaguucugcgacaugcugagacucuuugauuucaacaagcaggcaauucagaggcugaaagccgaagcucagaugagcauacaacuuaucaauaaggccguuaacgcacugauuaaugaccaguuggugaugaagaaccaccuccgggacaucauggggauaccauauugcaauuacagucgcuauugguaccugaaccacacaaccacgggacgaaccucuuuacccaaauguuggcuggucuccaaugguagcuaccuaaacgaaacacauuucucggaugacauugagcagcaagcugauaauaugaucacugagaugcuccagaaggaauauauggagagacagggcaaaaccccucuggggcuuguggacuuguuuguguucucuacauccuuuuaccugaucucaauuuuccuccaccuggucaagaucccaacucauaggcacauuguuggaaaaaguugccccaagccucaucggcuuaaccacaugggcauauguagcugcggucuguauaaacagccaggggugccgguaaaguggaagcguugaggacuaguuauaagacugacuagcccgaugggccucccaacgggcccuccuccccuccuugcaccgagauuaauaaaaaaaaaaaaaaaaaaaaaaaaaaaaaaaaaaaaaaaaaaaaaaaaaaaaaaaaaaaaaaaaugcaucccccccccccccccccccccccccccccccaaaggcucuuuucagagccaccagaauu

SEQ ID NO: 3433 - RNA, 1693 nt, Artificial Sequence
  mRNA product Design i-3 comprising derived and/or modified sequence from LASV(G733-SLE-2010;Clade IV)__AIT17154__GPC (opt3)
gggagaaagcuuaccaugggccagaucgugaccuucuuucaagaggucccccacguuauugaagaggugaugaacauaguacugaucgcccucagcauucuugcugugcugaagggguuguacaauuucgcaacaugcggaaucgucgguuuaguguccuuucugcuacucuguggcagaucuugcacuacgucacuguauaaagggguuuacgaacuucagacccuggaguugaacauggaaacacucaauaugacuaugccucugaguuguaccaagaacaauagccaucacuauauuauggugggaaacgagacaggccuggagcucaccuuaacuaauacauccaucauaaaccauaaauucugcaaucugucugacgcccacaagaaaaaccuuuacgaucaugcguugaugucgaucauuucaaccuuucaccugagcaucccaaauuucaaccaguaugaagcuaugaguugugacuuuaauggugggaagauuuccguccaguacaaccuaucucacagcuaugccggagaugcagccaaucauugcggcacgaucgcuaacggcgugcuccaaacuuucaugaggauggcauggggaggguccuacauagcccuggacucaggucgggaucgcugggacuguauuaugaccaguuaccaguaucuuaucauucagaacacaacuugggaggaucacugccaguuuagccgaccgucucccaucggcuaccugggguugcucucccaacguaccagagacaucuauauuucaaggcggcuguuaggaacauucaccuggacgcugagcgauagugaaggcaaggacacuccugguggguacugucucacacgcuggaugcuuauagaggcugagcugaaaugcuuuggaaauaccgccguagcgaaguguaacgaaaaacaugaugaggaguucugcgacauguugagacuauuugauuucaauaagcaggcaauccagaggcugaaagccgaagcucagaugucuauucaacucaucaacaaggccguuaaugcacugauaaacgaccagcuuauuaugaagaaucaucugcgggacaucaugggcaucccauauugcaacuacuccaaauauugguacuugaaucacacuacaaccggcaagacgagccuccccaaauguuggcuggugucgaacgggucuuacuuaaaugaaacccacuucuccgaugacauugagcagcaagcugauaacaugaucacagagaugcugcagaaggaauauauggagcgccagggaaaaacuccucuaggucucgucgaccuguuuguguucucaaccaguuuuuaccuuauuagcauauucuugcaccuggugaagaucccaacacaucgacacgucguuggcaaauccugccccaagccucauagacucaaucacauggggauuuguucuugcggacuguauggccagccaggugugccgguaaaguggaaaaggugaggacuaguuauaagacugacuagcccgaugggccucccaacgggcccuccuccccuccuugcaccgagauuaauaaaaaaaaaaaaaaaaaaaaaaaaaaaaaaaaaaaaaaaaaaaaaaaaaaaaaaaaaaaaaaaaugcaucccccccccccccccccccccccccccccccaaaggcucuuuucagagccaccagaauu

SEQ ID NO: 3434 - RNA, 1693 nt, Artificial Sequence
  mRNA product Design i-3 comprising derived and/or modified sequence from MOPV/LASV reassortant(IGS-1;Clade IV)__AFY05576__GPC (opt3)
gggagaaagcuuaccaugggccagaucgugaccuucuuucaagaggucccccacguuauugaagaggugaugaacauaguacugaucgcccucagcgugcuugcuguccugaagggguuguacaauuucgcaacaugcggauuagugggucugguuacuuuucuacuccuguguggcagauccugcacgaccucucuuuauaaagggguguacgaacugcagacauuggagcucaacauggaaacucugaauaugaccaugccucugucauguacaaagaacaauagucaucacuauauuauggucggaaacgagaccggccucgaguuaacucugacaaauaccagcaucauuaaccauaaauucugcaaucuuuccgacgcccacaagaaaaacuuguacgaucaugcgcugaugucuaucauaucgacguuucaccuaucaaucccaaauuucaaccaguaugaagcuaugagcugugacuuuaauggugggaagauuagugugcaguacaaccucucccacucuuaugccggagaugcagccaaucauugcggcacuguagcuaacggcguucugcaaaccuucaugaggauggcauggggagggagcuacaucgcccuugacuccggucggggcaacugggauuguauuaugacaucauaccaguaucugaucauacagaauacuaccugggaggaccacugccaguuuagucgcccgagccccauuggguacuugggacuccugucucaacgaacacgugauaucuauauuuccagaagguuacugggcaccuucacguggacucucucagacagcgaaggugaggauacaccugggggauacugucuuacccgguggaugcugaucgaggcugaauugaagugcuuuggcaacacugccguggcgaaauguaaugagaagcaugacgaagaguucugcgauaugcuacgccuguuugacuucaacaaacaggcaauccagagacucaaggccgaagcucagaugaguauucaacugauaaauaaagccgucaacgcacuuaucaaugaucagcugauuaugaagaaccacuugagggacaucaugggcauaccauauugcaauuacucuaaguauugguaccucaaccacacaaccacggggcggaccucccugcccaaauguugguuagugagcaauggaucguaccugaacgagacacauuucucugacgauauugagcagcaagcugacaauaugaucacugaaaugcuacagaaggaguauauggaacgccaggguaaaaccccucucggccugguggaucuuuuugucuucuccacaucauuuuacuugaucaguauuuuccugcaccucguuaagaucccaacucaucgacacauuguggggaaaagcugccccaagccucauagacugaaccacaugggaauauguuccugcggccuuuauaaacagccagguguaccggugaaguggaagaggugaggacuaguuauaagacugacuagcccgaugggccucccaacgggcccuccuccccuccuugcaccgagauuaauaaaaaaaaaaaaaaaaaaaaaaaaaaaaaaaaaaaaaaaaaaaaaaaaaaaaaaaaaaaaaaaaugcaucccccccccccccccccccccccccccccccaaaggcucuuuucagagccaccagaauu

SEQ ID NO: 3435 - RNA, 1693 nt, Artificial Sequence
  mRNA product Design i-3 comprising derived and/or modified sequence from LASV(LM765-SLE-2012;Clade IV)__AIT17814__GPC (opt3)
gggagaaagcuuaccaugggccagaucgugaccuucuuucaagaggucccccacguuauugaagaggugaugaacauaguacugaucgcccucagcauucuugcugugcugaagggguuguacaauuucgcaacaugcggauuagucggucuggugacuuuucuacuccuguguggcagauccugcacgaccucucuuuauaaagggguuuacgaacugcagacauuggagcucaacauggaaacucugaauaugaccaugccucugucauguacaaagaacaauagucaucacuauaucauggugggaaacgagaccggccucgaguuaacucugacaaauaccagcauuaucgaccauaaauucugcaaccuuuccgaugcccacaggaagaauuuguacgaccaugcgcugaugucuauaaucucgacguuucaccuaucaauuccaaacuucaaucaguaugaagcuaugagcugugauuuuaacggugggaaaaucaguguccaguacaaucucucccacucuuaugccaaggacgcagccgaucauugcggaacuguggcuaacggcguacugcaaaccuucaugcggauggcauggggcgggagcuacauugcccuugacuccggacgcggucgaugggauuguaucaugacaucauaccaguaucugauaauucagaauacuaccugggaggaccacugccaguuuagucguccgagccccaucggcuacuuggggcuccugucucaaagaacaagggauauuuauaucucccggcgcuuacugggaaccuucacguggacucucucagacagcgaaggcaaggauacaccugguggguacugucuuaccagauggaugcugaucgaggcugaguugaaaugcuuuggaaacacugccguugcgaaguguaacgaaaaacaugacgaggaguucugcgauaugcuaaggcuguuugacuucaauaagcaggcaauucagcggcucaaagccgaagcucagaugaguauacaacugaucaacaaggccgugaaugcacuuauuaacgaccagcugaucaugaagaaucacuugcgcgauauaaugggcauuccauauugcaacuacucuaaauauugguaccucaaucacacaaccacgggcaagaccucccugcccaaauguugguuagucagcaacgggucguaccugaaugaaacacauuucucugacgauaucgagcagcaagcugacaacaugaucacugagaugcuacagaaggaauauauggagcgacagggaaaaaccccucucggucugguggaucuuuuuguguucuccacaucauuuuacuugauuaguaucuuccugcaccucgucaagauuccaacucauagacacauaguuggcaaacccugcccuaagccacauaggcugaaucacauggggaucuguagcugcggacuuuauaagcagccgggcgugcccguaaaauggaagcggugaggacuaguuauaagacugacuagcccgaugggccucccaacgggcccuccuccccuccuugcaccgagauuaauaaaaaaaaaaaaaaaaaaaaaaaaaaaaaaaaaaaaaaaaaaaaaaaaaaaaaaaaaaaaaaaaugcaucccccccccccccccccccccccccccccccaaaggcucuuuucagagccaccagaauu

SEQ ID NO: 3436 - RNA, 1693 nt, Artificial Sequence
  mRNA product Design i-3 comprising derived and/or modified sequence from LASV(LM776-SLE-2012;Clade IV)__AIT17824__GPC (opt3)
gggagaaagcuuaccaugggccagaucgugaccuucuuucaagaggucccccacguuauugaagaggugaugaacauaguacugaucgcccucagcauucuugcugugcugaagggguuguacaauuucgcaacaugcggauuagucggucuggugacuuuucuacuccuguguggcagauccugcacgaccucuguuuauaaagggguguacgaacuucagacacuggaguugaacauggaaacucucaauaugaccaugccucugucauguacaaagaacaauagucaucacuauaucauggucggaaacgagaccggccuggagcucacuuuaacaaauaccagcauuaucaaccauaaauucugcaaucuguccgacgcccacaagaaaaaccuuuacgaucaugcguugaugucuauaaucucgacguuucaccugucaauuccaaauuucaaccaguaugaagcuaugagcugugacuuuaauggugggaagaucagugugcaguacaaccuaucccacucuuaugccggagaugcagccaaucauugcggcacuguagcuaacggcguucuccaaaccuucaugaggauggcauggggagggagcuacauugcccuggacuccggucacggcaagugggauuguaucaugacaucauaccaguaucuuauaauucagaacacuaccugggaggaccauugccaguuuagucggccgagccccaucggguaccugggauugcucucucaacgcacacgagauauuuauaucucccguagacuguuaggcaccuucacguggacucugucagacagcgaagguaaagauacaccugggggauacugucucaccagguggaugcuuaucgaggcugagcugaagugcuuuggcaauacugccguggcgaaauguaacgaaaagcacgacgaggaguucugcgauauguugcggcuauuugacuucaauaaacaggcaauucagcgccugaaggccgaagcucagaugaguauacaacucaucaacaaggccgucaaugcacugauuaacgaucagcuuaucaugaaaaaucaccugagagacauaaugggcauuccauauugcaacuacucuaaguauugguacuugaaucauacaaccacggggaaaaccucccuccccaaguguuggcuggugagcaacggaucguacuuaaaugaaacacacuucucugacgauaucgagcagcaagcugacaacaugaucacugagaugcugcagaaagaauauauggagaggcaggguaagaccccucuaggccucguggaucuguuugucuucuccacaucauuuuaccuuauuaguaucuucuugcaucugguuaaaauuccaacucaccggcauauagugggaaagagcugccccaagccucaccgccucaaucacauggggaucuguuccugcggccuguauaaacagccagguguaccggugcgauggaagagaugaggacuaguuauaagacugacuagcccgaugggccucccaacgggcccuccuccccuccuugcaccgagauuaauaaaaaaaaaaaaaaaaaaaaaaaaaaaaaaaaaaaaaaaaaaaaaaaaaaaaaaaaaaaaaaaaugcaucccccccccccccccccccccccccccccccaaaggcucuuuucagagccaccagaauu

SEQ ID NO: 3437 - RNA, 1693 nt, Artificial Sequence
  mRNA product Design i-3 comprising derived and/or modified sequence from LASV(Mad39;Clade IV)__ANH09722__GPC (opt3)
gggagaaagcuuaccaugggccagaucgugaccuucuuucaagaggucccccacguuauugaagaggugaugaacauaguacugaucgcccucagcauucuugcugugcugaagggguuguacaaugucgcaacaugcggauuaaucggucuggugacuuuccuacuccuguguggcagauccugcacgaccacacuuuauaaagggguuuacgaacugcaggccuuggagcucaacauggaaacucugaauaugaccaugccucugucuuguacaaagaacaauucacaucacuauauuagggugggaaacgagaccggccucgaguuaacucugacaaauaccagucuuaucaaccauaaauuuugcaauuugagcgacgcgcacaagaaaaaccuguacgaucaugcucuaauguccauaaucucuacguuccaccucucgauuccaaauuuuaaccaguaugaagccaugucaugugacuucaaugaugguaagaucagcguccaguacaaccugagucacacuuaugcaggggacaccgccaaucauugcggaacaguggcuaacggcguacuucaaacuuuuaugcggauggcauggggcggguccuacauugcccuggauucuggacgcgguggcugggacuguaucaugaccagcuaccaguauuugauaauucagaacacaaccugggaggaucacugccaguucucccgaccgucacccaucggguaccucggacuguuaagucaacguacgagagacauuuauaucagcaggcggcugcucggcacuuuuacauggacccuuucugauuccgaagguaaggacacuccugggggauacugucugacacgcuggauguugaucgaggcugagcuaaaaugcuucggcaauaccgccguugcgaaguguaacgaaaaacaugaugaggaauuuugcgacaugcugagacucuucgauuuuaauaagcaggcaauucagaggcugaaagccgaggcucagaugucaauacaacuuaucaacaaggccgugaaugcacugauuaacgaccaguugaucaugaagaaucaccuccgggacauaaugggcauuccauauugcaacuacagcaaauauugguaccugaaucacacggucaccgggaagacaaguuuacccaaauguuggcuggugucuaacggauccuaccuaaaugaaacucauuucagcgaugacaucgagcagcaagcugauaacaugaucaccgagaugcuccagaaggaauauauggagcgccaggguaaaacaccucugggccuuguggacuuguucgucuuuucgacuucuuucuaccugauuuccaucuuucuccaccugguuaagauuccaacccaucgacacgugguagggaaacccugcccuaagccacauagacuuaaucacaugggaauauguucaugcggcuucuauaagcagccgggugugcccgucagguggaaacggugaggacuaguuauaagacugacuagcccgaugggccucccaacgggcccuccuccccuccuugcaccgagauuaauaaaaaaaaaaaaaaaaaaaaaaaaaaaaaaaaaaaaaaaaaaaaaaaaaaaaaaaaaaaaaaaaugcaucccccccccccccccccccccccccccccccaaaggcucuuuucagagccaccagaauu

SEQ ID NO: 3438 - RNA, 1693 nt, Artificial Sequence
  mRNA product Design i-3 comprising derived and/or modified sequence from LASV(Z0947-SLE-2011;Clade IV)__AIT17840__GPC (opt3)
gggagaaagcuuaccaugggccagaucgugaccuucuuucaagaggucccccacguuauugaagaggugaugaacauaguacugaucgcccucagcauucuugcugugcugaagggguuguacaauuucgcaacaugcggauuagucggucuggugacuuuucuacuccuguguggcagauccugcacgaucucucuuuauaaagggguuuacgaacugcagaccuuggagcucaacauggaaacacugaauaugacuaugccucugucauguaccaagaacaauagucaucacuauauuauggugggaaacgagacaggccucgaguuaacccugacuaauacaagcaucauaaaccauaaauucugcaaucuuuccgacgcccacaagaaaaacuuguacgaucaugcgcugaugucuaucauuucgaccuuucaccuaucaaucccaaauuucaaccaguaugaagcuaugagcugugacuuuaauggugggaagauuaguguccaguacaaccucucccacucuuaugccggagaugcagccaaucauugcggcacgguggcuaacggcguacugcaaacuuucaugaggauggcauggggagggagcuacaucgcccuugacuccggucgggaucgcugggacuguauaaugaccucauaccaguaucugauuauccagaacacaacuugggaggaucacugccaguuuagucgaccgagccccauuggcuacuuggggcuccugucucaacguaccagagacaucuauaucuccaggcgguuacugggaacauucaccuggacgcucucagauagcgaaggcaaggacacuccugguggguacugucuuacacgcuggaugcugauugaggcugaguugaaaugcuuuggaaauaccgccguugcgaaguguaacgaaaaacaugaugaggaguucugcgacaugcuaagacuguuugauuucaauaagcaggcaauacagaggcucaaagccgaagcucagaugaguauccaacugauuaacaaggccgugaaugcacuuaucaacgaccagcugauaaugaagaaucacuugcgggacauuaugggcaucccauauugcaacuacucuaaauauugguaccucaaucacacuacaaccggcaagacgucccugcccaaauguugguuagucagcaacgggucguaccugaaugaaacccauuucucugaugacaucgagcagcaagcugauaacaugauuacagagaugcuacagaaggaauauauggagcgccagggaaaaacuccucucggucugguggaccuuuuuguguucuccaccucauuuuacuugaucaguauuuuccugcaccucgucaagauaccaacacaucgacacaucguuggcaaacccugcccuaagccacauagacugaaucacauggggauuuguagcugcggacuuuauaagcagccgggcgugcccguaaaauggaagaggugaggacuaguuauaagacugacuagcccgaugggccucccaacgggcccuccuccccuccuugcaccgagauuaauaaaaaaaaaaaaaaaaaaaaaaaaaaaaaaaaaaaaaaaaaaaaaaaaaaaaaaaaaaaaaaaaugcaucccccccccccccccccccccccccccccccaaaggcucuuuucagagccaccagaauu

SEQ ID NO: 3439 - RNA, 1693 nt, Artificial Sequence
  mRNA product Design i-3 comprising derived and/or modified sequence from LASV(Josiah;Clade IV)__NP_694870__GPC (opt4) R7287
gggagaaagcuuaccaugggccagaucgugaccuucuuccaggaggugccccacgugaucgaggaggugaugaacaucgugcugaucgcccugagcgugcuggccgugcugaagggccuguacaacuucgccaccugcggccuggugggccuggugaccuuccugcugcugugcggcagaagcugcaccaccagccuguacaagggcguguacgagcugcagacccuggagcugaacauggagacccugaacaugaccaugccccugagcugcaccaagaacaacagccaccacuacaucauggugggcaacgagaccggccuggagcugacccugaccaacaccagcaucaucaaccacaaguucugcaaccugagcgacgcccacaagaagaaccuguacgaccacgcccugaugagcaucaucagcaccuuccaccugagcauccccaacuucaaccaguacgaggccaugagcugcgacuucaacggcggcaagaucagcgugcaguacaaccugagccacagcuacgccggcgacgccgccaaccacugcggcaccguggccaacggcgugcugcagaccuucaugagaauggccuggggcggcagcuacaucgcccuggacagcggcagaggcaacugggacugcaucaugaccagcuaccaguaccugaucauccagaacaccaccugggaggaccacugccaguucagcagacccagccccaucggcuaccugggccugcugagccagagaaccagagacaucuacaucagcagaagacugcugggcaccuucaccuggacccugagcgacagcgagggcaaggacacccccggcggcuacugccugaccagauggaugcugaucgaggccgagcugaagugcuucggcaacaccgccguggccaagugcaacgagaagcacgacgaggaguucugcgacaugcugagacuguucgacuucaacaagcaggccauccagagacugaaggccgaggcccagaugagcauccagcugaucaacaaggccgugaacgcccugaucaacgaccagcugaucaugaagaaccaccugagagacaucaugggcauccccuacugcaacuacagcaaguacugguaccugaaccacaccaccaccggcagaaccagccugcccaagugcuggcuggugagcaacggcagcuaccugaacgagacccacuucagcgacgacaucgagcagcaggccgacaacaugaucaccgagaugcugcagaaggaguacauggagagacagggcaagaccccccugggccugguggaccuguucguguucagcaccagcuucuaccugaucagcaucuuccugcaccuggugaagauccccacccacagacacaucgugggcaagagcugccccaagccccacagacugaaccacaugggcaucugcagcugcggccuguacaagcagcccggcgugcccgugaaguggaagagaugaggacuaguuauaagacugacuagcccgaugggccucccaacgggcccuccuccccuccuugcaccgagauuaauaaaaaaaaaaaaaaaaaaaaaaaaaaaaaaaaaaaaaaaaaaaaaaaaaaaaaaaaaaaaaaaaugcaucccccccccccccccccccccccccccccccaaaggcucuuuucagagccaccagaauu

SEQ ID NO: 3440 - RNA, 1690 nt, Artificial Sequence
  mRNA product Design i-3 comprising derived and/or modified sequence from LASV(LP;Clade I)__AAF86701__GPC (opt4)
gggagaaagcuuaccaugggccagaucaucaccuucuuccaggaggugccccacgugaucgaggaggugaugaacaucgugcugaucgcccugagccugcuggccauccugaagggccuguacaacaucgccaccugcggcaucaucggccugguggccuuccuguuccugugcggcaagagcugcagccugacccugaagggcggcuacgagcugcagacccuggagcugaacauggagacccugaacaugaccaugccccugagcugcaccaagaacagcagccaccacuacaucagagugggcaacgagaccggccuggagcugacccugaccaacaccagcaucaucaaccacaaguucugcaaccugagcgacgcccacaagaagaaccuguacgaccacgcccugaugagcaucaucagcaccuuccaccugagcauccccaacuucaaccaguacgaggccaugagcugcgacuucaacggcggcaagaucagcgugcaguacaaccugagccacagcuacgccggcgacgccgccgagcacugcggcaccguggccaacggcgugcugcagaccuucaugagaauggccuggggcggcagauacaucgcccuggacagcggcaagggcaacugggacugcaucaugaccagcuaccaguaccugaucauccagaacaccaccugggaggaccacugccaguucagcagacccagccccaucggcuaccugggccugcugagccagagaaccagagacaucuacaucagcagaagacugcugggcaccuucaccuggacccugagcgacagcgagggcaacgagacccccggcggcuacugccugaccagauggaugcugaucgaggccgagcugaagugcuucggcaacaccgccguggccaagugcaacgagaagcacgacgaggaguucugcgacaugcugagacuguucgacuucaacaagcaggccaucagaagacugaaggccgaggcccagaugagcauccagcugaucaacaaggccgugaacgcccugaucaacgaccagcugaucaugaagaaccaccugagagacaucaugggcauccccuacugcaacuacagcaaguacugguaccugaaccacaccagcagcggcagaaccagccugcccaagugcuggcugaucagcaacggcagcuaccugaacgagacccaguucagcgacgacaucgagcagcaggccgacaacaugaucaccgagaugcugcagaaggaguacaucgagagacagggcaagaccccccugggccugguggacaucuucaucuucagcaccagcuucuaccugaucagcaucuuccugcaccugaucaagauccccacccacagacacaucgugggcaagcccugccccaagccccacagacugaaccacaugggcgugugcagcugcggccuguacaagcaccccggcgugcccaccaaguggaagagaugaggacuaguuauaagacugacuagcccgaugggccucccaacgggcccuccuccccuccuugcaccgagauuaauaaaaaaaaaaaaaaaaaaaaaaaaaaaaaaaaaaaaaaaaaaaaaaaaaaaaaaaaaaaaaaaaugcaucccccccccccccccccccccccccccccccaaaggcucuuuucagagccaccagaauu

SEQ ID NO: 3441 - RNA, 1690 nt, Artificial Sequence
  mRNA product Design i-3 comprising derived and/or modified sequence from LASV(803213;Clade II)__AAF86703__GPC (opt4)
gggagaaagcuuaccaugggccagaucaucaccuucuuccaggaggugccccacgugaucgaggaggugaugaacaucgugcugaucgcccugagccugcuggccauccugaagggcaucuacaacguggccaccugcggccuguucggccugaucagcuuccugcugcugugcggcagaagcugcagcgugaccuacaagggcguguacgagcugcagacccuggagcugaacauggccaaccugaacaugaccaugccccugagcugcaccaagaacaacagccaccacuacaucauggugggcaacgagaccggccuggagcugacccugaccaacaccagcaucaucaaccacaaguucugcaaccugagcgacgcccacaagaagaaccuguacgaccacgcccugaugagcaucaucagcaccuuccaccugagcauccccaacuucaaccaguacgaggccaugagcugcgacuucaacggcggcaagaucagcgugcaguacaaccugagccacagcuucgccguggacgccgccaaccacugcggcaccaucgccaacggcgugcugcagaccuucaugagaauggccuggggcggcagcuacaucgcccuggacagcggcaagggcaacugggacugcaucaugaccagcuaccaguaccugaucauccagaacaccaccugggaggaccacugccaguucagcagacccagccccaucggcuaccugggccugcugagccagagaaccagagacaucuacaucagcagaagacugcugggcaccuucaccuggacccugagcgacagcgagggcaacgaggcccccggcggcuacugccugaccagauggaugcugaucgaggccgagcugaagugcuucggcaacaccgccguggccaagugcaacgagaagcacgacgaggaguucugcgacaugcugagacuguucgacuucaacaagcaggccaucaagagacugaagaccgaggcccagaugagcauccagcugaucaacaaggccgugaacgcccugaucaacgaccagcugaucaugaagaaccaccugagagacaucaugggcauccccuacugcaacuacagcagauacugguaccugaaccacaccgugaccggcaagaccagccugcccagaugcuggcuggugagcaacggcagcuaccugaacgagacccacuucagcgacgacaucgagcagcaggccgacaacaugaucaccgagaugcugcagaaggaguacauggacagacagggcaagaccccccugggccugguggaccuguucguguucagcaccagcuucuaccugaucagcaucuuccugcaccuggugaagauccccacccacagacacaucgugggcaagcccugccccaagccccacagacugaaccacaugggcaucugcagcugcggccuguacaagcaccccggcgugcccgugaaguggaagagaugaggacuaguuauaagacugacuagcccgaugggccucccaacgggcccuccuccccuccuugcaccgagauuaauaaaaaaaaaaaaaaaaaaaaaaaaaaaaaaaaaaaaaaaaaaaaaaaaaaaaaaaaaaaaaaaaugcaucccccccccccccccccccccccccccccccaaaggcucuuuucagagccaccagaauu

SEQ ID NO: 3442 - RNA, 1690 nt, Artificial Sequence
  mRNA product Design i-3 comprising derived and/or modified sequence from LASV(GA391;Clade III)__CAA36645__GPC (opt4)
gggagaaagcuuaccaugggccagaucgugaccuucuuccaggaggugccccacgugaucgaggaggugaugaacaucgugcugaucgcccugagcauccuggccauccugaagggccuguacaacguggccaccugcggccugaucggccuggugaccuuccugcugcugagcggcagaagcugcagccugaucuacaagggcaccuacgagcugcagacccuggagcugaacauggagacccugaacaugaccaugccccugagcugcaccaagaacaacagccaccacuacaucagagugggcaacgagaccggccuggagcugacccugaccaacaccagcauccugaaccacaaguucugcaaccugagcgacgcccacaagagaaaccuguacgaccacagccugaugagcaucaucagcaccuuccaccugagcauccccaacuucaaccaguacgaggccaugagcugcgacuucaacggcggcaagaucaccgugcaguacaaccugagccacagcuucgccguggacgccgccggccacugcggcacccuggccaacggcgugcugcagaccuucaugagaauggccuggggcggcagcuacaucgcccuggacagcggcagaggcaacugggacugcaucaugaccagcuaccaguaccugaucauccagaacaccaccugggacgaccacugccaguucagcagacccagccccaucggcuaccugggccugcugagccagagaaccagagacaucuacaucagcagaagacugcugggcaccuucaccuggacccugagcgacagcgagggcaacgagacccccggcggcuacugccugaccagauggaugcugaucgaggccgagcugaagugcuucggcaacaccgccguggccaagugcaacgagaagcacgacgaggaguucugcgacaugcugagacuguucgacuucaacaagcaggccaucagaagacugaagaccgaggcccagaugagcauccagcugaucaacaaggccgugaacgcccugaucaacgaccagcugaucaugaagaaccaccugagagacaucaugggcauccccuacugcaacuacagcagauacugguaccugaaccacaccagcaccggcaagaccagccugcccagaugcuggcugaucagcaacggcagcuaccugaacgagaccaaguucagcgacgacaucgagcagcaggccgacaacaugaucaccgagaugcugcagaaggaguacaucgacagacagggcaagaccccccugggccugguggaccuguucguguucagcaccagcuucuaccugaucagcaucuuccugcaccuggugaagauccccacccacagacacaucgugggcaagcccugccccaagccccacagacugaaccacaugggcaucugcagcugcggccuguacaagcagcccggcgugcccgugagauggaagagaugaggacuaguuauaagacugacuagcccgaugggccucccaacgggcccuccuccccuccuugcaccgagauuaauaaaaaaaaaaaaaaaaaaaaaaaaaaaaaaaaaaaaaaaaaaaaaaaaaaaaaaaaaaaaaaaaugcaucccccccccccccccccccccccccccccccaaaggcucuuuucagagccaccagaauu

SEQ ID NO: 3443 - RNA, 1693 nt, Artificial Sequence
  mRNA product Design i-3 comprising derived and/or modified sequence from LASV(AV;Clade V)__CCA30314__GPC (opt4)
gggagaaagcuuaccaugggccagaucgugaccuucuuccaggaggugccccacgugaucgaggaggugaugaacaucgugcugaucgcccugagcauccuggccgugcugaagggccuguacaacaucgccaccugcggccugaucggccugaucaccuuccugcugcugugcggcagaagcugcagcagcaaccuguacaagggcguguacgagcugcagagccuggaccugaacauggagacccugaacaugaccaugccccugagcugcaccaagaacaacagccaccacuacaucagagugggcaacgacaccggccuggagcugacccugaccaacaccagcauccugaaccacaaguucugcaaccugagcgacgcccacaagaaggaccuguacgaccacgcccugaugagcaucaucagcaccuuccaccugagcauccccaacuucaaccaguacgaggccaugagcugcgacuucaacggcggcaagaucagcgugcaguacaaccugagccacagcuacgccaucgacgccgccaaccacugcggcaccguggccaacggcauccugcagaccuucaugagaauggccuggggcggcagcuacaucgcccuggacagcggcagaggcaacugggacugcaucaugaccagcuaccaguaccugaucauccagaacaccaccugggagaaccacugccaguucagcagacccagccccaucggcuaccugggccugcugagccagagaaccagagacaucuacaucagcagaagacugcugggcaccuucaccuggacccugagcgacagcgagggcaacgccacccccggcggcuacugccugaccagauggaugcugaucgaggccgagcugaagugcuucggcaacaccgccguggccaagugcaacgagaagcacgacgaggaguucugcgacaugcugagacuguucgacuucaacaagcaggccaucagcagacugaagagcgaggcccagaugagcauccagcugaucaacaaggccgugaacgcccugaucaacgaccagcugaucaugaagaaccaccugagagacaucaugggcauccccuacugcaacuacagcaaguacugguaccugaaccacaccaucaccggcaagaccagccugcccaagugcuggcuggugagcaacggcagcuaccugaacgagacccacuucagcgacgacaucgagcagcaggccgacaacaugaucaccgagaugcugcagaaggaguacauggagagacagggcaagaccccccugggccugguggaccuguucguguucagcaccagcuucuaccugaucagcaucuuccugagacuggugaagauccccacccacagacacaucgugggcaagcccugccccaagccccacagacugaaccacaugggcaucugcagcugcggccuguacaagcagcccggcgugcccgugagauggaagagaugaggacuaguuauaagacugacuagcccgaugggccucccaacgggcccuccuccccuccuugcaccgagauuaauaaaaaaaaaaaaaaaaaaaaaaaaaaaaaaaaaaaaaaaaaaaaaaaaaaaaaaaaaaaaaaaaugcaucccccccccccccccccccccccccccccccaaaggcucuuuucagagccaccagaauu

SEQ ID NO: 3444 - RNA, 1690 nt, Artificial Sequence
  mRNA product Design i-3 comprising derived and/or modified sequence from LASV(Togo/2016/7082;Clade VI)__AMR44577__GPC (opt4)
gggagaaagcuuaccaugggccagaucaucaccuucuuccaggaggugccccacgugaucgaggaggugaugaacaucgugcugaucgcccugagccugcuggccauccugaagggcguguacaacguggccaccugcggcaucaucggccuggugaccuuccuguuccugugcggcagaagcugcagccugaucuacaagggcagcuacgagcugcagacccuggagcugaacauggagacccugaacaugaccaugccccugagcugcaccaagaacagcagccaccacuacaucagagugggcaacgagaccggccuggagcugacccugaccaacaccagcaucaucaaccacaaguucugcaaccugagcgacgcccacaagagaaaccuguacgaccacgcccugaugagcauccugagcaccuuccaccugagcauccccaacuucaaccaguacgaggccaugagcugcgacuucaacggcggcaagaucagcgugcaguacaaccugagccacgccuacgccguggacgccgccgagcacugcggcaccguggccaacggcgugcugcagaccuucaugagaauggccuggggcggcagcuacaucgcccuggacagcggcagaggcaacugggacugcaucaugaccagcuaccaguaccugaucauccagaacaccaccugggaggaccacugccaguucagcagacccagccccaucggcuaccugggccugcugagccagagaaccagagacaucuacaucagcagaagacugcugggcaccuucaccuggacccugagcgacagcgagggcaacgagacccccggcggcuacugccugaccagauggaugcugaucgaggccgagcugaagugcuucggcaacaccgccguggccaagugcaacgagaagcacgacgaggaguucugcgacaugcugagacuguucgacuucaacaagcaggccauccagagacugaagagcgaggcccagaugagcauccagcugaucaacaaggccgugaacgcccugaucaacgaccagcugaucaugaagaaccaccugagagacaugaugggcauccccuacugcaacuacagcaaguacugguaccugaaccacaccagcagcggcagaaccagccugcccaagugcuggcuggugagcaacggcagcuaccugaacgagacccacuucagcgacgacaucgagcagcaggccgacaacaugaucaccgagaugcugcagaaggaguacaucgacagacagggcaagaccccccugggccugguggaccuguucguguucagcaccagcuucuaccugaucagcaucuuccugcaccugaucaagauccccacccacagacacaucgugggcaagcccugccccaagccccacagacugaaccacaugggcaucugcagcugcggccuguacaagcagcccggcgugcccaccagauggaagagaugaggacuaguuauaagacugacuagcccgaugggccucccaacgggcccuccuccccuccuugcaccgagauuaauaaaaaaaaaaaaaaaaaaaaaaaaaaaaaaaaaaaaaaaaaaaaaaaaaaaaaaaaaaaaaaaaugcaucccccccccccccccccccccccccccccccaaaggcucuuuucagagccaccagaauu

SEQ ID NO: 3445 - RNA, 1690 nt, Artificial Sequence
  mRNA product Design i-3 comprising derived and/or modified sequence from LASV(KAK-428;Clade n.d. (VII))__ANH09740__GPC (opt4)
gggagaaagcuuaccaugggccagaucgugaccuucuuccaggaggugccccacgugaucgaggaggugaugaacaucgugcugaucgcccugagccugcuggccauccugaagggccuguacaacuucgccaccugcggcgugaucggccugaucaccuuccugcugcugugcggcagaagcugcagcgccaccuacaagggccaguacgagcugcagacccuggagcugaacauggagagccugaacaugaccaugccccugagcugcaccaagaacaacagccaccacuacaucagagccggcaacaacaccggccuggagcugacccugaccaacaccagcaucaucagccacaaguucugcaaccugagcgacgcccacaagaagaaccuguacgaccacacccugaugagcaucaucaccaccuuccaccugagcauccccaacuucaaccaguacgaggccaugagcugcgacuucaacggcggcaagaucagcauccaguacaaccugagccacagcuacgccggcgacgccgcccagcacugcggcaccguggccaacggcgugcugcagaccuucaugagaauggccuggggcggcagcuaccuggcccuggacagcggcagaagaggcugggacugcaucaucagcagcuaccaguaccugaucauccagaacaccaccugggacgaccacugccaguucagcagacccagccccaucggcuaccugggcuucgugagccagaagaccagagacaucuacaucagcagaagacugcugggcaccuucaccuggacccugagcgacagcgagggccacgacaugcccggcggcuacugccugaccagauggaugcugaucgaggccgaccugaagugcuucggcaacaccgccguggccaagugcaacgagaagcacgacgaggaguucugcgacauguggagacuguucgacuucaacaagcaggccauccagagacugaaggccgaggcccagaugaacauccagcugaucaacaaggccgugaacgcccugaucaacgaccagcugaugaugaagaaccaccugagagacaucaugggcauccccuacugcaacuacagcaaguucugguaccugaacaacaccaccaccggcagaaccagccugcccagaugcuggcugaucagcaacggcagcuaccugaacgagacccacuucagcgacgacaucgagcagcaggccgacaacaugaucaccgagaugcugcagaaggaguacauggacagacagggcaagaccccccugggccugguggaccuguucguguucagcaccagcuucuaccugaucaccaucuuccugcaccuggugaagauccccacccacagacacaucgugggcaagcccugccccaagccccacagacugaaccacaugggcaucugcagcugcggccuguacaagcagcccggcgugcccgugagauggaagagaugaggacuaguuauaagacugacuagcccgaugggccucccaacgggcccuccuccccuccuugcaccgagauuaauaaaaaaaaaaaaaaaaaaaaaaaaaaaaaaaaaaaaaaaaaaaaaaaaaaaaaaaaaaaaaaaaugcaucccccccccccccccccccccccccccccccaaaggcucuuuucagagccaccagaauu

SEQ ID NO: 3446 - RNA, 1690 nt, Artificial Sequence; identical to SEQ ID NO: 3440
  mRNA product Design i-3 comprising derived and/or modified sequence from LASV(Pinneo-NIG-1969;Clade I)__AIT17836__GPC (opt4)

SEQ ID NO: 3447 - RNA, 1690 nt, Artificial Sequence
  mRNA product Design i-3 comprising derived and/or modified sequence from LASV(ISTH0009-NIG-2011;Clade II)__AIT17404__GPC (opt4)
gggagaaagcuuaccaugggccagaucaucaccuucuuccaggaggugccccacgugaucgaggaggugaugaacaucgugcugaucgcccugagccugcuggccauccugaagggcaucuacaacguggccaccugcggccuguucggccuggugagcuuccugcugcugugcggcagaagcugcagcaccaccuacaagggcguguacgagcugcagacccuggagcuggacauggccagccugaacaugaccaugccccugagcugcaccaagaacaacagccaccacuacaucauggugggcaacgagaccggccuggagcugacccugaccaacaccagcaucaucaaccacaaguucugcaaccugagcgacgcccacaagaagaaccuguacgaccacgcccugaugagcaucaucagcaccuuccaccugagcauccccaacuucaaccaguacgaggccaugagcugcgacuucaacggcggcaagaucagcgugcaguacaaccugagccacgccuacgccguggacgccgccaaccacugcggcaccaucgccaacggcgugcugcagaccuucaugagaauggccuggggcggcagcuacaucgcccuggacagcggcaagggcagcugggacugcaucaugaccagcuaccaguaccugaucauccagaacaccaccugggaggaccacugccaguucagcagacccagccccaucggcuaccugggccugcugagccagagaaccagagacaucuacaucagcagaagacugcugggcaccuucaccuggacccugagcgacagcgagggcaacgagacccccggcggcuacugccugaccagauggaugcugaucgaggccgagcugaagugcuucggcaacaccgccguggccaagugcaacgagaagcacgacgaggaguucugcgacaugcugagacuguucgacuucaacaagcaggccaucagaagacugaagaccgaggcccagaugagcauccagcugaucaacaaggccgugaacgcccugaucaacgaccagcugaucaugaagaaccaccugagagacaucaugggcauccccuacugcaacuacagcaaguacugguaccugaaccacaccgugaccggcaagaccagccugcccagaugcuggcuggugagcaacggcagcuaccugaacgagacccacuucagcgacgacaucgagcagcaggccgacaacaugaucaccgagcugcugcagaaggaguacauggacagacagggcaagaccccccugggccugguggaccuguucguguucagcaccagcuucuaccugaucagcaucuuccugcaccugaucaagauccccacccacagacacaucaccggcaagcccugccccaagccccacagacugaaccacaugggcaucugcagcugcggccuguacaagcaccccggcgugcccgugaaguggaagagaugaggacuaguuauaagacugacuagcccgaugggccucccaacgggcccuccuccccuccuugcaccgagauuaauaaaaaaaaaaaaaaaaaaaaaaaaaaaaaaaaaaaaaaaaaaaaaaaaaaaaaaaaaaaaaaaaugcaucccccccccccccccccccccccccccccccaaaggcucuuuucagagccaccagaauu

SEQ ID NO: 3448 - RNA, 1690 nt, Artificial Sequence
  mRNA product Design i-3 comprising derived and/or modified sequence from LASV(ISTH2010-NIG-2012;Clade II)__AIT17482__GPC (opt4)
gggagaaagcuuaccaugggccagaucaucaccuucuuccaggaggugccccacgugaucgaggaggugaugaacaucgugcugaucgcccugagccugcuggccauccugaagggcaucuacaacguggccaccugcggccuguucggccuggugagcuuccugcugcugugcggcagaagcugcagcaccaccuacaagggcguguacgagcugcagacccuggagcuggacauggccagccugaacaugaccaugccccugagcugcaccaagaacaacagccaccacuacaucauggugggcaacgagaccggccuggagcugacccugaccaacaccagcaucaucaaccacaaguucugcaaccugagcgacgcccacaagaagaaccuguacgaccacgcccugaugagcaucaucagcaccuuccaccugagcauccccaacuucaaccaguacgaggccaugagcugcgacuucaacggcggcaagaucagcgugcaguacaaccugagccacgccuacgccguggacgccgccaaccacugcggcaccaucgccaacggcgugcugcagaccuucaugagaauggccuggggcggcagcuacaucgcccuggacagcggcaagggcagcugggacugcaucaugaccagcuaccaguaccugaucauccagaacaucaccugggaggaccacugccaguucagcagacccagccccaucggcuaccugggccugcugagccagagaaccagagacaucuacaucagcagaagacugcugggcaccuucaccuggacccugagcgacagcgagggcaacgagacccccggcggcuacugccugaccagauggaugcugaucgaggccgagcugaagugcuucggcaacaccgccguggccaagugcaacgagaagcacgacgaggaguucugcgacaugcugagacuguucgacuucaacaagcaggccaucagaagacugaagaccgaggcccagaugagcauccagcugaucaacaaggccgugaacgcccugaucaacgaccagcugaucaugaagaaccaccugagagacaucaugggcauccccuacugcaacuacagcaaguacugguaccugaaccacaccgugaccggcaagaccagccugcccagaugcuggcuggugagcaacggcagcuaccugaacgagacccacuucagcgacgacaucgagcagcaggccgacaacaugaucaccgagcugcugcagaaggaguacaucgacagacagggcaagaccccccugggccugguggaccuguucguguucagcaccagcuucuaccugaucagcaucuuccugcaccuggugaagauccccacccacagacacguggugggcaagcccugccccaagccccacagacugaaccacaugggcaucugcagcugcggccuguacaagcaccccggcgugcccgugaaguggaagagaugaggacuaguuauaagacugacuagcccgaugggccucccaacgggcccuccuccccuccuugcaccgagauuaauaaaaaaaaaaaaaaaaaaaaaaaaaaaaaaaaaaaaaaaaaaaaaaaaaaaaaaaaaaaaaaaaugcaucccccccccccccccccccccccccccccccaaaggcucuuuucagagccaccagaauu

SEQ ID NO: 3449 - RNA, 1690 nt, Artificial Sequence
  mRNA product Design i-3 comprising derived and/or modified sequence from LASV(Lassa virus/H.sapiens-wt/NGA/2015/ISTH_0543;Clade II)__AVO03639__GPC (opt4)
gggagaaagcuuaccaugggccagaucaucaccuucuuccaggaggugccccacgugaucgaggaggugaugaacaucgugcugaucgcccugagccugcuggccauccugaagggcaucuacaacguggccaccugcggccuguucggccuggugagcuuccugcugcugugcggcagaagcugcagcaccaccuacaagggcguguacgagcugcagacccuggagcuggacauggccaaccugaacaugaccaugccccugagcugcaccaagaacaacagccaccacuacaucauggugggcaacgagaccggccuggagcugacccugaccaacaccagcaucaucaaccacaaguucugcaaccugagcgacgcccacaagaagaaccuguacgaccacgcccugaugagcaucaucagcaccuuccaccugagcauccccaacuucaaccaguacgaggccaugagcugcgacuucaacggcggcaagaucagcgugcaguacaaccugagccacaccuacgccguggacgccgccaaccacugcggcaccaucgccaacggcgugcugcagaccuucaugagaauggccuggggcggcagcuacaucgcccuggacagcggcaagggcagcugggacugcaucaugaccagcuaccaguaccuggugauccagaacaccaccugggaggaccacugccaguucagcagacccagccccaucggcuaccugggccugcugagccagagaaccagagacaucuacaucagcagaagacugcugggcaccuucaccuggacccugagcgacagcgagggcaacgagacccccggcggcuacugccugaccagauggaugcugaucgaggccgagcugaagugcuucggcaacaccgccguggccaagugcaacgagaagcacgacgaggaguucugcgacaugcugagacuguucgacuucaacaagcaggccaucagaagacugaagaccgaggcccagaugagcauccagcugaucaacaaggccgugaacgcccugaucaacgaccagcugaucaugaagaaccaccugagagacaucaugggcauccccuacugcaacuacagcaaguacugguaccugaaccacaccgugaccggcaagaccagccugcccagaugcuggcuggugagcaacggcagcuaccugaacgagacccacuucagcgacgacaucgagcagcaggccgacaacaugaucaccgagcugcugcagaaggaguacaucgacagacagggcaagaccccccugggccugguggaccuguucguguucagcaccagcuucuaccugaucagcaucuuccugcaccuggugaagauccccacccacagacacaucaccggcaagcccugccccaagccccacagacugaaccacaugggcaucugcagcugcggccuguacaagcaccccggcgugcccgugaaguggaagagaugaggacuaguuauaagacugacuagcccgaugggccucccaacgggcccuccuccccuccuugcaccgagauuaauaaaaaaaaaaaaaaaaaaaaaaaaaaaaaaaaaaaaaaaaaaaaaaaaaaaaaaaaaaaaaaaaugcaucccccccccccccccccccccccccccccccaaaggcucuuuucagagccaccagaauu

SEQ ID NO: 3450 - RNA, 1690 nt, Artificial Sequence
  mRNA product Design i-3 comprising derived and/or modified sequence from LASV(Lassa virus/H.sapiens-wt/NGA/2016/ISTH_0009;Clade II)__AVO03571__GPC (opt4)
gggagaaagcuuaccaugggccagaucaucaccuucuuccaggaggugccccacgugaucgaggaggugaugaacaucgugcugaucgcccugagccugcuggccauccugaagggcaucuacaacguggccaccugcggccugcugggccuggugagcuuccugcugcugugcggcagaagcugcagcaccaccuacaagggcguguacgagcugcagacccuggagcuggacauggccagccugaacaugaccaugccccugagcugcaccaagaacaacagccaccacuacaucauggugggcaacgagaccggccuggagcugacccugaccaacaccagcaucaucaaccacaaguucugcaaccugagcgacgcccacaagaagaaccuguacgaccacgcccugaugagcaucaucagcaccuuccaccugagcauccccaacuucaaccaguacgaggccaugagcugcgacuucaacggcggcagaaucagcgugcaguacaaccugagccacagcuacgccguggacgccgccaaccacugcggcaccaucgccaacggcgugcugcagaccuucaugagaauggccuggggcggcagcuacaucgcccuggacagcggcaagggcagcugggacugcaucaugaccagcuaccaguaccugaucauccagaacaccaccugggaggaccacugccaguucagcagacccagccccaucggcuaccugggccugcugagccagagaaccagagacaucuacaucagcagaagacugcugggcaccuucaccuggacccugagcgacagcgagggcaacgagacccccggcggcuacugccugaccagauggaugcugaucgaggccgagcugaagugcuucggcaacaccgccguggccaagugcaacgagaagcacgacgaggaguucugcgacaugcugagacuguucgacuucaacaagcaggccaucagaagacugaagaccgaggcccagaugagcauccagcugaucaacaaggccgugaacgcccugaucaacgaccagcugaucaugaagaaccaccugagagacaucaugggcauccccuacugcaacuacagcaaguacugguaccugaaccacaccgugaccggcaagaccagccugcccagaugcuggcuggugagcaacggcagcuaccugaacgagacccacuucagcgacgacaucgagcagcaggccgacaacaugaucaccgagcugcugcagaaggaguacaucgacagacagggcaagaccccccugggccugguggaccuguucguguucagcaccagcuucuaccugaucagcaucuuccugcaccuggugaagauccccacccacagacacaucaccggcaagcccugccccaagccccacagacugaaccacaugggcaucugcagcugcggccuguacaaccaccccggcgugcccgugaaguggaagagaugaggacuaguuauaagacugacuagcccgaugggccucccaacgggcccuccuccccuccuugcaccgagauuaauaaaaaaaaaaaaaaaaaaaaaaaaaaaaaaaaaaaaaaaaaaaaaaaaaaaaaaaaaaaaaaaaugcaucccccccccccccccccccccccccccccccaaaggcucuuuucagagccaccagaauu

SEQ ID NO: 3451 - RNA, 1690 nt, Artificial Sequence
  mRNA product Design i-3 comprising derived and/or modified sequence from LASV(Lassa virus/H.sapiens-wt/NGA/2016/ISTH_0017;Clade II)__AVO03567__GPC (opt4)
gggagaaagcuuaccaugggccagaucaucaccuucuuccaggaggugccccacgugaucgaggaggugaugaacaucgugcugaucgcccugagccugcuggccauccugaagggcaucuacaacguggccaccugcggccuguucggccuggugagcuuccugcugcugugcggcagaagcugcagcaccaccuacaagggcguguacgagcugcagacccuggagcuggacauggccagccugaacaugaccaugccccugagcugcaccaagaacaacagccaccacuacaucauggugggcaacgagaccggccuggagcugacccugaccaacaccagcaucaucaaccacaaguucugcaaccugagcgacgcccacaagaagaaccuguacgaccacgcccugaugagcaucaucagcaccuuccaccugagcauccccaacuucaaccaguacgaggccaugagcugcgacuucaacggcggcaagaucagcgugcaguacaaccugagccacaccuacgccaucgacgccgccaaccacugcggcaccaucgccaacggcgugcugcagaccuucaugagaauggccuggggcggcagcuacaucgcccuggacagcggcaagggcagcugggacugcaucaugaccagcuaccaguaccugaucauccagaacaccaccugggaggaccacugccaguucagcagacccagccccaucggcuaccugggccugcugagccagagaaccagagacaucuacaucagcagaagacugcugggcaccuucaccuggacccugagcgacagcgagggcaacgagacccccggcggcuacugccugaccagauggaugcugaucgaggccgagcugaagugcuucggcaacaccgccguggccaagugcaacgagaagcacgacgaggaguucugcgacaugcugagacuguucgacuucaacaagcaggccaucagaagacugaagaccgaggcccagaugagcauccagcugaucaacaaggccgugaacgcccugaucaacgaccagcugaucaugaagaaccaccugagagacaucaugggcauccccuacugcaacuacagcaaguacugguaccugaaccacaccgugaccggcaagaccagccugcccagaugcuggcuggugagcaacggcagcuaccugaacgagacccacuucagcgacgacaucgagcagcaggccgacaacaugaucaccgagcugcugcagaaggaguacauggacagacagggcaagaccccccugggccugguggaccuguucguguucagcaccagcuucuaccugaucagcaucuuccugcaccuggugagaauccccacccacagacacgugaucggcaagcccugccccaagccccacagacugaaccacaugggcaucugcagcugcggccuguacaagcaccccggcgugcccgugaaguggaagagaugaggacuaguuauaagacugacuagcccgaugggccucccaacgggcccuccuccccuccuugcaccgagauuaauaaaaaaaaaaaaaaaaaaaaaaaaaaaaaaaaaaaaaaaaaaaaaaaaaaaaaaaaaaaaaaaaugcaucccccccccccccccccccccccccccccccaaaggcucuuuucagagccaccagaauu

SEQ ID NO: 3452 - RNA, 1690 nt, Artificial Sequence
  mRNA product Design i-3 comprising derived and/or modified sequence from LASV(Lassa virus/H.sapiens-wt/NGA/2018/ISTH_0959;Clade II)__AVV65099__GPC (opt4)
gggagaaagcuuaccaugggccagaucaucaccuucuuccaggaggugccccacgugaucgaggaggugaugaacaucgugcugaucgcccugagccugcuggccauccugaagggcaucuacaacguggugaccugcggccuguucggccuggugagcuuccugcugcugugcggcagaagcugcagcaccaccuacaagggcguguacgagcugcagacccuggagcuggacauggccagccugaacaugaccaugccccugagcugcaccaagaacaacagccaccacuacaucauggugggcaacgagaccggccuggagcugacccugaccaacaccagcaucaucaaccacaaguucugcaaccugagcgacgcccacaagaagaaccuguacgaccacgcccugaugagcaucaucagcaccuuccaccugagcauccccaacuucaaccaguacgaggccaugagcugcgacuucaacggcggcaagaucagcgugcaguacaaccugagccacgccuacgccaucgacgccgccaaccacugcggcaccaucgccaacggcgugcugcagaccuucaugagaauggccuggggcggcagcuacaucgcccuggacagcggcaagggcagcugggacugcaucaugaccagcuaccaguaccugaucauccagaacaccaccugggaggaccacugccaguucagcagacccagccccaucggcuaccugggccugcugagccagagaaccagagacaucuacaucagcagaagacugcugggcaccuucaccuggacccugagcgacagcgagggcaacgagacccccggcggcuacugccugaccagauggaugcugaucgaggccgagcugaagugcuucggcaacaccgccguggccaagugcaacgagaagcacgacgaggaguucugcgacaugcugagacuguucgacuucaacaagcaggccaucagaagacugaagaccgaggcccagaugagcauccagcugaucaacaaggccgugaacgcccugaucaacgaccagcugaucaugaagaaccaccugagagacaucaugggcauccccuacugcaacuacagcaaguacugguaccugaaccacaccgugaccggcaagaccagccugcccagaugcuggcuggugagcaacggcagcuaccugaacgagacccacuucagcgacgacaucgagcagcaggccgacaacaugaucaccgagcugcugcagaaggaguacaucgacagacagggcaagaccccccugggccugguggaccuguucguguucagcaccagcuucuaccugaucagcaucuuccugcaccuggugaagauccccacccacagacacgugaucggcaagcccugccccaagccccacagacugaaccacaugggcaucugcagcugcggccuguacaagcaccccggcgugcccgugaaguggaagagaugaggacuaguuauaagacugacuagcccgaugggccucccaacgggcccuccuccccuccuugcaccgagauuaauaaaaaaaaaaaaaaaaaaaaaaaaaaaaaaaaaaaaaaaaaaaaaaaaaaaaaaaaaaaaaaaaugcaucccccccccccccccccccccccccccccccaaaggcucuuuucagagccaccagaauu

SEQ ID NO: 3453 - RNA, 1690 nt, Artificial Sequence
  mRNA product Design i-3 comprising derived and/or modified sequence from LASV(LASV003-NIG-2008;Clade II)__AIT17580__GPC (opt4)
gggagaaagcuuaccaugggccagaucaucaccuucuuccaggaggugccccacgugaucgaggaggugaugaacaucgugcugaucgcccugagccugcuggccauccugaagggcaucuacaacguggccaccugcggccuguucggccuggugagcuuccugcugcugugcggcagaagcugcagcaccaccuacaagggcguguacgagcugcagacccuggagcuggacauggccagccugaacaugaccaugccccugagcugcaccaagaacaacagccaccacuacaucauggugggcaacgagaccggccuggagcugacccugaccaacaccagcaucaucaaccacaaguucugcaaccugagcgacgcccacaagaagaaccuguacgaccacgcccugaugagcaucaucagcaccuuccaccugagcauccccaacuucaaccaguacgaggccaugagcugcgacuucaacggcggcaagaucagcgugcaguacaaccugagccacaccuacgccguggacgccgccaaccacugcggcaccaucgccaacggcgugcugcagaccuucaugagaauggccuggggcggcagcuacaucgcccuggacagcggcaagggcagcugggacugcaucaugaccagcuaccaguaccugaucauccagaacaccaccugggaggaccacugccaguucagcagacccagccccaucggcuaccugggccugcugagccagagaaccagagacaucuacaucagcagaagacugcugggcaccuucaccuggacccugagcgacagcgagagcaacgagacccccggcggcuacugccugaccagauggaugcugaucgaggccgagcugaagugcuucggcaacaccgccguggccaagugcaacgagaagcacgacgaggaguucugcgacaugcugagacuguucgacuucaacaagcaggccaucagaagacugaaggccgaggcccagaugagcauccagcugaucaacaaggccgugaacgcccugaucaacgaccagcugaucaugaagaaccaccugagagacaucaugggcauccccuacugcaacuacagcaaguacugguaccugaaccacaccgugaccggcagaaccagccugcccagaugcuggcuggugagcaacggcagcuaccugaacgagacccacuucagcgacgacaucgagcagcaggccgacaacaugaucaccgagcugcugcagaaggaguacauggacagacagggcaagaccccccugggccugguggaccuguucguguucagcaccagcuucuaccugaucagcaucuuccugcaccuggugaagauccccacccacagacacgugaucggcaagcccugccccaagccccacagacugaaccacaugggcaucugcagcugcggccuguacaagcaccccggcgugcccgugaaguggaagagaugaggacuaguuauaagacugacuagcccgaugggccucccaacgggcccuccuccccuccuugcaccgagauuaauaaaaaaaaaaaaaaaaaaaaaaaaaaaaaaaaaaaaaaaaaaaaaaaaaaaaaaaaaaaaaaaaugcaucccccccccccccccccccccccccccccccaaaggcucuuuucagagccaccagaauu

SEQ ID NO: 3454 - RNA, 1690 nt, Artificial Sequence
  mRNA product Design i-3 comprising derived and/or modified sequence from LASV(LASV035-NIG-2009;Clade II)__AIT17588__GPC (opt4)
gggagaaagcuuaccaugggccagaucaucaccuucuuccaggaggugccccacgugaucgaggaggugaugaacaucgugcugaucgcccugagccugcuggccauccugaagggcaucuacaacguggccaccugcggccuguucggccuggugagcuuccugcugcugugcggcagaagcugcagcaccaccuacaagggcguguacgagcugcagacccuggagcuggacauggccagccugaacaugaccaugccccugagcugcaccaagaacaacagccaccacuacaucauggugggcaacgagaccggccuggagcugacccugaccaacaccagcaucaucaaccacaaguucugcaaccugagcgacgcccacaagaagaaccuguacgaccacgcccugaugagcaucaucagcaccuuccaccugagcauccccaacuucaaccaguacgaggccaugagcugcgacuucaacggcggcaagaucagcgugcaguacaaccugagccacgccuacgccguggacgccgccaaccacugcggcaccaucgccaacggcgugcugcagaccuucaugagaauggccuggggcggcagcuacaucgcccuggacagcggcaagggcagcugggacugcaucaugaccagcuaccaguaccugaucauccagaacaccaccugggaggaccacugccaguucagcagacccagccccaucggcuaccugggccugcugagccagagaaccagagacaucuacaucagcagaagacugcugggcaccuucaccuggacccugagcgacagcgagggcaacgagacccccggcggcuacugccugaccagauggaugcugaucgaggccgagcugaagugcuucggcaacaccgccguggccaagugcaacgagaagcacgacgaggaguucugcgacaugcugagacuguucgacuucaacaagcaggccaucagaagacugaaggccgaggcccagaugagcauccagcugaucaacaaggccgugaacgcccugaucaacgaccagcugaucaugaagaaccaccugagagacaucaugggcauccccuacugcaacuacagcaaguacugguaccugaaccacaccgugaccggcaagaccagccugcccagaugcuggcuggugagcaacggcagcuaccugaacgagacccacuucagcgacgacaucgagcagcaggccgacaacaugaucaccgagcugcugcagaaggaguacaucgacagacagggcaagaccccccugggccugguggaccuguucguguucagcaccagcuucuaccugaucagcaucuuccugcaccuggugaagauccccacccacagacacgugaucggcaagcccugccccaagccccacagacugaaccacaugggcaucugcagcugcggccuguacaagcaccccggcgugcccgugaaguggaagagaugaggacuaguuauaagacugacuagcccgaugggccucccaacgggcccuccuccccuccuugcaccgagauuaauaaaaaaaaaaaaaaaaaaaaaaaaaaaaaaaaaaaaaaaaaaaaaaaaaaaaaaaaaaaaaaaaugcaucccccccccccccccccccccccccccccccaaaggcucuuuucagagccaccagaauu

SEQ ID NO: 3455 - RNA, 1690 nt, Artificial Sequence
  mRNA product Design i-3 comprising derived and/or modified sequence from LASV(LASV1000-NIG-2009;Clade II)__AIT17782__GPC (opt4)
gggagaaagcuuaccaugggccagaucaucaccuucuuccaggaggugccccacgugaucgaggaggugaugaacaucgugcugaucgcccugagccugcuggccauccugaagggcaucuacaacguggccaccugcggccuguucggccuggugagcuuccugcugcugugcggcagaagcugcagcaccaccuacaagggcguguacgagcugcagacccuggagcuggacauggccagccugaacaugaccaugccccugagcugcaccaagaacaacagccaccacuacaucauggugggcaacgagaccggccuggagcugacccugaccaacaccagcaucaucaaccacaaguucugcaaccugagcgacgcccacaagaagaaccuguacgaccacgcccugaugagcaucaucagcaccuuccaccugagcauccccaacuucaaccaguacgaggccaugagcugcgacuucaacggcggcaagaucagcgugcaguacaaccugagccacaccuacgccguggacgccgccaaccacugcggcaccaucgccaacggcgugcugcagaccuucaugagaauggccuggggcggcagcuacaucgcccuggacagcggcaagggcagcugggacugcaucaugaccagcuaccaguaccugaucauccagaacaccaccugggaggaccacugccaguucagcagacccagccccaucggcuaccugggccugcugagccagagaaccagagacaucuacaucagcagaagacugcugggcaccuucaccuggacccugagcgacagcgagggcaacgagacccccggcggcuacugccugaccagauggaugcugaucgaggccgagcugaagugcuucggcaacaccgccguggccaagugcaacgagaagcacgacgaggaguucugcgacaugcugagacuguucgacuucaacaagcaggccaucaagagacugaagaccgaggcccagaugagcauccagcugaucaacaaggccgugaacgcccugaucaacgaccagcugaucaugaagaaccaccugagagacaucaugggcauccccuacugcaacuacagcaaguacugguaccugaaccacaccgugaccggcaagaccagccugcccagaugcuggcuggugagcaacggcagcuaccugaacgagacccacuucagcgacgacaucgagcagcaggccgacaacaugaucaccgagcugcugcagaaggaguacaucgacagacagggcaagaccccccugggccugguggaccuguucguguucagcaccagcuucuaccugaucagcaucuuccugcaccuggugaagauccccacccacagacacguggugggcaagcccugccccaagccccacagacugaaccacaugggcaucugcagcugcggccuguacaagcaccccggcgugcccgugaaguggaagagaugaggacuaguuauaagacugacuagcccgaugggccucccaacgggcccuccuccccuccuugcaccgagauuaauaaaaaaaaaaaaaaaaaaaaaaaaaaaaaaaaaaaaaaaaaaaaaaaaaaaaaaaaaaaaaaaaugcaucccccccccccccccccccccccccccccccaaaggcucuuuucagagccaccagaauu

SEQ ID NO: 3456 - RNA, 1690 nt, Artificial Sequence
  mRNA product Design i-3 comprising derived and/or modified sequence from LASV(LASV221-NIG-2010;Clade II)__AIT17624__GPC (opt4)
gggagaaagcuuaccaugggccagaucaucaccuucuuccaggaggugccccacgugaucgaggaggugaugaacaucgugcugaucgcccugagccugcuggccauccugaagggcaucuacaacguggccaccugcggccuguucggccuggugagcuuccugcugcugugcggcagaagcugcagcaccaccuacaagggcguguacgagcugcagacccuggagcuggacauggccagccugaacaugaccaugccccugagcugcaccaagaacaacagccaccacuacaucauggugggcaacgagaccggccuggagcugacccugaccaacaccagcaucaucaaccacaaguucugcaaccugagcgacgcccacaagaagaaccuguacgaccacgcccugaugagcaucaucagcaccuuccaccugagcauccccaacuucaaccaguacgaggccaugagcugcgacuucaacggcggcaagaucagcgugcaguacaaccugagccacaccuacgccaucgacgccgccaaccacugcggcaccaucgccaacggcgugcugcagaccuucaugagaauggccuggggcggcagcuacaucgcccuggacagcggcaagggcagcugggacugcaucaugaccagcuaccaguaccugaucauccagaacaccaccugggaggaccacugccaguucagcagacccagccccaucggcuaccugggccugcugagccagagaaccagagacaucuacaucagcagaagacugcugggcaccuucaccuggacccugagcgacagcgagggcaacgagacccccggcggcuacugccugaccagauggaugcugaucgaggccgagcugaagugcuucggcaacaccgccguggccaagugcaacgagaagcacgacgaggaguucugcgacaugcugagacuguucgacuucaacaagcaggccaucagaagacugaagaccgaggcccagaugagcauccagcugaucaacaaggccgugaacgcccugaucaacgaccagcugaucaugaagaaccaccugagagacaucaugggcauccccuacugcaacuacagcaaguacugguaccugaaccacaccgugaccggcaagaccagccugcccagaugcuggcuggugagcaacggcagcuaccugaacgagacccacuucagcgacgacaucgagcagcaggccgacaacaugaucaccgagaugcugcagaaggaguacauggacagacagggcaagaccccccugggccugguggaccuguucguguucagcaccagcuucuaccugaucagcaucuuccugcaccuggugaagauccccacccacagacacgugaucggcaagcccugccccaagccccacagacugaaccacaugggcaucugcagcugcggccuguacaagcaccccggcgugcccgugaaguggaagagaugaggacuaguuauaagacugacuagcccgaugggccucccaacgggcccuccuccccuccuugcaccgagauuaauaaaaaaaaaaaaaaaaaaaaaaaaaaaaaaaaaaaaaaaaaaaaaaaaaaaaaaaaaaaaaaaaugcaucccccccccccccccccccccccccccccccaaaggcucuuuucagagccaccagaauu

SEQ ID NO: 3457 - RNA, 1690 nt, Artificial Sequence
  mRNA product Design i-3 comprising derived and/or modified sequence from LASV(LASV237-NIG-2010;Clade II)__AIT17638__GPC (opt4)
gggagaaagcuuaccaugggccagaucaucaccuucuuccaggaggugccccacgugaucgaggaggugaugaacaucgugcugaucgcccugagccugcuggccauccugaagggcaucuacaacguggccaccugcggccuguucggccuggugagcuuccugcugcugugcggcagaagcugcagcaccaccuacaagggcguguacgagcugcagacccuggagcuggacauggccagccugaacaugaccaugccccugagcugcaccaagaacaacagccaccacuacaucauggugggcaacgagaccggccuggagcugacccugaccaacaccagcaucaucaaccacaaguucugcaaccugagcgacgcccacaagaaggaccuguacgaccacgcccugaugagcaucaucagcaccuuccaccugagcauccccaacuucaaccaguacgaggccaugagcugcgacuucaacggcggcaagaucagcgugcaguacaaccugagccacaccuacgccguggacgccgccaaccacugcggcaccaucgccaacggcgugcugcagaccuucaugagaauggccuggggcggcagcuacaucgcccuggacagcggcaagggcagcugggacugcaucaugaccagcuaccaguaccugaucauccagaacaccaccugggaggaccacugccaguucagcagacccagccccaucggcuaccugggccugcugagccagagaaccagagacaucuacaucagcagaagacugcugggcaccuucaccuggacccugagcgacagcgagggcaacgagacccccggcggcuacugccugaccagauggaugcugaucgaggccgagcugaagugcuucggcaacaccgccguggccaagugcaacgagaagcacgacgaggaguucugcgacaugcugagacuguucgacuucaacaagcaggccaucagaagacugaagaccgaggcccagaugagcauccagcugaucaacaaggccgugaacgcccugaucaacgaccagcugaucaugaagaaccaccugagagacaucaugggcauccccuacugcaacuacagcaaguacugguaccugaaccacaccgugaccggcaagaccagccugcccagaugcuggcuggugagcaacggcagcuaccugaacgagacccacuucagcgacgacaucgagcagcaggccgacaacaugaucaccgagcugcugcagaaggaguacauggacagacagggcaagaccccccugggccugguggaccuguucguguucagcaccagcuucuaccugaucagcaucuuccugcaccugaucaagauccccacccacagacacaucaccggcaagcccugccccaagccccacagacugaaccacaugggcaucugcagcugcggccuguacaagcaccccggcgugcccgugaaguggaagagaugaggacuaguuauaagacugacuagcccgaugggccucccaacgggcccuccuccccuccuugcaccgagauuaauaaaaaaaaaaaaaaaaaaaaaaaaaaaaaaaaaaaaaaaaaaaaaaaaaaaaaaaaaaaaaaaaugcaucccccccccccccccccccccccccccccccaaaggcucuuuucagagccaccagaauu

SEQ ID NO: 3458 - RNA, 1690 nt, Artificial Sequence
  mRNA product Design i-3 comprising derived and/or modified sequence from LASV(LASV253-NIG-2011;Clade II)__AIT17670__GPC (opt4)
gggagaaagcuuaccaugggccagaucaucaccuucuuccaggaggugccccacgugaucgaggaggugaugaacaucgugcugaucgcccugagccugcuggccauccugaagggcaucuacaacguggccaccugcggccuguucggccuggugagcuuccugcugcugugcggcagaagcugcagcaccaccuacaagggcguguacgagcugcagacccuggagcuggacauggccagccugaacaugaccaugccccugagcugcaccaagaacaacagccaccacuacaucauggugggcaacgagaccggccuggagcugacccugaccaacaccagcaucaucaaccacaaguucugcaaccugagcgacgcccacaagaagaaccuguacgaccacgcccugaugagcaucaucagcaccuuccaccugagcauccccaacuucaaccaguacgaggccaugagcugcgacuucaacggcggcaagaucagcgugcaguacaaccugagccacaccuacgccguggacgccgccaaccacugcggcaccaucgccaacggcgugcugcagaccuucaugagaauggccuggggcggcagcuacaucgcccuggacagcggcaagggcagcugggacugcaucaugaccagcuaccaguaccugaucauccagaacaccaccugggaggaccacugccaguucagcagacccagccccaucggcuaccugggccugcugagccagagaaccagagacaucuacaucagcagaagacugcugggcaccuucaccuggacccugagcgacagcgagggcaacgagacccccggcggcuacugccugaccagauggaugcugaucgaggccgagcugaagugcuucggcaacaccgccguggccaagugcaacgagaagcacgacgaggaguucugcgacaugcugagacuguucgacuucaacaagcaggccaucagaagacugaaggccgaggcccagaugagcauccagcugaucaacaaggccgugaacgcccugaucaacgaccagcugaucaugaagaaccaccugagagacaucaugggcauccccuacugcaacuacagcaaguacugguaccugaaccacaccgugaccggcagaaccagccugcccagaugcuggcuggugagcaacggcagcuaccugaacgagacccacuucagcgacgacaucgagcagcaggccgacaacaugaucaccgagcugcugcagaaggaguacaucgacagacagggcaagaccccccugggccugguggaccuguucguguucagcaccagcuucuaccugaucagcaucuuccugcaccuggugaagauccccacccacagacacaucaucggcaagcccugccccaagccccacagacugaaccacaugggcaucugcagcugcggccuguacaagcaccccggcgugcccgugaaguggaagagaugaggacuaguuauaagacugacuagcccgaugggccucccaacgggcccuccuccccuccuugcaccgagauuaauaaaaaaaaaaaaaaaaaaaaaaaaaaaaaaaaaaaaaaaaaaaaaaaaaaaaaaaaaaaaaaaaugcaucccccccccccccccccccccccccccccccaaaggcucuuuucagagccaccagaauu

SEQ ID NO: 3459 - RNA, 1690 nt, Artificial Sequence
  mRNA product Design i-3 comprising derived and/or modified sequence from LASV(LASV254-NIG-2011;Clade II)__AIT17674__GPC (opt4)
gggagaaagcuuaccaugggccagaucaucaccuucuuccaggaggugccccacgugaucgaggaggugaugaacaucgugcugaucgcccugagccugcuggccauccugaagggcaucuacaacguggccaccugcggccuguucggccuggugagcuuccugcugcugugcggcagaagcugcagcaccaccuacaagggcguguacgagcugcagacccuggagcuggacaugaccaaccugaacaugaccaugccccugagcugcaccaagaacaacagccaccacuacaucauggugggcaacgagaccggccuggagcugacccugaccaacaccagcaucaucaaccacaaguucugcaaccugagcgacgcccacaagaagaaccuguacaaccacgcccugaugagcaucaucagcaccuuccaccugagcauccccaacuucaaccaguacgaggccaugagcugcgacuucaacggcggcaagaucagcgugcaguacaaccugagccacagcuacgccguggacgccgccaaccacugcggcaccaucgccaacggcgugcugcagaccuucaugagaauggccuggggcggcagcuacaucgcccuggacagcggcaagggcaacugggacugcaucaugaccagcuaccaguaccugaucauccagaacaccaccugggaggaccacugccaguucagcagacccagccccaucggcuaccugggccugcugagccagagaaccagagacaucuacaucagcagaagacugcugggcaccuucaccuggacccugagcgacagcgagggcaacgagacccccggcggcuacugccugaccagauggaugcugaucgaggccgagcugaagugcuucggcaacaccgccguggccaagugcaacgagaagcacgacgaggaguucugcgacaugcugagacuguucgacuucaacaagcaggccaucagaagacugaagaccgaggcccaggccaacauccagcugaucaacaaggccgugaacgcccugaucaacgaccagcugaucaugaagaaccaccugagagacaucaugggcauccccuacugcaacuacagcaaguacugguaccugaaccacaccgugaccggcaagaccagccugcccagaugcuggcuggugagcaacggcagcuaccugaacgagacccacuucagcgacgacaucgagcagcaggccgacaacaugaucaccgagcugcugcagaaggaguacauggacagacagggcaagaccccccugggccugguggaccuguucguguucagcaccagcuucuaccugaucagcaucuuccugcaccuggugaagauccccacccacagacacgugaucggcaagcccugccccaagccccacagacugaaccacaugggcaucugcagcugcggccuguacaagcaccccggcgugcccgugaaguggaagagaugaggacuaguuauaagacugacuagcccgaugggccucccaacgggcccuccuccccuccuugcaccgagauuaauaaaaaaaaaaaaaaaaaaaaaaaaaaaaaaaaaaaaaaaaaaaaaaaaaaaaaaaaaaaaaaaaugcaucccccccccccccccccccccccccccccccaaaggcucuuuucagagccaccagaauu

SEQ ID NO: 3460 - RNA, 1690 nt, Artificial Sequence
  mRNA product Design i-3 comprising derived and/or modified sequence from LASV(Nig08-A19;Clade III)__ADU56618__GPC (opt4)
gggagaaagcuuaccaugggccagaucgugaccuucuuccaggaggugccccacgugaucgaggaggugaugaacaucgugcugaucgcccugagcauccuggccauccugaagggccuguacaacaucgccaccugcggccugaucggccuggugaccuuccugcugcugagcggcagaagcugcagcaugaccuacaagggcguguacgagcugcagacccuggagcugaacaugaacacccugaacaugaccaugccccugagcugcaccaagaacaacagccaccacuacaucauggugggcaacgagaccggccuggagcugacccugaccaacaccagccugcugcaccacaaguucugcaaccugagcgacgcccacaagaagaaccuguacgaccacacccugaugagcaucaucagcaccuuccaccugagcauccccaacuucaaccaguacgaggccaugagcugcgacuucaacggcggcaagaucaccgugcaguacaaccugagccacagcuacgccaucgacgccgccaaccacugcggcaccguggccaacggcgugcugcagaccuucaugagaauggccuggggcggcagcuacaucgcccuggacagcggcagaggcaagugggacugcaucaugaccagcuaccaguaccugaucauccagaacaccaccugggaggaccacugccaguucagcagacccagccccaucggcuaccugggccugcugagccagagaaccagagacaucuacaucagcagaagacugcugggcaccuucaccuggacccugagcgacagcgagggcaacgagacccccggcggcuacugccugaccagauggaugcugaucgaggccgagcugaagugcuucggcaacaccgccguggccaagugcaacgagaagcacgacgaggaguucugcgacaugcugagacuguucgacuucaacaagcaggccaucagaagacugaaggccgaggcccagaugagcauccagcugaucaacaaggccgugaacgcccugaucaacgaccagcugaucaugaagaaccaccugagagacaucaugggcauccccuacugcaacuacagcaaguacugguaccugaaccacaccagcaccggcagaaccagccugcccagaugcuggcuggugagcaacggcagcuaccugaacgagacccacuucagcgacgacaucgagcagcaggccgacaacaugaucaccgagaugcugcagaaggaguaccuggacagacagggcaagaccccccugggccugguggaccuguucguguucagcaccagcuucuaccugaucagcaucuuccugcaccuggugaagauccccacccacagacacaucgugggcaagcccugccccaagccccacagacugaaccacaugggcaucugcagcugcggccuguacaagcagcccggcgugcccgugagauggaagagaugaggacuaguuauaagacugacuagcccgaugggccucccaacgggcccuccuccccuccuugcaccgagauuaauaaaaaaaaaaaaaaaaaaaaaaaaaaaaaaaaaaaaaaaaaaaaaaaaaaaaaaaaaaaaaaaaugcaucccccccccccccccccccccccccccccccaaaggcucuuuucagagccaccagaauu

SEQ ID NO: 3461 - RNA, 1693 nt, Artificial Sequence
  mRNA product Design i-3 comprising derived and/or modified sequence from LASV(G1180-SLE-2010;Clade IV)__AIT17168__GPC (opt4)
gggagaaagcuuaccaugggccagaucgugaccuucuuccaggaggugccccacgugaucgaggaggugaugaacaucgugcugaucgcccugagcauccuggccgugcugaagggccuguacaacuucgccaccugcggccuggugggccugcugaccuuccugcugcugugcggcagaagcugcaccgccagcagauacaagggcguguacgagcugcagacccuggagcugaacauggagacccugaacaugaccaugccccugagcugcaccaagaacaacagccaccacuacaucauggugggcaacgagaccggccuggagcugacccugaccaacaccagcaucaucaaccacaaguucugcaaccugagcgacgcccacaagaagaaccuguacgaccacgcccugaugagcaucaucagcaccuuccaccugagcauccccaacuucaaccaguacgaggccaugagcugcgacuucaacggcggcaagaucagcgugcaguacaaccugagccacagcuacgccggcgacgccgccaaccacugcggcaccguggccaacggcgugcugcagaccuucaugagaauggccuggggcggcagcuacaucgcccuggacagcggccacggcagcugggacugcaucaugaccagcuaccaguaccugaucauccagaacaccaccugggaggaccacugccaguucagcagacccagccccaucggcuaccugggccugcugagccagagaaccagagacaucuacaucagcagaagacugcugggcaccuucaccuggacccugagcgacagcgagggcaaggacacccccggcggcuacugccugaccagauggaugcugaucgaggccgagcugaagugcuucggcaacaccgccguggccaagugcaacgagaagcacgacgaggaguucugcgacaugcugagacuguucgacuucaacaagcaggccauccagagacugaaggccgaggcccagaugagcauccagcugaucaacaaggccgugaacgcccugaucaacgaccagcugaucaugaagaaccaccugagagacaucaugggcauccccuacugcaacuacagcaaguacugguaccugaaccacaccaccaccggcaagaccagccugcccaagugcuggcuggugagcaacggcagcuaccugaacgagacccacuucagcgacgacaucgagcagcaggccgacaacaugaucaccgagaugcugcagaaggaguacauggagagacagggcaagaccccccugggccugguggaccuguucguguucagcaccagcuucuaccugaucagcaucuuccugcaccuggugaagauccccacccacagacacaucgugggcaagagcugccccaagccccacagacugaaccacaugggcaucugcagcugcggccuguacaagcagcccggcgugcccgugaaguggaagagaugaggacuaguuauaagacugacuagcccgaugggccucccaacgggcccuccuccccuccuugcaccgagauuaauaaaaaaaaaaaaaaaaaaaaaaaaaaaaaaaaaaaaaaaaaaaaaaaaaaaaaaaaaaaaaaaaugcaucccccccccccccccccccccccccccccccaaaggcucuuuucagagccaccagaauu

SEQ ID NO: 3462 - RNA, 1693 nt, Artificial Sequence
  mRNA product Design i-3 comprising derived and/or modified sequence from LASV(G1442-SLE-2011;Clade IV)__AIT17180__GPC (opt4)
gggagaaagcuuaccaugggccagaucgugaccuucuuccaggaggugccccacgugaucgaggaggugaugaacaucgugcugaucgcccugagcauccuggccgugcugaagggccuguacaacguggccaccugcggccugaucggccuggugaccuuccugcugcugugcggcagaagcugcaccaccacccuguacaagggcguguacgagcugcagacccuggagcugaacauggagacccugaacaugaccaugccccugagcugcaccaagaacaacagccaccacuacaucagagugggcaacgagaccggccuggagcugacccugaccaacaccagcaucaucaaccacaaguucugcaaccugagcgacgcccacaagaagaaccuguacgaccacgcccugaugagcaucaucagcaccuuccaccugagcauccccaacuucaaccaguacgaggccaugagcugcgacuucaacggcggcaagaucagcgugcaguacaaccugagccacagcuacgccggcgacgccgccaaccacugcggcaccguggccaacggcgugcugcagaccuucaugagaauggccuggggcggcagcuacaucgcccuggacagcggcagaggcaacugggacugcaucaugaccagcuaccaguaccugaucauccagaacaccaccugggacgaccacugccaguucagcagacccagccccaucggcuaccugggccugcugagccagagaaccagagacguguacaucagcagaagacugcugggcaccuucaccuggacccugagcgacagcgagggcaaggacacccccggcggcuacugccugaccagauggaugcugaucgaggccgagcugaagugcuucggcaacaccgccguggccaagugcaacgagaagcacgacgaggaguucugcgacaugcugagacuguucgacuucaacaagcaggccauccagagacugaaggccgaggcccagaugagcauccagcugaucaacaaggccgugaacgcccugaucaacgaccagcugaucaugaagaaccaccugagagacaucaugggcauccccuacugcaacuacagcaaguacugguaccugaacaacaccgccaccggcaagaccagccugcccaagugcuggcugaucagcaacggcagcuaccugaacgagacccacuucagcgacgacaucgagcaggaggccgacaacaugaucaccgagaugcugcagaaggaguacauggagagacagggcaagaccccccugggccugguggaccuguucguguucagcaccagcuucuaccugaucagcaucuuccugcaccuggugaagauccccacccacagacacaucgugggcaagagcugccccaagccccacagacugaaccacaugggcaucugcagcugcggccuguacaagcagcccggcgugcccgugagauggaagagaugaggacuaguuauaagacugacuagcccgaugggccucccaacgggcccuccuccccuccuugcaccgagauuaauaaaaaaaaaaaaaaaaaaaaaaaaaaaaaaaaaaaaaaaaaaaaaaaaaaaaaaaaaaaaaaaaugcaucccccccccccccccccccccccccccccccaaaggcucuuuucagagccaccagaauu

SEQ ID NO: 3463 - RNA, 1693 nt, Artificial Sequence
  mRNA product Design i-3 comprising derived and/or modified sequence from LASV(G3010-SLE-2013;Clade IV)__AIT17344__GPC (opt4)
gggagaaagcuuaccaugggccagaucgugaccuucuuccaggaggugccccacgugaucgaggaggugaugaacaucgugcugaucgcccugagcauccuggccgugcugaagggccuguacaacuucgccaccugcggccuggugggccuggugaccuuccugcugcugugcggcagaagcugcaccaccagccuguacaagggcguguacgagcugcagacccuggagcugaacauggagacccugaacaugaccaugccccugagcugcaccaagaacaacagccaccacuacaucauggugggcaacgagaccggccuggagcugacccugaccaacaccagcaucaucaaccacaaguucugcaaccugagcgacgcccacaagaagaaccuguacaaccacgcccugaugagcaucaucagcaccuuccaccugagcauccccaacuucaaccaguacgaggccaugagcugcgacuucaacggcggcaagaucagcgugcaguacaaccugagccacagcuacgccggcgacgccgccagccacugcggcaccguggccaacggcgugcugcagaccuucaugagaauggccuggggcggcagcuacaucgcccuggacagcggcuacggcaagugggacugcaucaugaccagcuaccaguaccugaucauccagaacaccaccugggaggaccacugccaguucagcagacccagccccaucggcuaccugggccugcugagccagagaaccagagacaucuacaucagcagaagacugcugggcaccuucaccuggacccugagcgacagcgagggcaaggacacccccggcggcuacugccugaccagauggaugcugaucgaggccgagcugaagugcuucggcaacaccgccguggccaagugcaacgagaagcacgacgaggaguucugcgacaugcugagacuguucgacuucaacaagcaggccauccagagacugaagaccgaggcccagaugagcauccagcugaucaacaaggccgugaacgcccugaucaacgaccagcugaucaugaagaaccaccugagagacaucaugggcauccccuacugcaacuacagcaaguacugguaccugaaccacaccaccaccggcaagaccagccugcccaagugcuggcuggugagcaacggcagcuaccugaacgagacccacuucagcgacgacaucgagcagcaggccgacaacaugaucaccgagaugcugcagaaggaguacauggagagacagggcaagaccccccugggccugguggaccuguucguguucagcaccagcuucuaccugaucagcaucuuccugcaccuggugaagauccccacccacagacacaucgugggcaagagcugccccaagccccacagacugaaccacaugggcaucugcagcugcggccuguacaagcagcccggcgugcccgugagauggaagagaugaggacuaguuauaagacugacuagcccgaugggccucccaacgggcccuccuccccuccuugcaccgagauuaauaaaaaaaaaaaaaaaaaaaaaaaaaaaaaaaaaaaaaaaaaaaaaaaaaaaaaaaaaaaaaaaaugcaucccccccccccccccccccccccccccccccaaaggcucuuuucagagccaccagaauu

SEQ ID NO: 3464 - RNA, 1693 nt, Artificial Sequence
  mRNA product Design i-3 comprising derived and/or modified sequence from LASV(G502-SLE-2009;Clade IV)__AIT17126__GPC (opt4)
gggagaaagcuuaccaugggccagaucgugaccuucuuccaggaggugccccacgugaucgaggaggugaugaacaucgugcugaucgcccugagcauccuggccgugcugaagggccuguacaacuucgccaccugcggccuggugggccugcugaccuuccugcugcugugcggcagaagcugcaccaccggccuguacaagggcguguacgagcugcagacccuggagcugaacauggagacccugaacaugaccaugccccugagcugcaccaagaacaacagccaccacuacaucauggugggcaacgagaccggccuggagcugacccugaccaacaccagcaucaucaaccacaaguucugcaaccugagcgacgcccacaagaagaaccuguacgaccacgcccugaugagcaucaucagcaccuuccaccugagcauccccaacuucaaccaguacgaggccaugagcugcgacuucaacggcggcaagaucagcgugcaguacaaccugagccacagcuacgccggcgacgccgccgaccacugcggcaccguggccaacggcgugcugcagaccuucaugagaauggccuggggcggcagcuacaucgcccuggacagcggcagaggcagaugggacugcaucaugaccagcuaccaguaccugaucauccagaacaccaccugggaggaccacugccaguucagcagacccagccccaucggcuaccugggccugcugagccagagaaccagagacaucuacaucagcagaagacugcugggcaccuucaccuggacccugagcgacagcgagggcaaggacacccccggcggcuacugccugaccagauggaugcugaucgaggccgagcugaagugcuucggcaacaccgccguggccaagugcaacgagaagcacgacgaggaguucugcgacaugcugagacuguucgacuucaacaagcaggccauccagagacugaaggccgaggcccagaugagcauccagcugaucaacaaggccgugaacgcccugaucaacgaccagcuggugaugaagaaccaccugagagacaucaugggcauccccuacugcaacuacagcagauacugguaccugaaccacaccaccaccggcagaaccagccugcccaagugcuggcuggugagcaacggcagcuaccugaacgagacccacuucagcgacgacaucgagcagcaggccgacaacaugaucaccgagaugcugcagaaggaguacauggagagacagggcaagaccccccugggccugguggaccuguucguguucagcaccagcuucuaccugaucagcaucuuccugcaccuggugaagauccccacccacagacacaucgugggcaagagcugccccaagccccacagacugaaccacaugggcaucugcagcugcggccuguacaagcagcccggcgugcccgugaaguggaagagaugaggacuaguuauaagacugacuagcccgaugggccucccaacgggcccuccuccccuccuugcaccgagauuaauaaaaaaaaaaaaaaaaaaaaaaaaaaaaaaaaaaaaaaaaaaaaaaaaaaaaaaaaaaaaaaaaugcaucccccccccccccccccccccccccccccccaaaggcucuuuucagagccaccagaauu

SEQ ID NO: 3465 - RNA, 1693 nt, Artificial Sequence
  mRNA product Design i-3 comprising derived and/or modified sequence from LASV(G733-SLE-2010;Clade IV)__AIT17154__GPC (opt4)
gggagaaagcuuaccaugggccagaucgugaccuucuuccaggaggugccccacgugaucgaggaggugaugaacaucgugcugaucgcccugagcauccuggccgugcugaagggccuguacaacuucgccaccugcggcaucgugggccuggugagcuuccugcugcugugcggcagaagcugcaccaccagccuguacaagggcguguacgagcugcagacccuggagcugaacauggagacccugaacaugaccaugccccugagcugcaccaagaacaacagccaccacuacaucauggugggcaacgagaccggccuggagcugacccugaccaacaccagcaucaucaaccacaaguucugcaaccugagcgacgcccacaagaagaaccuguacgaccacgcccugaugagcaucaucagcaccuuccaccugagcauccccaacuucaaccaguacgaggccaugagcugcgacuucaacggcggcaagaucagcgugcaguacaaccugagccacagcuacgccggcgacgccgccaaccacugcggcaccaucgccaacggcgugcugcagaccuucaugagaauggccuggggcggcagcuacaucgcccuggacagcggcagagacagaugggacugcaucaugaccagcuaccaguaccugaucauccagaacaccaccugggaggaccacugccaguucagcagacccagccccaucggcuaccugggccugcugagccagagaaccagagacaucuacaucagcagaagacugcugggcaccuucaccuggacccugagcgacagcgagggcaaggacacccccggcggcuacugccugaccagauggaugcugaucgaggccgagcugaagugcuucggcaacaccgccguggccaagugcaacgagaagcacgacgaggaguucugcgacaugcugagacuguucgacuucaacaagcaggccauccagagacugaaggccgaggcccagaugagcauccagcugaucaacaaggccgugaacgcccugaucaacgaccagcugaucaugaagaaccaccugagagacaucaugggcauccccuacugcaacuacagcaaguacugguaccugaaccacaccaccaccggcaagaccagccugcccaagugcuggcuggugagcaacggcagcuaccugaacgagacccacuucagcgacgacaucgagcagcaggccgacaacaugaucaccgagaugcugcagaaggaguacauggagagacagggcaagaccccccugggccugguggaccuguucguguucagcaccagcuucuaccugaucagcaucuuccugcaccuggugaagauccccacccacagacacguggugggcaagagcugccccaagccccacagacugaaccacaugggcaucugcagcugcggccuguacggccagcccggcgugcccgugaaguggaagagaugaggacuaguuauaagacugacuagcccgaugggccucccaacgggcccuccuccccuccuugcaccgagauuaauaaaaaaaaaaaaaaaaaaaaaaaaaaaaaaaaaaaaaaaaaaaaaaaaaaaaaaaaaaaaaaaaugcaucccccccccccccccccccccccccccccccaaaggcucuuuucagagccaccagaauu

SEQ ID NO: 3466 - RNA, 1693 nt, Artificial Sequence
  mRNA product Design i-3 comprising derived and/or modified sequence from MOPV/LASV reassortant(IGS-1;Clade IV)__AFY05576__GPC (opt4)
gggagaaagcuuaccaugggccagaucgugaccuucuuccaggaggugccccacgugaucgaggaggugaugaacaucgugcugaucgcccugagcgugcuggccgugcugaagggccuguacaacuucgccaccugcggccuggugggccuggugaccuuccugcugcugugcggcagaagcugcaccaccagccuguacaagggcguguacgagcugcagacccuggagcugaacauggagacccugaacaugaccaugccccugagcugcaccaagaacaacagccaccacuacaucauggugggcaacgagaccggccuggagcugacccugaccaacaccagcaucaucaaccacaaguucugcaaccugagcgacgcccacaagaagaaccuguacgaccacgcccugaugagcaucaucagcaccuuccaccugagcauccccaacuucaaccaguacgaggccaugagcugcgacuucaacggcggcaagaucagcgugcaguacaaccugagccacagcuacgccggcgacgccgccaaccacugcggcaccguggccaacggcgugcugcagaccuucaugagaauggccuggggcggcagcuacaucgcccuggacagcggcagaggcaacugggacugcaucaugaccagcuaccaguaccugaucauccagaacaccaccugggaggaccacugccaguucagcagacccagccccaucggcuaccugggccugcugagccagagaaccagagacaucuacaucagcagaagacugcugggcaccuucaccuggacccugagcgacagcgagggcgaggacacccccggcggcuacugccugaccagauggaugcugaucgaggccgagcugaagugcuucggcaacaccgccguggccaagugcaacgagaagcacgacgaggaguucugcgacaugcugagacuguucgacuucaacaagcaggccauccagagacugaaggccgaggcccagaugagcauccagcugaucaacaaggccgugaacgcccugaucaacgaccagcugaucaugaagaaccaccugagagacaucaugggcauccccuacugcaacuacagcaaguacugguaccugaaccacaccaccaccggcagaaccagccugcccaagugcuggcuggugagcaacggcagcuaccugaacgagacccacuucagcgacgacaucgagcagcaggccgacaacaugaucaccgagaugcugcagaaggaguacauggagagacagggcaagaccccccugggccugguggaccuguucguguucagcaccagcuucuaccugaucagcaucuuccugcaccuggugaagauccccacccacagacacaucgugggcaagagcugccccaagccccacagacugaaccacaugggcaucugcagcugcggccuguacaagcagcccggcgugcccgugaaguggaagagaugaggacuaguuauaagacugacuagcccgaugggccucccaacgggcccuccuccccuccuugcaccgagauuaauaaaaaaaaaaaaaaaaaaaaaaaaaaaaaaaaaaaaaaaaaaaaaaaaaaaaaaaaaaaaaaaaugcaucccccccccccccccccccccccccccccccaaaggcucuuuucagagccaccagaauu

SEQ ID NO: 3467 - RNA, 1693 nt, Artificial Sequence
  mRNA product Design i-3 comprising derived and/or modified sequence from LASV(LM765-SLE-2012;Clade IV)__AIT17814__GPC (opt4)
gggagaaagcuuaccaugggccagaucgugaccuucuuccaggaggugccccacgugaucgaggaggugaugaacaucgugcugaucgcccugagcauccuggccgugcugaagggccuguacaacuucgccaccugcggccuggugggccuggugaccuuccugcugcugugcggcagaagcugcaccaccagccuguacaagggcguguacgagcugcagacccuggagcugaacauggagacccugaacaugaccaugccccugagcugcaccaagaacaacagccaccacuacaucauggugggcaacgagaccggccuggagcugacccugaccaacaccagcaucaucgaccacaaguucugcaaccugagcgacgcccacagaaagaaccuguacgaccacgcccugaugagcaucaucagcaccuuccaccugagcauccccaacuucaaccaguacgaggccaugagcugcgacuucaacggcggcaagaucagcgugcaguacaaccugagccacagcuacgccaaggacgccgccgaccacugcggcaccguggccaacggcgugcugcagaccuucaugagaauggccuggggcggcagcuacaucgcccuggacagcggcagaggcagaugggacugcaucaugaccagcuaccaguaccugaucauccagaacaccaccugggaggaccacugccaguucagcagacccagccccaucggcuaccugggccugcugagccagagaaccagagacaucuacaucagcagaagacugcugggcaccuucaccuggacccugagcgacagcgagggcaaggacacccccggcggcuacugccugaccagauggaugcugaucgaggccgagcugaagugcuucggcaacaccgccguggccaagugcaacgagaagcacgacgaggaguucugcgacaugcugagacuguucgacuucaacaagcaggccauccagagacugaaggccgaggcccagaugagcauccagcugaucaacaaggccgugaacgcccugaucaacgaccagcugaucaugaagaaccaccugagagacaucaugggcauccccuacugcaacuacagcaaguacugguaccugaaccacaccaccaccggcaagaccagccugcccaagugcuggcuggugagcaacggcagcuaccugaacgagacccacuucagcgacgacaucgagcagcaggccgacaacaugaucaccgagaugcugcagaaggaguacauggagagacagggcaagaccccccugggccugguggaccuguucguguucagcaccagcuucuaccugaucagcaucuuccugcaccuggugaagauccccacccacagacacaucgugggcaagcccugccccaagccccacagacugaaccacaugggcaucugcagcugcggccuguacaagcagcccggcgugcccgugaaguggaagagaugaggacuaguuauaagacugacuagcccgaugggccucccaacgggcccuccuccccuccuugcaccgagauuaauaaaaaaaaaaaaaaaaaaaaaaaaaaaaaaaaaaaaaaaaaaaaaaaaaaaaaaaaaaaaaaaaugcaucccccccccccccccccccccccccccccccaaaggcucuuuucagagccaccagaauu

SEQ ID NO: 3468 - RNA, 1693 nt, Artificial Sequence
  mRNA product Design i-3 comprising derived and/or modified sequence from LASV(LM776-SLE-2012;Clade IV)__AIT17824__GPC (opt4)
gggagaaagcuuaccaugggccagaucgugaccuucuuccaggaggugccccacgugaucgaggaggugaugaacaucgugcugaucgcccugagcauccuggccgugcugaagggccuguacaacuucgccaccugcggccuggugggccuggugaccuuccugcugcugugcggcagaagcugcaccaccagcguguacaagggcguguacgagcugcagacccuggagcugaacauggagacccugaacaugaccaugccccugagcugcaccaagaacaacagccaccacuacaucauggugggcaacgagaccggccuggagcugacccugaccaacaccagcaucaucaaccacaaguucugcaaccugagcgacgcccacaagaagaaccuguacgaccacgcccugaugagcaucaucagcaccuuccaccugagcauccccaacuucaaccaguacgaggccaugagcugcgacuucaacggcggcaagaucagcgugcaguacaaccugagccacagcuacgccggcgacgccgccaaccacugcggcaccguggccaacggcgugcugcagaccuucaugagaauggccuggggcggcagcuacaucgcccuggacagcggccacggcaagugggacugcaucaugaccagcuaccaguaccugaucauccagaacaccaccugggaggaccacugccaguucagcagacccagccccaucggcuaccugggccugcugagccagagaaccagagacaucuacaucagcagaagacugcugggcaccuucaccuggacccugagcgacagcgagggcaaggacacccccggcggcuacugccugaccagauggaugcugaucgaggccgagcugaagugcuucggcaacaccgccguggccaagugcaacgagaagcacgacgaggaguucugcgacaugcugagacuguucgacuucaacaagcaggccauccagagacugaaggccgaggcccagaugagcauccagcugaucaacaaggccgugaacgcccugaucaacgaccagcugaucaugaagaaccaccugagagacaucaugggcauccccuacugcaacuacagcaaguacugguaccugaaccacaccaccaccggcaagaccagccugcccaagugcuggcuggugagcaacggcagcuaccugaacgagacccacuucagcgacgacaucgagcagcaggccgacaacaugaucaccgagaugcugcagaaggaguacauggagagacagggcaagaccccccugggccugguggaccuguucguguucagcaccagcuucuaccugaucagcaucuuccugcaccuggugaagauccccacccacagacacaucgugggcaagagcugccccaagccccacagacugaaccacaugggcaucugcagcugcggccuguacaagcagcccggcgugcccgugagauggaagagaugaggacuaguuauaagacugacuagcccgaugggccucccaacgggcccuccuccccuccuugcaccgagauuaauaaaaaaaaaaaaaaaaaaaaaaaaaaaaaaaaaaaaaaaaaaaaaaaaaaaaaaaaaaaaaaaaugcaucccccccccccccccccccccccccccccccaaaggcucuuuucagagccaccagaauu

SEQ ID NO: 3469 - RNA, 1693 nt, Artificial Sequence
  mRNA product Design i-3 comprising derived and/or modified sequence from LASV(Mad39;Clade IV)__ANH09722__GPC (opt4)
gggagaaagcuuaccaugggccagaucgugaccuucuuccaggaggugccccacgugaucgaggaggugaugaacaucgugcugaucgcccugagcauccuggccgugcugaagggccuguacaacguggccaccugcggccugaucggccuggugaccuuccugcugcugugcggcagaagcugcaccaccacccuguacaagggcguguacgagcugcaggcccuggagcugaacauggagacccugaacaugaccaugccccugagcugcaccaagaacaacagccaccacuacaucagagugggcaacgagaccggccuggagcugacccugaccaacaccagccugaucaaccacaaguucugcaaccugagcgacgcccacaagaagaaccuguacgaccacgcccugaugagcaucaucagcaccuuccaccugagcauccccaacuucaaccaguacgaggccaugagcugcgacuucaacgacggcaagaucagcgugcaguacaaccugagccacaccuacgccggcgacaccgccaaccacugcggcaccguggccaacggcgugcugcagaccuucaugagaauggccuggggcggcagcuacaucgcccuggacagcggcagaggcggcugggacugcaucaugaccagcuaccaguaccugaucauccagaacaccaccugggaggaccacugccaguucagcagacccagccccaucggcuaccugggccugcugagccagagaaccagagacaucuacaucagcagaagacugcugggcaccuucaccuggacccugagcgacagcgagggcaaggacacccccggcggcuacugccugaccagauggaugcugaucgaggccgagcugaagugcuucggcaacaccgccguggccaagugcaacgagaagcacgacgaggaguucugcgacaugcugagacuguucgacuucaacaagcaggccauccagagacugaaggccgaggcccagaugagcauccagcugaucaacaaggccgugaacgcccugaucaacgaccagcugaucaugaagaaccaccugagagacaucaugggcauccccuacugcaacuacagcaaguacugguaccugaaccacaccgugaccggcaagaccagccugcccaagugcuggcuggugagcaacggcagcuaccugaacgagacccacuucagcgacgacaucgagcagcaggccgacaacaugaucaccgagaugcugcagaaggaguacauggagagacagggcaagaccccccugggccugguggaccuguucguguucagcaccagcuucuaccugaucagcaucuuccugcaccuggugaagauccccacccacagacacguggugggcaagcccugccccaagccccacagacugaaccacaugggcaucugcagcugcggcuucuacaagcagcccggcgugcccgugagauggaagagaugaggacuaguuauaagacugacuagcccgaugggccucccaacgggcccuccuccccuccuugcaccgagauuaauaaaaaaaaaaaaaaaaaaaaaaaaaaaaaaaaaaaaaaaaaaaaaaaaaaaaaaaaaaaaaaaaugcaucccccccccccccccccccccccccccccccaaaggcucuuuucagagccaccagaauu

SEQ ID NO: 3470 - RNA, 1693 nt, Artificial Sequence
  mRNA product Design i-3 comprising derived and/or modified sequence from LASV(Z0947-SLE-2011;Clade IV)__AIT17840__GPC (opt4)
gggagaaagcuuaccaugggccagaucgugaccuucuuccaggaggugccccacgugaucgaggaggugaugaacaucgugcugaucgcccugagcauccuggccgugcugaagggccuguacaacuucgccaccugcggccuggugggccuggugaccuuccugcugcugugcggcagaagcugcaccaucagccuguacaagggcguguacgagcugcagacccuggagcugaacauggagacccugaacaugaccaugccccugagcugcaccaagaacaacagccaccacuacaucauggugggcaacgagaccggccuggagcugacccugaccaacaccagcaucaucaaccacaaguucugcaaccugagcgacgcccacaagaagaaccuguacgaccacgcccugaugagcaucaucagcaccuuccaccugagcauccccaacuucaaccaguacgaggccaugagcugcgacuucaacggcggcaagaucagcgugcaguacaaccugagccacagcuacgccggcgacgccgccaaccacugcggcaccguggccaacggcgugcugcagaccuucaugagaauggccuggggcggcagcuacaucgcccuggacagcggcagagacagaugggacugcaucaugaccagcuaccaguaccugaucauccagaacaccaccugggaggaccacugccaguucagcagacccagccccaucggcuaccugggccugcugagccagagaaccagagacaucuacaucagcagaagacugcugggcaccuucaccuggacccugagcgacagcgagggcaaggacacccccggcggcuacugccugaccagauggaugcugaucgaggccgagcugaagugcuucggcaacaccgccguggccaagugcaacgagaagcacgacgaggaguucugcgacaugcugagacuguucgacuucaacaagcaggccauccagagacugaaggccgaggcccagaugagcauccagcugaucaacaaggccgugaacgcccugaucaacgaccagcugaucaugaagaaccaccugagagacaucaugggcauccccuacugcaacuacagcaaguacugguaccugaaccacaccaccaccggcaagaccagccugcccaagugcuggcuggugagcaacggcagcuaccugaacgagacccacuucagcgacgacaucgagcagcaggccgacaacaugaucaccgagaugcugcagaaggaguacauggagagacagggcaagaccccccugggccugguggaccuguucguguucagcaccagcuucuaccugaucagcaucuuccugcaccuggugaagauccccacccacagacacaucgugggcaagcccugccccaagccccacagacugaaccacaugggcaucugcagcugcggccuguacaagcagcccggcgugcccgugaaguggaagagaugaggacuaguuauaagacugacuagcccgaugggccucccaacgggcccuccuccccuccuugcaccgagauuaauaaaaaaaaaaaaaaaaaaaaaaaaaaaaaaaaaaaaaaaaaaaaaaaaaaaaaaaaaaaaaaaaugcaucccccccccccccccccccccccccccccccaaaggcucuuuucagagccaccagaauu

SEQ ID NO: 3471 - RNA, 1693 nt, Artificial Sequence
  mRNA product Design i-3 comprising derived and/or modified sequence from LASV(Josiah;Clade IV)__NP_694870__GPC (opt5)
gggagaaagcuuaccaugggccagaucgugaccuucuuucaagaggucccccacguuauugaagaggugaugaacaucgugcugauugcccucagcguccuggcugugcuuaaggggcuguacaauuucgccacaugcggacucguuggccuggugacguuucuucugcucugugggagauccugcaccacaucucuguauaaaggagucuacgaacugcagacccucgagcugaacauggaaacacuuaauaugaccaugccucugagcuguacaaagaacaauucccaucacuauaucauggugggcaacgagaccgggcucgagcugacgcuuaccaauacaucuauuaucaaccauaaauucugcaaucugagcgacgcgcacaagaaaaaccucuacgaucaugcucugauguccaucauuucuaccuuucaccugagcaucccgaauuucaaccaguaugaagccauguccugugacuuuaauggaggcaagauuagcguucaguacaaccucucucacuccuaugccggcgaugcugccaaucauugcgggacaguggcuaacggaguccugcaaaccuucaugcggauggccuggggcgggagcuacaucgcgcuugacucuggacgcggcaacugggauuguauuaugacguccuaccaguaucugaucauucagaauacaaccugggaggaccacugccaguuuagcagacccucuccuaucggguaccucggacugcuuucccaacggacacgcgauaucuauauuagcagacggcugcucggcaccuucaccuggacacuguccgacucugaaggcaaggauacgcccgggggauacugucugacccgcuggaugcucaucgaggccgagcugaaaugcuuuggcaacacagcuguggccaaguguaaugaaaaacaugacgaggaguucugcgauaugcuuagacuguuugacuucaacaagcaggcuauucagcggcucaaagccgaagcgcagaugagcauccaacugauuaauaaggccgugaacgcucuuaucaaugaucagcugaucaugaagaaccaccuccgcgacauuauggggaucccuuauugcaauuacuccaaauauugguaccugaaccacaccacaaccggaagaacgagccugcccaaguguuggcucgucucuaauggcuccuaccugaacgaaacacauuucagcgacgauauugagcagcaagccgacaauaugaucaccgagaugcuucagaaagaauauauggagcggcaggggaagaccccucugggacucguugaucuguuuguguucucuaccagcuuuuaccugauuuccaucuuccuucaccucgugaaaaucccgacacaucgccacauugucggcaagucuugccccaaaccucauagacugaaccacaugggcaucuguagcugcgggcuguauaagcagcccggagugccuguuaaguggaaacggugaggacuaguuauaagacugacuagcccgaugggccucccaacgggcccuccuccccuccuugcaccgagauuaauaaaaaaaaaaaaaaaaaaaaaaaaaaaaaaaaaaaaaaaaaaaaaaaaaaaaaaaaaaaaaaaaugcaucccccccccccccccccccccccccccccccaaaggcucuuuucagagccaccagaauu

SEQ ID NO: 3472 - RNA, 1690 nt, Artificial Sequence
  mRNA product Design i-3 comprising derived and/or modified sequence from LASV(LP;Clade I)__AAF86701__GPC (opt5)
gggagaaagcuuaccaugggccagaucauuaccuucuuucaagaggugccccacgucaucgaagagguuaugaacauugugcugaucgcccucagccugcuugcuauucugaaggggcucuacaauaucgccacaugcggaaucauuggccugguggcguuccuuuuucugugugggaaauccugcucucucacgcugaagggaggcuaugaacugcagacccucgagcugaacauggaaacacuuaauaugaccaugccucugagcuguaccaaaaacuccucucaucacuacaucagagucgggaaugagacaggacucgagcugacacuuaccaacacgagcauuaucaaucauaaguucugcaaccuguccgacgcucacaaaaagaaucucuaugaucaugcccugaugucuauuaucagcaccuuucaccuguccauuccgaacuucaaucaguacgaagccaugagcugugacuuuaacggcggcaagaucucugugcaguauaaucucucccacagcuacgcuggggaugccgcugagcauugcggaacaguugccaacggcgugcugcaaaccuucaugcggauggcguggggagggcgcuauaucgcccuugacucuggcaaagggaauugggauuguauuaugacauccuaccaguaccugaucauucagaacaccacgugggaagaccacugccaguuuagcagacccucuccuaucggauaucucggccugcuuucccaacggacacgcgauauuuacaucagcagacggcugcucggcaccuucacauggacccuguccgacucugaggggaacgagacccccggaggcuauugucugacacgcuggaugcucaucgaagcugagcugaagugcuuugggaauacggccgucgcuaaauguaacgaaaagcaugaugaggaguucugcgacaugcuuagacuguuugauuucaauaaacaggccauucggcgccucaaggcggaagcccagaugagcauccagcugauuaacaaggcugugaaugcccuuaucaacgaccaacugauuaugaaaaaucaccucagagauaucaugggaaucccuuacugcaacuauuccaaguacugguaucugaaucacaccagcucuggccggacaucccugcccaaauguuggcucauuagcaacgggucuuaccugaaugagacccaguucagcgacgacaucgaacagcaagcugauaacaugauuacagagaugcuucagaaggaauacaucgagcgccagggaaaaaccccucugggccucguugacauuuuuaucuucuccacgucuuuuuaucugauuagcaucuuccugcaucuuaucaagauuccgacacacagacauaucgugggcaaacccugcccuaagccccaccggcucaaucauaugggggucuguuccugcggacuguacaagcacccuggcgugcccaccaaauggaagcgcugaggacuaguuauaagacugacuagcccgaugggccucccaacgggcccuccuccccuccuugcaccgagauuaauaaaaaaaaaaaaaaaaaaaaaaaaaaaaaaaaaaaaaaaaaaaaaaaaaaaaaaaaaaaaaaaaugcaucccccccccccccccccccccccccccccccaaaggcucuuuucagagccaccagaauu

SEQ ID NO: 3473 - RNA, 1690 nt, Artificial Sequence
  mRNA product Design i-3 comprising derived and/or modified sequence from LASV(803213;Clade II)__AAF86703__GPC (opt5)
gggagaaagcuuaccaugggccagaucauuaccuucuuucaagaggugccccacgucaucgaagagguuaugaacauugugcugaucgcccucagccugcuugcuauucugaaggggaucuacaauguggccacaugcggacucuucggccugaucuccuuucuucugcucugugggagaucuugcagcgucacguauaaaggaguguacgaacugcagacccuggagcucaacauggcgaaucugaacaugacaaugccucuuuccuguaccaagaauaacucucaucacuauauuaugguuggcaaugaaacagggcuggagcucacccugacaaacaccagcaucauuaaucauaaauucugcaaccuuuccgacgcucacaagaaaaaucuguacgaucaugcccucaugucuaucauuagcacguuucaccuguccaucccgaacuucaaucaguaugaggccaugagcugugacuuuaacggaggcaagauuucugugcaguacaaucugucccacagcuucgcugucgaugccgcuaaccauugcggcaccaucgccaacggggugcuccaaacauuuaugcggauggcguggggaggcucuuauaucgcccuggacuccgggaagggaaauugggauuguauuaugaccagcuaccaguaccuuaucauucagaacacaaccugggaagaccacugccaguucucucgccccuccccuaucggcuaucuggggcuccugagccaaagaacgcgggauauuuacaucucccgcagacuucugggaacauuuaccuggacacucucugacagcgagggcaaugaagcucccggcggguauugucugacccgguggaugcugaucgaggccgagcucaaaugcuucggaaacaccgcuguugccaaguguaaugaaaaacaugaugaggaauuuugcgacaugcugcgccuuuucgauuucaacaagcaggcgauuaaaagacugaagacagaggcccagauguccauccagcucauuaauaaggcugugaacgcccugaucaaugaccaacuuauuaugaaaaaccaucugcgggauaucaugggcaucccuuacugcaauuauagccgcuacugguaucucaaccacacggucaccgggaagacaucucugcccagauguuggcugguguccaauggaagcuaccucaacgaaacccacuuuucugacgacauugagcagcaggcugauaauaugaucacagagaugcugcaaaaagaauacauggaccggcagggcaagaccccucuugggcugguggaucucuucgucuuuagcacguccuucuaucugauuucuaucuuucugcaccuuguuaaaauuccgacacaucgccacaucgugggaaagcccugcccuaaaccccauagacucaaccacaugggcauuuguagcugcggccuguacaagcacccuggggugcccgucaaguggaaacggugaggacuaguuauaagacugacuagcccgaugggccucccaacgggcccuccuccccuccuugcaccgagauuaauaaaaaaaaaaaaaaaaaaaaaaaaaaaaaaaaaaaaaaaaaaaaaaaaaaaaaaaaaaaaaaaaugcaucccccccccccccccccccccccccccccccaaaggcucuuuucagagccaccagaauu

SEQ ID NO: 3474 - RNA, 1690 nt, Artificial Sequence
  mRNA product Design i-3 comprising derived and/or modified sequence from LASV(GA391;Clade III)__CAA36645__GPC (opt5)
gggagaaagcuuaccaugggccagaucgugaccuucuuucaagaggucccccacguuauugaagaggugaugaacaucgugcugauugcccucagcauccuggcuauucuuaaggggcuguacaaugucgccacaugcggacucaucggccuggugacguuccuucugcucuccgggagaucuuguagccugaucuauaaaggaaccuacgaacugcagacacucgagcugaacauggaaacccuuaauaugacaaugccucuguccugcaccaagaacaauucucaucacuauauucggguuggcaacgagacagggcucgagcugacccuuacgaauaccagcauccugaaccauaaauuuuguaaucucuccgacgcgcacaagcgcaaccuguacgaucauucucugaugagcauuaucuccacauuccaccucagcauuccgaauuuuaaccaguaugaagcuaugucuugcgacuucaauggaggcaaaaucaccgugcaguacaaccugucccacagcuuugccgucgaugccgcuggccauugugggacacuugccaauggagugcugcaaaccuucaugagaauggcuuggggcgggucuuauauugcccucgacuccggacggggcaacugggauugcaucaugacgagcuaccaguaccugaucauucagaacacaaccugggacgaucacugucaguuuucucgccccuccccuaucggguaucuuggacugcucagccaaagaacacgggacauuuacaucucccgcagacugcugggcaccuucaccuggacacucucugauagcgagggcaaugaaacgcccgggggauauugccugacccgguggaugcuuauugaggcggagcugaaguguuuuggcaacacagccguugcuaagugcaaugaaaaacaugacgaggaguucugugauaugcuccgccuguuugacuucaacaagcaggccaucagacggcuuaaaaccgaagcucagauguccauccagcugauuaauaaggccgugaacgcgcucaucaaugaucaacugauuaugaaaaaccaucugcgcgacaucauggggauuccuuacugcaauuauagcagauacugguaucucaaccacacaucuaccggaaagacgucccugccccggugcuggcuuaucagcaauggcucuuaccugaacgaaacaaaguucagcgacgauaucgagcagcaggccgacaauaugauuaccgagaugcuccaaaaagaauacaucgaucgccaggggaagaccccucugggacuggucgaccuuuuuguguucuccacaucuuuuuaucucauuagcaucuuccugcaccuggugaaaauuccgacccacagacauaucgucggcaagcccuguccuaaaccccaccggcucaaccauaugggcauuugcuccugugggcuguacaagcagccuggaguucccgugagauggaaacgcugaggacuaguuauaagacugacuagcccgaugggccucccaacgggcccuccuccccuccuugcaccgagauuaauaaaaaaaaaaaaaaaaaaaaaaaaaaaaaaaaaaaaaaaaaaaaaaaaaaaaaaaaaaaaaaaaugcaucccccccccccccccccccccccccccccccaaaggcucuuuucagagccaccagaauu

SEQ ID NO: 3475 - RNA, 1693 nt, Artificial Sequence
  mRNA product Design i-3 comprising derived and/or modified sequence from LASV(AV;Clade V)__CCA30314__GPC (opt5)
gggagaaagcuuaccaugggccagaucgugaccuucuuucaagaggucccccacguuauugaagaggugaugaacaucgugcugauugcccucagcauccuggcuguccuuaaggggcuguacaauauugccacaugcggacucaucggccugaucacguuccuucugcucugugggagauccugcucuagcaaccuguauaaaggaguguacgaacugcagucccucgaccugaauauggagacccuuaacaugacaaugccucugucuuguaccaagaauaacagccaucacuauauucggguuggcaaugauacagggcucgaacugacccuuacaaacaccuccauccugaaucauaaauuuugcaaccucucugacgcgcacaagaaagaucuguacgaccaugcucugaugagcauuaucuccacguuccaccucagcauuccgaauuuuaaccaguaugaggccaugucuugugauuucaauggaggcaagaucuccgugcaguacaaccugagccacucuuaugccauugacgcugccaaucauugcggcaccgucgcuaacgggauccuucaaacauuuaugcgcauggccuggggaggcuccuacaucgcgcuggauagcgggagaggaaacugggacuguauuaugaccucuuaccaguaucucaucauucagaauacaaccugggagaaccacugccaguucucccggcccagcccuaucggcuaccuggggcuucugucccaacgcacgagagauauuuauaucucucggcgccuccugggaacauuuaccuggacacugagcgacuccgaaggcaaugccacccccggcggguacugucucaccagauggaugcugaucgaggcugaacuuaagugcuucggaaacacagccguggcuaaauguaaugagaagcaugaugaggaauuuugcgacaugcugcgccucuucgauuuuaacaaacaggccauuagccggcugaagucugaggcgcagauguccauccagcuuauuaauaaagccguuaacgcucugaucaaugaccaacucauuaugaagaaccaccugagagacaucaugggcaucccuuauugcaauuacagcaaguauugguaccugaaccacacgauuaccgggaaaacaucucuccccaaguguuggcuggugagcaauggauccuaccuuaacgaaacccauuucucugaugacaucgagcagcaggccgauaauaugauuacagaaaugcugcaaaaagaguauauggagcggcagggcaagaccccucucgggcuggucgaccuguucguguuuagcacguccuucuaccuuaucagcauuuuucuccgccuggugaaaaucccgacacacagacauauugucggaaagcccugcccuaaaccccaccggcugaaccauaugggcaucuguucuugcggccucuauaagcagccugggguucccgugcgcuggaagagaugaggacuaguuauaagacugacuagcccgaugggccucccaacgggcccuccuccccuccuugcaccgagauuaauaaaaaaaaaaaaaaaaaaaaaaaaaaaaaaaaaaaaaaaaaaaaaaaaaaaaaaaaaaaaaaaaugcaucccccccccccccccccccccccccccccccaaaggcucuuuucagagccaccagaauu

SEQ ID NO: 3476 - RNA, 1690 nt, Artificial Sequence
  mRNA product Design i-3 comprising derived and/or modified sequence from LASV(Togo/2016/7082;Clade VI)__AMR44577__GPC (opt5)
gggagaaagcuuaccaugggccagaucauuaccuucuuucaagaggugccccacgucaucgaagagguuaugaacauugugcugaucgcccucagccugcuugcuauucugaaggggguguacaaugucgccacaugcggaaucaucggccucgugacguuccuguuucuuugugggagauccugcucucugauuuauaaaggaagcuacgaacuccagacccuggagcugaacauggaaacacucaauaugaccaugccucuguccuguacaaagaacucuagccaucacuauauccggguuggcaaugagaccgggcuugagcugacacucaccaacacguccauuaucaaucauaaauucugcaaccugucugacgcgcacaagcgcaaucuuuacgaucaugcucugaugagcauucucuccaccuuucaccugagcaucccgaacuucaaucaguaugaagccaugucuugugacuuuaacggaggcaaaauuuccgugcaguacaaucugagccacgccuaugcugucgaugccgcugagcauugcggcacaguggccaacgggguucuccaaaccuucaugagaauggcguggggaggcucuuacaucgcccuggacuccgggcggggaaauugggauuguaucaugacaagcuaccaguaucuuauuauccagaacaccacgugggaagaccacugccaguuuucucgccccuccccuauuggcuaccuggggcuccugagccaaagaacacgggauaucuauauuucccgcagacuucugggaaccuucacauggacccucucugacagcgagggcaacgagacccccggcggguacugucugacacgguggaugcugaucgaagcugagcucaagugcuuuggaaauacggccguggcuaaguguaacgaaaaacaugaugaggaguucugcgacaugcugcgccuuuuugauuucaauaagcaggccauccagagacugaaauccgaagcgcagaugagcauucaacucaucaacaaggccgucaaugcucugauuaacgaccagcuuaucaugaaaaaucaucugcgggauaugaugggcauuccuuauugcaacuacucuaaguauugguaccucaaucacaccuccagcgggcgcacaucucugcccaaguguuggcuggugagcaacggauccuaccucaaugagacccacuucucugacgacaucgaacagcaagccgauaacaugaucacagagaugcugcagaaagaauauauugacagacagggcaagaccccucuugggcugguggaucucuuugucuucagcacguccuuuuaccugaucagcauuuuccugcaccuuaucaaaauuccgacacaucggcacaucguuggaaagcccugcccuaaaccccaucgccucaaucacaugggcauuuguucuugcggccuguauaagcagccuggggugcccaccagauggaaacggugaggacuaguuauaagacugacuagcccgaugggccucccaacgggcccuccuccccuccuugcaccgagauuaauaaaaaaaaaaaaaaaaaaaaaaaaaaaaaaaaaaaaaaaaaaaaaaaaaaaaaaaaaaaaaaaaugcaucccccccccccccccccccccccccccccccaaaggcucuuuucagagccaccagaauu

SEQ ID NO: 3477 - RNA, 1690 nt, Artificial Sequence
  mRNA product Design i-3 comprising derived and/or modified sequence from LASV(KAK-428;Clade n.d. (VII))__ANH09740__GPC (opt5)
gggagaaagcuuaccaugggccagaucgugaccuucuuucaagaggucccccacguuauugaagaggugaugaacaucgugcugauugcccucagccugcuugcuauccugaaggggcucuacaauuucgccacaugcggagucauuggccugaucacguuucuucugcucugugggagauccugcucugcgaccuauaaaggacaguacgaacugcagacacuggagcucaacauggaaagccugaauaugaccaugccucuuuccuguacaaagaacaauucucaucacuauauccgggcuggcaacaauaccgggcuggagcucacacugaccaacacgagcauuaucucccauaaauucugcaaucuuucugacgcccacaagaaaaaccuguacgaucauacccucaugagcauuaucacaaccuuucaccuguccauuccgaauuucaaccaguaugaggccaugagcugugacuuuaauggaggcaagaucucuauucaauacaaccugucccacagcuaugcuggcgaugccgcucagcauugcgggacaguggccaauggaguucuccagaccuucaugcgcauggcguggggcgggucuuaccuggcccuugacuccggaagacggggcugggauuguaucaucagcucuuaccaguaucugauuauccaaaacacgacaugggacgaucacugccaguuuucccgccccagcccuauuggguaccucggauucgugucccagaagaccagagacaucuauauuucucggcgccugcuuggcacauuuaccuggacccugagcgauuccgaaggccaugacaugcccgggggauacugucucacaagauggaugcugaucgaggcugaucugaaaugcuucggcaacacggccgucgcuaaguguaaugaaaaacacgacgaggaguuuugcgauauguggcgccucuucgacuucaacaagcaggccauccaacggcugaaagcggaagcccagaugaauauucagcuuaucaacaaggcugugaaugcccugauuaacgaccaacucaugaugaagaaucaccugagagauaucauggggauuccuuauugcaacuacagcaaauuuugguaucuuaauaacaccacaaccggacggacaucucugccccgcuguuggcucaucuccaauggcagcuaccugaacgagacccauuucucugacgauaucgaacagcaggcugacaauaugauuacggagaugcugcagaaggaauacauggauagacaagggaaaacaccucucggacugguugaccuuuuuguguucagcaccuccuuuuaucugaucaccauuuuccuccaccuggucaagaucccgacacaucggcacauugugggcaaacccugcccuaagccccaucgccugaaccacaugggcaucuguucuugcgggcuuuacaaacagccuggagugcccgucagauggaagcggugaggacuaguuauaagacugacuagcccgaugggccucccaacgggcccuccuccccuccuugcaccgagauuaauaaaaaaaaaaaaaaaaaaaaaaaaaaaaaaaaaaaaaaaaaaaaaaaaaaaaaaaaaaaaaaaaugcaucccccccccccccccccccccccccccccccaaaggcucuuuucagagccaccagaauu

SEQ ID NO: 3478 - RNA, 1690 nt, Artificial Sequence; identical to SEQ ID NO: 3472
  mRNA product Design i-3 comprising derived and/or modified sequence from LASV(Pinneo-NIG-1969;Clade I)__AIT17836__GPC (opt5)

SEQ ID NO: 3479 - RNA, 1690 nt, Artificial Sequence
  mRNA product Design i-3 comprising derived and/or modified sequence from LASV(ISTH0009-NIG-2011;Clade II)__AIT17404__GPC (opt5)
gggagaaagcuuaccaugggccagaucauuaccuucuuucaagaggugccccacgucaucgaagagguuaugaacauugugcugaucgcccucagccugcuugcuauucugaaggggaucuacaauguggccacaugcggacucuucggccuggucuccuuucuucugcucugugggagaucuugcagcacgaccuauaaaggaguguacgaacugcagacacuggagcucgacauggcgucccugaacaugaccaugccucuuucuuguacaaagaauaacagccaucacuauaucaugguuggcaaugaaaccgggcuggagcucacacugaccaacacguccauuaucaaucauaaauucugcaaccuuucugaugcucacaagaaaaaucuguacgaccaugcccucaugagcauuaucuccaccuuucaccugagcauuccgaacuucaaucaguaugaggccaugucuugugauuuuaacggaggcaagaucuccgugcaguacaaucugagccacgcuuaugccgucgacgcugccaaccauugcggcacaauugcgaauggggugcuccaaaccuucaugcggauggccuggggaggcucuuacaucgcucuggauuccgggaagggaagcugggacuguaucaugacaucuuaccaguaucuuauuauccagaacaccacgugggaagaucacugccaguuuucccgccccagcccuauuggcuaccuggggcuccugucccaaagaacacgggacaucuauauuucucgcagacuucugggaaccuucacauggacccucagcgauuccgagggcaacgaaacccccggcggguacugucugacacgguggaugcugaucgaggccgagcucaaaugcuuuggaaauacggcuguugccaaguguaacgaaaaacaugacgaggaguucugcgauaugcugcgccuuuuugacuucaauaagcaggcgaucagacggcugaaaaccgaagcccagaugagcauucagcucaucaacaaggcugugaaugcccugauuaacgaucaacuuaucaugaagaaucaucugcgcgacauuaugggcaucccuuauugcaacuacucuaaauauugguaccucaaucacacagucaccgggaagacaucccugcccagauguuggcuggugagcaacggaucuuaccucaaugaaacccacuucagcgacgauaucgagcagcaggcugacaacaugauuacggagcugcuucaaaaagaauauauggaucggcagggcaagacaccucuggggcucguggaccuguuugucuucuccaccucuuuuuaccugaucagcauuuuccuucaccucaucaaaauuccgacccaucgccacaucacaggaaagcccugcccuaaaccccauagacugaaucacaugggcauuuguuccugcggccuguauaagcacccugggguucccgugaaguggaaacggugaggacuaguuauaagacugacuagcccgaugggccucccaacgggcccuccuccccuccuugcaccgagauuaauaaaaaaaaaaaaaaaaaaaaaaaaaaaaaaaaaaaaaaaaaaaaaaaaaaaaaaaaaaaaaaaaugcaucccccccccccccccccccccccccccccccaaaggcucuuuucagagccaccagaauu

SEQ ID NO: 3480 - RNA, 1690 nt, Artificial Sequence
  mRNA product Design i-3 comprising derived and/or modified sequence from LASV(ISTH2010-NIG-2012;Clade II)__AIT17482__GPC (opt5)
gggagaaagcuuaccaugggccagaucauuaccuucuuucaagaggugccccacgucaucgaagagguuaugaacauugugcugaucgcccucagccugcuugcuauucugaaggggaucuacaauguggccacaugcggacucuucggccuggucuccuuucuucugcucugugggagaucuugcagcacgaccuauaaaggaguguacgaacugcagacacuggagcucgacauggcgucccugaacaugaccaugccucuuucuuguacaaagaauaacagccaucacuauaucaugguuggcaaugaaaccgggcuggagcucacacugaccaacacguccauuaucaaucauaaauucugcaaccuuucugaugcucacaagaaaaaucuguacgaccaugcccucaugagcauuaucuccaccuuucaccugagcauuccgaacuucaaucaguaugaggccaugucuugugauuuuaacggaggcaagaucuccgugcaguacaaucugagccacgcuuaugccgucgacgcugccaaccauugcggcacaauugcgaauggggugcuccaaaccuucaugcggauggccuggggaggcucuuacaucgcucuggauuccgggaagggaagcugggacuguaucaugacaucuuaccaguaucuuauuauccagaacauuaccugggaagaucacugccaguuuucccgccccagcccuaucggcuaccuggggcuccugucccaaagaacgcgggacauuuauaucucucgcagacuucugggaacauucaccuggacacucagcgauuccgagggcaacgaaacccccggcggguacugucugacccgguggaugcugaucgaggccgagcucaaaugcuuuggaaauacagcuguugccaaguguaacgaaaaacaugacgaggaguucugcgauaugcugcgccuuuuugacuucaauaagcaggcgauuagacggcugaaaacggaagcccagaugagcauccagcucauuaacaaggcugugaaugcccugaucaacgaucaacuuauuaugaagaaucaucugcgcgacaucaugggcaucccuuauugcaacuacucuaaauauugguaccucaaucacaccgucacagggaagaccucccugcccagauguuggcuggugagcaacggaucuuaccucaaugaaacacacuucagcgacgauauugagcagcaggcugacaacaugaucaccgagcugcuucaaaaagaauauauugaucggcagggcaagacgccucuggggcucguggaccuguuugucuucuccacaucuuuuuaccugaucagcauuuuccuucaccucguuaaaaucccgacccaucgccacguggugggaaagcccugcccuaaaccccauagacugaaucacaugggcauuuguuccugcggccuguauaagcacccugggguccccgugaaguggaaacggugaggacuaguuauaagacugacuagcccgaugggccucccaacgggcccuccuccccuccuugcaccgagauuaauaaaaaaaaaaaaaaaaaaaaaaaaaaaaaaaaaaaaaaaaaaaaaaaaaaaaaaaaaaaaaaaaugcaucccccccccccccccccccccccccccccccaaaggcucuuuucagagccaccagaauu

SEQ ID NO: 3481 - RNA, 1690 nt, Artificial Sequence
  mRNA product Design i-3 comprising derived and/or modified sequence from LASV(Lassa virus/H.sapiens-wt/NGA/2015/ISTH_0543;Clade II)__AVO03639__GPC (opt5)
gggagaaagcuuaccaugggccagaucauuaccuucuuucaagaggugccccacgucaucgaagagguuaugaacauugugcugaucgcccucagccugcuugcuauucugaaggggaucuacaauguggccacaugcggacucuucggccuggucuccuuucuucugcucugugggagaucuugcagcacgaccuauaaaggaguguacgaacugcagacacuggagcucgacauggcgaaccugaauaugaccaugccucuuuccuguacaaagaacaauucucaucacuauaucaugguuggcaacgaaaccgggcuggagcucacacugaccaauacgagcauuaucaaccauaaauucugcaaucuuuccgaugcucacaagaaaaaccuguacgaccaugcccucaugucuauuaucagcaccuuucaccuguccauuccgaauuucaaccaguaugaggccaugagcugugauuuuaauggaggcaagaucucugugcaguacaaccugucccacacauaugcugucgacgccgcuaaucauugcggcaccauugccaacggggugcuccaaacauucaugcggauggcguggggaggcagcuacaucgcccuggauucugggaagggauccugggacuguaucaugaccagcuaccaguaucuuguuauucagaacacgacaugggaagaucacugccaguuuucucgccccuccccuaucggcuaccuggggcuccugagccaaagaacccgggacauuuauaucucccgcagacuucugggaacauucaccuggacccucucugauagcgagggcaaugaaacacccggcggguacugucugacgcgguggaugcugauugaggcugagcucaaaugcuuuggaaacaccgccguggcuaaguguaaugaaaaacaugacgaggaguucugcgauaugcugcgccuuuuugacuucaacaagcaggccaucagacggcugaaaacagaagcgcagauguccauccagcucauuaauaaggccgucaacgcucugaucaaugaucaacuuauuaugaagaaccaucugcgcgacaucaugggcauuccuuauugcaauuacagcaaauauugguaccucaaccacaccgugacagggaagaccucucugcccagauguuggcugguguccaauggaagcuaccucaacgaaacgcacuucucugacgauaucgagcagcaggccgacaauaugaucacagagcugcuucaaaaagaauauauugaucggcagggcaagaccccucuggggcucgucgaccuguuuguuuucagcaccuccuuuuaccugaucucuauuuuccuucaccucgugaaaaucccgacacaucgccacauuaccggaaagcccugcccuaaaccccauagacugaaccacaugggcaucuguagcugcggccuguauaagcacccuggggugcccgucaaguggaaacggugaggacuaguuauaagacugacuagcccgaugggccucccaacgggcccuccuccccuccuugcaccgagauuaauaaaaaaaaaaaaaaaaaaaaaaaaaaaaaaaaaaaaaaaaaaaaaaaaaaaaaaaaaaaaaaaaugcaucccccccccccccccccccccccccccccccaaaggcucuuuucagagccaccagaauu

SEQ ID NO: 3482 - RNA, 1690 nt, Artificial Sequence
  mRNA product Design i-3 comprising derived and/or modified sequence from LASV(Lassa virus/H.sapiens-wt/NGA/2016/ISTH_0009;Clade II)__AVO03571__GPC (opt5)
gggagaaagcuuaccaugggccagaucauuaccuucuuucaagaggugccccacgucaucgaagagguuaugaacauugugcugaucgcccucagccugcuugcuauucugaaggggaucuacaauguggccacaugcggacuccugggccuugucuccuuccugcuccugugugggagaucuugcagcacgaccuauaaaggaguguacgaacugcagacacucgagcuggacauggcgucccuuaacaugaccaugccucugucuuguacaaagaauaacagccaucacuauaucaugguuggcaaugaaaccgggcucgagcugacacuuaccaacacguccauuaucaaucauaaauuuugcaaccugucugaugcucacaagaaaaaucucuacgaccaugcccugaugagcauuaucuccaccuuccaccugagcauuccgaacuuuaaucaguaugaggccaugucuugugauuucaacggaggccggaucuccgugcaguacaaucucagccacucuuaugcugucgacgccgcuaaccauugcggcacaauugccaauggggugcugcaaaccuuuaugcgcauggcguggggaggcuccuacaucgcccuugauagcgggaagggaucuugggacuguaucaugacauccuaccaguaucugauuauccagaacaccacgugggaagaucacugccaguucagcagacccuccccuauuggcuaccucgggcugcuuucucaacggacacgcgacaucuauauuagcagacggcugcucggaaccuuuacauggacccuguccgauagcgagggcaacgaaacccccggcggguacugucugacacgcuggaugcucaucgaggcugagcugaagugcuucggaaauacggccguugcuaaauguaacgaaaagcaugacgaggaauuuugcgauaugcuuagacuguucgacuuuaauaaacaggccauccggcgccucaagaccgaggcgcagaugucuauucagcugaucaacaaagccgugaaugcucuuauuaacgaucaacugaucaugaagaaucaccucagagacauuaugggcaucccuuauugcaacuacuccaaguauugguaccugaaucacacagucaccgggaaaacaagccugccccgguguuggcucgugucuaacggaagcuaccugaaugaaacccauuucuccgacgauaucgagcagcaggccgacaacaugauuacggagcuucugcaaaaggaauauaucgaucgccagggcaaaacaccucucgggcugguggaccuguucgucuuuucuaccagcuucuaccuuauuuccaucuuucuccaccugguuaagauuccgacccauagacacaucacaggaaaacccugcccuaagccccaucggcugaaucacaugggcauuuguagcugcggccucuauaaccacccuggggugcccgugaaauggaagcgcugaggacuaguuauaagacugacuagcccgaugggccucccaacgggcccuccuccccuccuugcaccgagauuaauaaaaaaaaaaaaaaaaaaaaaaaaaaaaaaaaaaaaaaaaaaaaaaaaaaaaaaaaaaaaaaaaugcaucccccccccccccccccccccccccccccccaaaggcucuuuucagagccaccagaauu

SEQ ID NO: 3483 - RNA, 1690 nt, Artificial Sequence
  mRNA product Design i-3 comprising derived and/or modified sequence from LASV(Lassa virus/H.sapiens-wt/NGA/2016/ISTH_0017;Clade II)__AVO03567__GPC (opt5)
gggagaaagcuuaccaugggccagaucauuaccuucuuucaagaggugccccacgucaucgaagagguuaugaacauugugcugaucgcccucagccugcuugcuauucugaaggggaucuacaauguggccacaugcggacucuucggccuggucuccuuucuucugcucugugggagaucuugcagcacgaccuauaaaggaguguacgaacugcagacacuggagcucgacauggcgucccugaacaugaccaugccucuuucuuguacaaagaauaacagccaucacuauaucaugguuggcaaugaaaccgggcuggagcucacacugaccaacacguccauuaucaaucauaaauucugcaaccuuucugaugcucacaagaaaaaucuguacgaccaugcccucaugagcauuaucuccaccuuucaccugagcauuccgaacuucaaucaguaugaggccaugucuugugauuuuaacggaggcaagaucuccgugcaguacaaucugagccacacauaugcuauugacgccgcuaaccauugcggcaccaucgccaaugggguccuccaaacauucaugcggauggcguggggaggcucuuacaucgcccuggauuccgggaagggaagcugggacuguauuaugaccucuuaccaguaucuuaucauucagaacacgacaugggaagaucacugccaguuuucccgccccagcccuaucggcuaccuggggcuccugucccaaagaacccgggacauuuauaucucucgcagacuucugggaacauucaccuggacccucagcgauuccgagggcaacgaaacacccggcggguacugucugacgcgguggaugcugaucgaggcugagcucaaaugcuuuggaaauaccgccguggcuaaguguaacgaaaaacaugacgaggaguucugcgauaugcugcgccuuuuugacuucaauaagcaggccauuagacggcugaaaacagaagcgcagaugagcauccagcucauuaacaaggccguuaaugcucugaucaacgaucaacuuauuaugaagaaucaucugcgcgacaucaugggcaucccuuauugcaacuacucuaaauauugguaccucaaucacaccgugacagggaagaccucccugcccagauguuggcuggucagcaacggaucuuaccucaaugaaacgcacuucagcgacgauauugagcagcaggccgacaacaugaucacagagcugcuucaaaaagaauauauggaucggcagggcaagaccccucuggggcucguggaccuguuuguguucuccaccucuuuuuaccugauuagcaucuuccuucaccucguccgcauuccgacacauagacacguuaucggaaaacccugcccuaagccccaucggcugaaucacaugggcauuuguuccugcggccuguauaaacacccuggggugcccgugaaguggaagcgcugaggacuaguuauaagacugacuagcccgaugggccucccaacgggcccuccuccccuccuugcaccgagauuaauaaaaaaaaaaaaaaaaaaaaaaaaaaaaaaaaaaaaaaaaaaaaaaaaaaaaaaaaaaaaaaaaugcaucccccccccccccccccccccccccccccccaaaggcucuuuucagagccaccagaauu

SEQ ID NO: 3484 - RNA, 1690 nt, Artificial Sequence
  mRNA product Design i-3 comprising derived and/or modified sequence from LASV(Lassa virus/H.sapiens-wt/NGA/2018/ISTH_0959;Clade II)__AVV65099__GPC (opt5)
gggagaaagcuuaccaugggccagaucauuaccuucuuucaagaggugccccacgucaucgaagagguuaugaacauugugcugaucgcccucagccugcuugcuauucugaaggggaucuacaauguggucacaugcggacucuucggccugguguccuuucuucugcucugugggagaucuugcagcacgaccuauaaaggaguuuacgaacugcagacacuggagcucgacauggccucccugaacaugaccaugccucuuucuuguacaaagaauaacagccaucacuauaucauggugggcaaugaaaccgggcuggagcucacacugaccaacacguccauuaucaaucauaaauucugcaaccuuucugaugcgcacaagaaaaaucuguacgaccaugcucucaugagcauuaucuccaccuuucaccugagcauuccgaacuucaaucaguaugaggccaugucuugugauuuuaacggaggcaagaucuccguccaguacaaucugagccacgccuaugcuauugacgccgcuaaccauugcggcacaaucgccaauggggugcuccaaaccuucaugcggauggcguggggaggcucuuacaucgcccuggauuccgggaagggaagcugggacuguauuaugacaucuuaccaguaucuuaucauucagaacaccacgugggaagaucacugccaguuuucccgccccagcccuaucggcuaccuggggcuccugucccaaagaacacgggacauuuauaucucucgcagacuucugggaaccuucacauggacccucagcgauuccgagggcaacgaaacccccggcggguacugucugacacgguggaugcugaucgaggcugagcucaaaugcuuuggaaauacggccguugcuaaguguaacgaaaaacaugacgaggaguucugcgauaugcugcgccuuuuugacuucaauaagcaggccauuagacggcugaaaaccgaagcgcagaugagcauccagcucauuaacaaggccgugaaugcucugaucaacgaucaacuuauuaugaagaaucaucugcgcgacaucaugggcaucccuuauugcaacuacucuaaauauugguaccucaaucacacagucaccgggaagacaucccugcccagauguuggcuggugagcaacggaucuuaccucaaugaaacccacuucagcgacgauauugagcagcaggccgacaacaugaucacggagcugcuucaaaaagaauauauugaucggcagggcaagacaccucuggggcucguggaccuguuugucuucuccaccucuuuuuaccugaucagcauuuuccuucaccucguuaaaaucccgacccaucgccacgugauuggaaagcccugcccuaaaccccauagacugaaucacaugggcaucuguuccugcggccuguauaagcacccuggggugcccgucaaguggaaacggugaggacuaguuauaagacugacuagcccgaugggccucccaacgggcccuccuccccuccuugcaccgagauuaauaaaaaaaaaaaaaaaaaaaaaaaaaaaaaaaaaaaaaaaaaaaaaaaaaaaaaaaaaaaaaaaaugcaucccccccccccccccccccccccccccccccaaaggcucuuuucagagccaccagaauu

SEQ ID NO: 3485 - RNA, 1690 nt, Artificial Sequence
  mRNA product Design i-3 comprising derived and/or modified sequence from LASV(LASV003-NIG-2008;Clade II)__AIT17580__GPC (opt5)
gggagaaagcuuaccaugggccagaucauuaccuucuuucaagaggugccccacgucaucgaagagguuaugaacauugugcugaucgcccucagccugcuugcuauucugaaggggaucuacaauguggccacaugcggacucuucggccuggucuccuuucuucugcucugugggagaucuugcagcacgaccuauaaaggaguguacgaacugcagacacuggagcucgacauggcgucccugaacaugaccaugccucuuucuuguacaaagaauaacagccaucacuauaucaugguuggcaaugaaaccgggcuggagcucacacugaccaacacguccauuaucaaucauaaauucugcaaccuuucugaugcucacaagaaaaaucuguacgaccaugcccucaugagcauuaucuccaccuuucaccugagcauuccgaacuucaaucaguaugaggccaugucuugugauuuuaacggaggcaagaucuccgugcaguacaaucugagccacacauaugcugucgacgccgcuaaccauugcggcaccauugccaauggggugcuccaaacauucaugcggauggcguggggaggcucuuacaucgcccuggauuccgggaagggaagcugggacuguaucaugaccucuuaccaguaucuuauuauccagaacacgacaugggaagaucacugccaguuuucccgccccagcccuauuggcuaccuggggcuccugucccaaagaacccgggacaucuauauuucucgcagacuucugggaacauucaccuggacccucagcgauuccgagagcaacgaaacacccggcggcuacugucugacgcgguggaugcugaucgaggcugagcucaaaugcuuugggaauaccgccguugcuaaguguaacgaaaaacaugacgaggaguucugcgauaugcugcgccuuuuugacuucaauaagcaggccaucagacggcugaaagcggaagcccagaugucuauucagcucaucaacaaggcugugaaugcccugauuaacgaucaacuuaucaugaagaaucaucugcgcgacauuaugggaaucccuuauugcaacuacuccaaauauugguaccucaaucacacagucaccggcagaacaagccugccccgguguuggcuggugucuaacgggagcuaccucaaugaaacccacuucuccgacgauaucgagcagcaggcugacaacaugauuacggagcugcuucaaaaggaauauauggaucgccagggaaaaacaccucugggccucguggaccuguuugucuucucuaccagcuuuuaccugaucuccauuuuccuucaccucguuaagaucccgacccauagacacgugauugggaaacccugcccuaagccccaucggcugaaucacaugggaaucuguagcugcggccuguauaaacacccuggcgugcccgucaaguggaagcgcugaggacuaguuauaagacugacuagcccgaugggccucccaacgggcccuccuccccuccuugcaccgagauuaauaaaaaaaaaaaaaaaaaaaaaaaaaaaaaaaaaaaaaaaaaaaaaaaaaaaaaaaaaaaaaaaaugcaucccccccccccccccccccccccccccccccaaaggcucuuuucagagccaccagaauu

SEQ ID NO: 3486 - RNA, 1690 nt, Artificial Sequence
  mRNA product Design i-3 comprising derived and/or modified sequence from LASV(LASV035-NIG-2009;Clade II)__AIT17588__GPC (opt5)
gggagaaagcuuaccaugggccagaucauuaccuucuuucaagaggugccccacgucaucgaagagguuaugaacauugugcugaucgcccucagccugcuugcuauucugaaggggaucuacaauguggccacaugcggacucuucggccuggucuccuuucuucugcucugugggagaucuugcagcacgaccuauaaaggaguguacgaacugcagacacuggagcucgacauggcgucccugaacaugaccaugccucuuucuuguacaaagaauaacagccaucacuauaucaugguuggcaaugaaaccgggcuggagcucacacugaccaacacguccauuaucaaucauaaauucugcaaccuuucugaugcucacaagaaaaaucuguacgaccaugcccucaugagcauuaucuccaccuuucaccugagcauuccgaacuucaaucaguaugaggccaugucuugugauuuuaacggaggcaagaucuccgugcaguacaaucugagccacgcuuaugccgucgacgcugccaaccauugcggcacaauugcgaauggggugcuccaaaccuucaugcggauggccuggggaggcucuuacaucgcucuggauuccgggaagggaagcugggacuguaucaugacaucuuaccaguaucuuauuauccagaacaccacgugggaagaucacugccaguuuucccgccccagcccuauuggcuaccuggggcuccugucccaaagaacacgggacaucuauauuucucgcagacuucugggaaccuucacauggacccucagcgauuccgagggcaacgaaacccccggcggguacugucugacacgguggaugcugaucgaggccgagcucaaaugcuuuggaaauacggcuguugccaaguguaacgaaaaacaugacgaggaguucugcgauaugcugcgccuuuuugacuucaauaagcaggcgaucagacggcugaaagccgaagcucagaugagcauucagcucaucaacaaggccgugaaugcucugauuaacgaucaacuuaucaugaagaaucaucugcgcgacauuaugggcaucccuuauugcaacuacucuaaauauugguaccucaaucacaccgucacagggaagaccucccugcccagauguuggcuggugagcaacggaucuuaccucaaugaaacacacuucagcgacgauaucgagcagcaggccgacaacaugauuaccgagcugcuucaaaaagaauauaucgaucggcagggcaagacgccucuggggcucguggaccuguuugucuucuccacaucuuuuuaccugauuagcaucuuccuucaccucguuaaaauuccgacccaucgccacgugaucggaaagcccugcccuaaaccccauagacugaaucacaugggcauuuguuccugcggccuguauaagcacccuggggugcccgucaaguggaaacggugaggacuaguuauaagacugacuagcccgaugggccucccaacgggcccuccuccccuccuugcaccgagauuaauaaaaaaaaaaaaaaaaaaaaaaaaaaaaaaaaaaaaaaaaaaaaaaaaaaaaaaaaaaaaaaaaugcaucccccccccccccccccccccccccccccccaaaggcucuuuucagagccaccagaauu

SEQ ID NO: 3487 - RNA, 1690 nt, Artificial Sequence
  mRNA product Design i-3 comprising derived and/or modified sequence from LASV(LASV1000-NIG-2009;Clade II)__AIT17782__GPC (opt5)
gggagaaagcuuaccaugggccagaucauuaccuucuuucaagaggugccccacgucaucgaagagguuaugaacauugugcugaucgcccucagccugcuugcuauucugaaggggaucuacaauguggccacaugcggacucuucggccuggucuccuuucuucugcucugugggagaucuugcagcacgaccuauaaaggaguguacgaacugcagacacuggagcucgacauggcgucccugaacaugaccaugccucuuucuuguacaaagaauaacagccaucacuauaucaugguuggcaaugaaaccgggcuggagcucacacugaccaacacguccauuaucaaucauaaauucugcaaccuuucugaugcucacaagaaaaaucuguacgaccaugcccucaugagcauuaucuccaccuuucaccugagcauuccgaacuucaaucaguaugaggccaugucuugugauuuuaacggaggcaagaucuccgugcaguacaaucugagccacacauaugcugucgacgccgcuaaccauugcggcaccauugccaauggggugcuccaaacauucaugcggauggcguggggaggcucuuacaucgcccuggauuccgggaagggaagcugggacuguaucaugaccucuuaccaguaucuuauuauccagaacacgacaugggaagaucacugccaguuuucccgccccagcccuauuggcuaccuggggcuccugucccaaagaacccgggacaucuauauuucucgcagacuucugggaacauucaccuggacccucagcgauuccgagggcaacgaaacacccggcggguacugucugacgcgguggaugcugaucgaggcugagcucaaaugcuuuggaaauaccgccguugcuaaguguaacgaaaaacaugacgaggaguucugcgauaugcugcgccuuuuugacuucaauaagcaggccaucaaaagacugaagacagaagcgcagaugagcauucagcucaucaacaaggccgugaaugcucugauuaacgaucaacuuaucaugaaaaaucaucugcgggacauuaugggcaucccuuauugcaacuacucuaaguauugguaccucaaucacaccgucacagggaaaaccucccugccccgcuguuggcuggugagcaacggaucuuaccucaaugaaacgcacuucagcgacgauaucgagcagcaggccgacaacaugauuacagagcugcuucaaaaggaauauaucgauagacagggcaaaaccccucuggggcucguggaccuguuugucuucuccaccucuuuuuaccugauuagcaucuuccuucaccucguuaagauuccgacacaucggcacguggugggaaaacccugcccuaagccccaucgccugaaucacaugggcaucuguuccugcggccuguauaagcacccugggguccccgugaaauggaagagaugaggacuaguuauaagacugacuagcccgaugggccucccaacgggcccuccuccccuccuugcaccgagauuaauaaaaaaaaaaaaaaaaaaaaaaaaaaaaaaaaaaaaaaaaaaaaaaaaaaaaaaaaaaaaaaaaugcaucccccccccccccccccccccccccccccccaaaggcucuuuucagagccaccagaauu

SEQ ID NO: 3488 - RNA, 1690 nt, Artificial Sequence
  mRNA product Design i-3 comprising derived and/or modified sequence from LASV(LASV221-NIG-2010;Clade II)__AIT17624__GPC (opt5)
gggagaaagcuuaccaugggccagaucauuaccuucuuucaagaggugccccacgucaucgaagagguuaugaacauugugcugaucgcccucagccugcuugcuauucugaaggggaucuacaauguggccacaugcggacucuucggccuggucuccuuucuucugcucugugggagaucuugcagcacgaccuauaaaggaguguacgaacugcagacacuggagcucgacauggcgucccugaacaugaccaugccucuuucuuguacaaagaauaacagccaucacuauaucaugguuggcaaugaaaccgggcuggagcucacacugaccaacacguccauuaucaaucauaaauucugcaaccuuucugaugcucacaagaaaaaucuguacgaccaugcccucaugagcauuaucuccaccuuucaccugagcauuccgaacuucaaucaguaugaggccaugucuugugauuuuaacggaggcaagaucuccgugcaguacaaucugagccacacauaugcuauugacgccgcuaaccauugcggcaccaucgccaaugggguccuccaaacauucaugcggauggcguggggaggcucuuacaucgcccuggauuccgggaagggaagcugggacuguauuaugaccucuuaccaguaucuuaucauucagaacacgacaugggaagaucacugccaguuuucccgccccagcccuaucggcuaccuggggcuccugucccaaagaacccgggacauuuauaucucucgcagacuucugggaacauucaccuggacccucagcgauuccgagggcaacgaaacacccggcggguacugucugacgcgguggaugcugaucgaggcugagcucaaaugcuuuggaaauaccgccguggcuaaguguaacgaaaaacaugacgaggaguucugcgauaugcugcgccuuuuugacuucaauaagcaggccauuagacggcugaaaacagaagcgcagaugagcauccagcucauuaacaaggccguuaaugcucugaucaacgaucaacuuauuaugaagaaucaucugcgcgacaucaugggcaucccuuauugcaacuacucuaaauauugguaccucaaucacaccgugacagggaagaccucccugcccagauguuggcuggucagcaacggaucuuaccucaaugaaacgcacuucagcgacgauauugagcagcaggccgacaacaugaucacagagaugcugcaaaaagaauauauggaucggcagggcaagaccccucuugggcugguggaccucuuuguguucuccaccucuuuuuaccugauuagcaucuuccugcaccuugucaaaauuccgacacaucgccacguuaucggaaagcccugcccuaaaccccauagacucaaucacaugggcauuuguuccugcggccuguauaagcacccuggggugcccgugaaguggaaacggugaggacuaguuauaagacugacuagcccgaugggccucccaacgggcccuccuccccuccuugcaccgagauuaauaaaaaaaaaaaaaaaaaaaaaaaaaaaaaaaaaaaaaaaaaaaaaaaaaaaaaaaaaaaaaaaaugcaucccccccccccccccccccccccccccccccaaaggcucuuuucagagccaccagaauu

SEQ ID NO: 3489 - RNA, 1690 nt, Artificial Sequence
  mRNA product Design i-3 comprising derived and/or modified sequence from LASV(LASV237-NIG-2010;Clade II)__AIT17638__GPC (opt5)
gggagaaagcuuaccaugggccagaucauuaccuucuuucaagaggugccccacgucaucgaagagguuaugaacauugugcugaucgcccucagccugcuugcuauucugaaggggaucuacaauguggccacaugcggacucuucggccuggucuccuuucuucugcucugugggagaucuugcagcacgaccuauaaaggaguguacgaacugcagacacuggagcucgacauggcgucccugaacaugaccaugccucuuucuuguacaaagaauaacagccaucacuauaucaugguuggcaaugaaaccgggcuggagcucacacugaccaacacguccauuaucaaucauaaauucugcaaccuuucugaugcucacaagaaagaccuguacgaucaugcccucaugagcauuaucuccaccuuucaccugagcauuccgaauuucaaccaguaugaggccaugucuugugacuuuaauggaggcaagaucuccgugcaguacaaccugagccacacauaugcugucgaugccgcuaaucauugcggcaccauugccaacggggugcuccaaacauucaugcggauggcguggggaggcucuuacaucgcccuggacuccgggaagggaagcugggauuguaucaugaccucuuaccaguaucuuauuauccagaauacgacaugggaagaccacugccaguuuucccgccccagcccuauuggcuaccuggggcuccugucccaaagaacccgggauaucuauauuucucgcagacuucugggaacauucaccuggacccucagcgacuccgagggcaacgaaacacccggcggguacugucugacgcgguggaugcugaucgaggcugagcucaaaugcuuuggaaacaccgccguugcuaaguguaaugaaaaacaugaugaggaguucugcgacaugcugcgccuuuuugauuucaacaagcaggccaucagacggcugaaaacagaagcgcagaugagcauucagcucaucaauaaggccgugaacgcucugauuaaugaccaacuuaucaugaagaaccaucugcgcgacauuaugggcaucccuuauugcaauuacucuaaauauugguaccucaaccacaccgucacagggaagaccucccugcccagauguuggcuggugagcaauggaucuuaccucaacgaaacgcacuucagcgaugacaucgagcagcaggccgauaauaugauuacagagcugcuucaaaaagaauauauggaccggcagggcaagaccccucuggggcucguggaucuguuugucuucuccaccucuuuuuaccugaucagcauuuuccuucaccucaucaaaauuccgacacaucgccacaucaccggaaagcccugcccuaaaccccauagacugaaccacaugggcauuuguuccugcggccuguauaagcacccugggguucccgugaaguggaaacggugaggacuaguuauaagacugacuagcccgaugggccucccaacgggcccuccuccccuccuugcaccgagauuaauaaaaaaaaaaaaaaaaaaaaaaaaaaaaaaaaaaaaaaaaaaaaaaaaaaaaaaaaaaaaaaaaugcaucccccccccccccccccccccccccccccccaaaggcucuuuucagagccaccagaauu

SEQ ID NO: 3490 - RNA, 1690 nt, Artificial Sequence
  mRNA product Design i-3 comprising derived and/or modified sequence from LASV(LASV253-NIG-2011;Clade II)__AIT17670__GPC (opt5)
gggagaaagcuuaccaugggccagaucauuaccuucuuucaagaggugccccacgucaucgaagagguuaugaacauugugcugaucgcccucagccugcuugcuauucugaaggggaucuacaauguggccacaugcggacucuucggccuggucuccuuucuucugcucugugggagaucuugcagcacgaccuauaaaggaguguacgaacugcagacacuggagcucgacauggcgucccugaacaugaccaugccucuuucuuguacaaagaauaacagccaucacuauaucaugguuggcaaugaaaccgggcuggagcucacacugaccaacacguccauuaucaaucauaaauucugcaaccuuucugaugcucacaagaaaaaucuguacgaccaugcccucaugagcauuaucuccaccuuucaccugagcauuccgaacuucaaucaguaugaggccaugucuugugauuuuaacggaggcaagaucuccgugcaguacaaucugagccacacauaugcugucgacgccgcuaaccauugcggcaccauugccaauggggugcuccaaacauucaugcggauggcguggggaggcucuuacaucgcccuggauuccgggaagggaagcugggacuguaucaugaccucuuaccaguaucuuauuauccagaacacgacaugggaagaucacugccaguuuucccgccccagcccuauuggcuaccuggggcuccugucccaaagaacccgggacaucuauauuucucgcagacuucugggaacauucaccuggacccucagcgauuccgagggcaacgaaacacccggcggguacugucugacgcgguggaugcugaucgaggcugagcucaaaugcuuuggaaauaccgccguugcuaaguguaacgaaaaacaugacgaggaguucugcgauaugcugcgccuuuuugacuucaauaagcaggccaucagacggcugaaagcggaagcccagaugagcauucagcucaucaacaaggcugugaaugcccugauuaacgaucaacuuaucaugaagaaucaucugcgcgacauuaugggcaucccuuauugcaacuacucuaaauauugguaccucaaucacacagucaccgggagaacaucccugccccgguguuggcuggugagcaacggaucuuaccucaaugaaacccacuucagcgacgauaucgagcagcaggcugacaacaugauuacggagcugcuucaaaaggaauauaucgaucgccagggcaaaacaccucuggggcucguggaccuguuugucuucuccaccucuuuuuaccugauuagcaucuuccuucaccucguuaagauuccgacccauagacacaucauuggaaaacccugcccuaagccccaucggcugaaucacaugggcaucuguuccugcggccuguauaaacacccuggggugcccgugaaguggaagcgcugaggacuaguuauaagacugacuagcccgaugggccucccaacgggcccuccuccccuccuugcaccgagauuaauaaaaaaaaaaaaaaaaaaaaaaaaaaaaaaaaaaaaaaaaaaaaaaaaaaaaaaaaaaaaaaaaugcaucccccccccccccccccccccccccccccccaaaggcucuuuucagagccaccagaauu

SEQ ID NO: 3491 - RNA, 1690 nt, Artificial Sequence
  mRNA product Design i-3 comprising derived and/or modified sequence from LASV(LASV254-NIG-2011;Clade II)__AIT17674__GPC (opt5)
gggagaaagcuuaccaugggccagaucauuaccuucuuucaagaggugccccacgucaucgaagagguuaugaacauugugcugaucgcccucagccugcuugcuauucugaaggggaucuacaauguggccacaugcggacucuucggccuggucuccuuucuucugcucugugggagaucuugcagcacgaccuauaaaggaguguacgaacugcagacacuggagcucgacaugaccaaccugaauaugacaaugccucuuuccuguaccaagaacaauucucaucacuauaucaugguuggcaacgaaacagggcuggagcucacccugacgaauaccagcauuaucaaccauaaauucugcaaucuuuccgaugcgcacaagaaaaaccuguacaaucaugcucucaugucuauuaucagcacauuucaccuguccauuccgaacuucaaucaguaugaggccaugagcugugacuuuaacggaggcaagaucucugugcaguacaaucugucccacagcuaugccgucgaugcugccaaccauugcggcaccauugcuaacggggugcuccaaacauucaugcggauggccuggggaggcucuuacaucgcgcuggacuccgggaagggaaauugggauuguaucaugaccagcuaccaguaucuuauuauccagaacacgacaugggaagaccacugccaguuuucucgccccuccccuauuggcuaccuggggcuccugagccaaagaacccgggauaucuauauuucccgcagacuucugggaacauucaccuggacccucucugacagcgagggcaaugaaacacccggcggguacugucugacgcgguggaugcugaucgaggccgagcucaaaugcuuuggaaacaccgcuguugccaaguguaaugaaaaacaugaugaggaguucugcgacaugcugcgccuuuuugauuucaacaagcaggcuaucagacggcugaaaacagaagcccaggcgaauauucagcucaucaacaaggccgugaaugcucugauuaacgaccaacuuaucaugaagaaucaucugcgcgauauuaugggcaucccuuauugcaacuacuccaaauauugguaccucaaucacaccgucacagggaagaccagccugcccagauguuggcuggugucuaacggauccuaccucaaugaaacgcacuucagcgacgacaucgagcagcaggccgauaacaugauuacagagcugcuucaaaaagaauauauggaccggcagggcaagaccccucuggggcucguggaucuguuugucuucucuaccagcuuuuaccugaucuccauuuuccuucaccucguuaaaaucccgacacaucgccacgugauuggaaagcccugcccuaaaccccauagacugaaccacaugggcaucuguucuugcggccuguauaagcacccuggggugcccgucaaguggaaacggugaggacuaguuauaagacugacuagcccgaugggccucccaacgggcccuccuccccuccuugcaccgagauuaauaaaaaaaaaaaaaaaaaaaaaaaaaaaaaaaaaaaaaaaaaaaaaaaaaaaaaaaaaaaaaaaaugcaucccccccccccccccccccccccccccccccaaaggcucuuuucagagccaccagaauu

SEQ ID NO: 3492 - RNA, 1690 nt, Artificial Sequence
  mRNA product Design i-3 comprising derived and/or modified sequence from LASV(Nig08-A19;Clade III)__ADU56618__GPC (opt5)
gggagaaagcuuaccaugggccagaucgugaccuucuuucaagaggucccccacguuauugaagaggugaugaacaucgugcugauugcccucagcauccuggcuauucuuaaggggcuguacaauaucgccacaugcggacucaucggccuggucacguuccuucugcucuccgggagaucuuguagcaugaccuauaaaggaguguacgaacugcagacacuggagcucaacaugaauacccugaacaugacaaugccucuuuccugcaccaagaauaacucucaucacuauauuaugguuggcaaugaaacagggcuggagcucacccugacgaacaccagccuucugcaucacaaauuuuguaaucucuccgacgcgcauaagaaaaaccuguacgaucacacacugaugucuaucauuagcaccuuccaccucuccaucccgaauuuuaaccaguaugaggcuaugagcugcgacuucaauggaggcaagauuacagugcaguacaaccugucucauuccuaugccaucgaugccgcuaaucacuguggcaccgucgccaacggggugcuucaaacguuuaugcggauggcuuggggaggcagcuacauugcccuggacucugggcgcggaaagugggauugcaucaugacauccuaccaguaucucaucauucagaacaccacaugggaagaccauugucaguucagcagacccucuccuaucggcuaccuggggcuucugucccaacggacccgcgauauuuauaucagcagacggcuccugggaaccuuuacauggacgcuguccgacucugagggcaaugaaacccccggcggguacugccucacacgcuggaugcugauugaggcggagcuuaaauguuucggaaacaccgccguugcuaagugcaaugaaaaacacgaugaggaauuuugugacaugcugagacucuucgauuuuaacaagcaggccauccggcgccugaaagcugaggcccagaugagcauccagcuuauuaauaaggcggugaacgcccugaucaaugaccaacucauuaugaagaaccaccugagagauaucaugggcauuccuuauugcaauuacuccaaauauugguaccugaaccauacaagcaccgggcggacgucucucccccgcugcuggcuggucuccaauggaagcuaccuuaacgaaacacacuucucugacgacaucgagcagcaggcugauaauaugaucaccgagaugcugcaaaaggaauaucucgacagacagggcaaaaccccucuggggcugguggaucuuuucguguuuagcacauccuucuaccucauuucuaucuuucugcaucuggucaagauuccgacccaccggcauaucguuggaaaacccuguccuaagccccaccgccucaaccacaugggcauuugcagcuguggccuguauaaacagccuggggugcccgugagauggaagcggugaggacuaguuauaagacugacuagcccgaugggccucccaacgggcccuccuccccuccuugcaccgagauuaauaaaaaaaaaaaaaaaaaaaaaaaaaaaaaaaaaaaaaaaaaaaaaaaaaaaaaaaaaaaaaaaaugcaucccccccccccccccccccccccccccccccaaaggcucuuuucagagccaccagaauu

SEQ ID NO: 3493 - RNA, 1693 nt, Artificial Sequence
  mRNA product Design i-3 comprising derived and/or modified sequence from LASV(G1180-SLE-2010;Clade IV)__AIT17168__GPC (opt5)
gggagaaagcuuaccaugggccagaucgugaccuucuuucaagaggucccccacguuauugaagaggugaugaacaucgugcugauugcccucagcauccuggcuguccuuaaggggcuguacaauuucgccacaugcggacucgugggccugcuuacguuucugcuccugugugggagauccugcaccgcgucucgguauaaaggaguuuacgaacugcagacacucgagcugaacauggaaacccuuaauaugacaaugccucugagcuguaccaagaacaauucccaucacuauauuauggugggcaacgagacagggcucgagcugacccuuacgaauaccucuaucaucaaccauaaauucugcaaucugagcgacgcucacaagaaaaaccucuacgaucaugcccugauguccauuaucucuacauuucaccugagcauuccgaauuucaaccaguaugaagccauguccugugacuuuaauggaggcaagaucagcguccaguacaaccucucucacuccuaugcuggcgaugccgcuaaucauugcgggaccguggccaacggaguucugcaaacauucaugcgcauggcguggggcgggagcuacauugcccuugacucuggacacggcuccugggauuguaucaugaccagcuaccaguaucugauuauccagaacacgacaugggaggaccauugccaguuuucuagacccuccccuaucggguaccucggacugcuuagccaacggacccgcgauauuuauaucuccagacggcugcucggcacauucaccuggacccugucugacagcgaaggcaaggauacacccgggggauacugucugacgcgcuggaugcucauugaggcugagcugaaaugcuuuggcaauaccgccguggcuaaguguaacgaaaaacacgacgaggaguucugcgauaugcuuagacuguuugacuucaauaagcaggccauccagcggcucaaagcggaagcccagauguccauucaacugaucaacaaggcugucaaugcccuuaucaacgaucagcugauuaugaagaaucaccuccgcgacaucauggggauuccuuauugcaacuacagcaaauauugguaccugaaucauacaaccacaggaaagaccucucugcccaaauguuggcucguguccaacggcagcuaccugaaugaaacgcacuucucugacgauaucgagcagcaagcugacaacaugauuacagagaugcuucagaaggaauauauggagagacaggggaaaaccccucugggacucguggaucuguuugucuucagcaccuccuuuuaccugaucucuaucuuccuucaucucguuaagauuccgacacaccggcauaucgugggcaaaagcugccccaagccucaccgccugaaucacaugggcauuuguuccugcgggcuguauaagcagcccggagugccugucaaauggaagagaugaggacuaguuauaagacugacuagcccgaugggccucccaacgggcccuccuccccuccuugcaccgagauuaauaaaaaaaaaaaaaaaaaaaaaaaaaaaaaaaaaaaaaaaaaaaaaaaaaaaaaaaaaaaaaaaaugcaucccccccccccccccccccccccccccccccaaaggcucuuuucagagccaccagaauu

SEQ ID NO: 3494 - RNA, 1693 nt, Artificial Sequence
  mRNA product Design i-3 comprising derived and/or modified sequence from LASV(G1442-SLE-2011;Clade IV)__AIT17180__GPC (opt5)
gggagaaagcuuaccaugggccagaucgugaccuucuuucaagaggucccccacguuauugaagaggugaugaacaucgugcugauugcccucagcauccuggcuguccuuaaggggcuguacaauguggccacaugcggacucauuggccugguuacguuccuucugcucugugggagauccugcaccacaacccuguauaaaggaguguacgaacugcagacacucgagcugaacauggaaacccuuaauaugacaaugccucugucuuguaccaagaacaauagccaucacuauauccgggucggcaacgagacggggcucgagcugacccuuacaaauaccuccaucauuaaccauaaauuuugcaaucugucugacgcgcacaagaaaaaccucuacgaucaugcucugaugagcaucauuuccacauuccaccugucuaucccgaauuuuaaccaguaugaagccaugagcugugacuucaauggaggcaagauuuccgugcaguacaaccucagccacucuuaugccggcgaugcugccaaucauugcgggaccguugcuaacggagugcugcaaacguuuaugcgcauggccuggggcggguccuacaucgcgcuugacagcggaagaggcaacugggauuguauuaugacaucuuaccaguaucugaucauccagaauaccacaugggacgaucacugccaguucucccggcccagcccuauuggguaccucggacugcuuucucaacgcaccagagacgucuauaucucccggcgccugcucggcaccuuuacauggacgcugagcgauuccgagggcaaggacacccccgggggauacugucugacaagauggaugcucauugaagccgagcugaaaugcuucggcaacaccgcuguggccaaguguaaugagaaacaugaugaagaguuuugcgacaugcuucggcuguucgauuuuaacaagcaggcuauccagcgccucaaagccgaagcgcagaugucuauucaacugaucaauaaggccgugaacgcucuuaucaaugaccagcugauuaugaagaaccaccucagagacaucauggggauuccuuauugcaauuacagcaaauauugguaccugaacaauacagccaccggaaagacgucccugcccaaauguuggcucaucagcaacggcucuuaccugaaugagacacacuucuccgaugacauugaacaggaggcugauaacaugaucaccgagaugcuucaaaaggaauauauggagcggcaggggaaaaccccucugggacucgucgaccuguucguuuuuagcacaucuuucuaccugaucagcauuuuucuucaucucgugaagaucccgacccaccgccauauugugggcaaauccugccccaagccucacagacugaaucauaugggcaucuguucuugcgggcuguauaagcagcccggagucccugugcgguggaaacgcugaggacuaguuauaagacugacuagcccgaugggccucccaacgggcccuccuccccuccuugcaccgagauuaauaaaaaaaaaaaaaaaaaaaaaaaaaaaaaaaaaaaaaaaaaaaaaaaaaaaaaaaaaaaaaaaaugcaucccccccccccccccccccccccccccccccaaaggcucuuuucagagccaccagaauu

SEQ ID NO: 3495 - RNA, 1693 nt, Artificial Sequence
  mRNA product Design i-3 comprising derived and/or modified sequence from LASV(G3010-SLE-2013;Clade IV)__AIT17344__GPC (opt5)
gggagaaagcuuaccaugggccagaucgugaccuucuuucaagaggucccccacguuauugaagaggugaugaacaucgugcugauugcccucagcauccuggcuguccuuaaggggcuguacaauuucgccacaugcggacucgugggccugguuacguuucuucugcucugugggagauccugcaccacaucucuguauaaaggaguguacgaacugcagacccucgagcugaacauggaaacacuuaauaugaccaugccucugagcuguacaaagaacaauucccaucacuauauuauggucggcaacgagaccgggcucgagcugacgcuuaccaauacaucuaucaucaaccauaaauucugcaaucugagcgacgcgcacaagaaaaaccucuacaaucaugcucugauguccauuaucucuaccuuucaccugagcauuccgaacuucaaucaguaugaagccauguccugugauuuuaacggaggcaagaucagcgugcaguacaaucucucucacuccuaugccggcgacgcugccagccauugcgggacaguugcuaacggagugcugcaaaccuucaugcggauggccuggggcgggucuuacauugcgcuugauuccggauacggcaagugggacuguaucaugacgagcuaucaguaccugauuauccagaacacaaccugggaggaucacugccaguuuucucgccccuccccuaucggguaucucggacugcuuagccaaagaacacgggacauuuacaucucccgcagacugcucggcaccuucaccuggacacugucugauagcgaaggcaaagacacgcccgggggauauugucugacccgguggaugcucauugaggccgagcugaagugcuuuggcaauacagcugucgccaaauguaacgaaaagcaugaugaggaguucugcgacaugcuucgccuguuugauuucaauaaacaggcuauccagagacucaagaccgaagcccagauguccauucaacugaucaacaaggcggugaaugcccuuaucaacgaccagcugauuaugaaaaaucaccuccgggauaucauggggauuccuuacugcaacuauagcaaguacugguaccugaaucacacaaccacgggaaaaacaucucugcccaaguguuggcucguguccaacggcagcuaucugaaugaaacccauuucucugacgacaucgagcagcaagcugauaacaugauuaccgagaugcuucagaaagaauacauggagcgccaggggaagacaccucugggacucgucgaccuguuuguuuucagcaccuccuuuuaucugaucucuaucuuccuucaccucgugaaaauuccgacacauagacacaucgugggcaagagcugccccaagccucaucggcugaaucacaugggcauuuguuccugcgggcuguacaaacagcccggagucccugugcgcuggaagagaugaggacuaguuauaagacugacuagcccgaugggccucccaacgggcccuccuccccuccuugcaccgagauuaauaaaaaaaaaaaaaaaaaaaaaaaaaaaaaaaaaaaaaaaaaaaaaaaaaaaaaaaaaaaaaaaaugcaucccccccccccccccccccccccccccccccaaaggcucuuuucagagccaccagaauu

SEQ ID NO: 3496 - RNA, 1693 nt, Artificial Sequence
  mRNA product Design i-3 comprising derived and/or modified sequence from LASV(G502-SLE-2009;Clade IV)__AIT17126__GPC (opt5)
gggagaaagcuuaccaugggccagaucgugaccuucuuucaagaggucccccacguuauugaagaggugaugaacaucgugcugauugcccucagcauccuggcuguccuuaaggggcuguacaauuucgccacaugcggacucgugggccugcuuacguuucugcuccugugugggagauccugcaccacaggacuguauaaaggcguuuacgaacuccagacccuggagcuuaacauggaaacacugaauaugaccaugccucucucuuguacaaagaacaauagccaucacuauauuaugguggggaacgagaccggacuggagcuuacgcugaccaauacauccaucaucaaccauaaauucugcaaucucucugacgcgcacaagaaaaaccuguacgaucaugcucugaugagcauuaucuccaccuuucaccucucuauuccgaauuucaaccaguaugaagccaugagcugugacuuuaauggcggcaagaucuccguccaguacaaccugagccacucuuaugccggggaugcugccgaccauugcggaacaguggcuaauggcguucuucaaaccuucaugcggauggccuggggaggguccuacauugcgcuggauagcggccgcgggagaugggacuguaucaugacgucuuaccaguaucucauuauccagaacacaaccugggaggaucacugccaguuuucccggcccagcccuaucggauaccugggccuucugucucaacgcacaagagacauuuauaucucccggcgccuccugggcaccuucaccuggacacugagcgauuccgaagggaaggacacgcccggaggcuacugucucaccagauggaugcugauugaggccgagcuuaaaugcuuugggaacacagcuguggccaaguguaaugaaaaacaugaugaggaguucugcgacaugcugcggcucuuugauuucaacaagcaggcuauccagcgccugaaagccgaagcgcagaugucuauucaacuuaucaauaaggccgucaacgcucugaucaaugaccagcucgugaugaagaaccaccugagagacauuaugggaaucccuuauugcaauuacagccgguauugguaccugaaccacaccacaaccggccgcacgucccuccccaaauguuggcuggugagcaaugggucuuaccuuaacgaaacacauuucuccgaugacauugagcagcaagccgauaauaugaucaccgagaugcugcagaaggaauauauggagagacagggaaaaaccccucucggccuggucgaccuguuuguuuucagcacaucuuuuuaccuuauuagcaucuuccuccaccuggugaagaucccgacccaucggcacauugugggcaaauccugccccaagccucaucgccugaaccacauggggaucuguucuugcggacucuauaaacagcccggcgucccugugaaguggaagagaugaggacuaguuauaagacugacuagcccgaugggccucccaacgggcccuccuccccuccuugcaccgagauuaauaaaaaaaaaaaaaaaaaaaaaaaaaaaaaaaaaaaaaaaaaaaaaaaaaaaaaaaaaaaaaaaaugcaucccccccccccccccccccccccccccccccaaaggcucuuuucagagccaccagaauu

SEQ ID NO: 3497 - RNA, 1693 nt, Artificial Sequence
  mRNA product Design i-3 comprising derived and/or modified sequence from LASV(G733-SLE-2010;Clade IV)__AIT17154__GPC (opt5)
gggagaaagcuuaccaugggccagaucgugaccuucuuucaagaggucccccacguuauugaagaggugaugaacaucgugcugauugcccucagcauccuggcuguccuuaaggggcuguacaauuucgccacaugcggaauugugggccucguuuccuuucugcuucugugugggagaucuugcacgaccagccucuauaaaggaguguacgaacugcagacacuggagcucaacauggaaacccugaauaugacaaugccucuuuccuguaccaagaacaauucucaucacuauaucauggucggcaacgagacagggcuggagcucacccugacgaauaccagcaucauuaaccauaaauucugcaaucuuuccgacgcgcacaagaaaaaccuguacgaucaugcucucaugucuaucauuagcacauuucaccuguccaucccgaauuucaaccaguaugaagccaugagcugugacuuuaauggaggcaagauuucugugcaguacaaccugucccacagcuaugccggcgaugcugccaaucauugcgggaccaucgcuaacggaguucuccaaacauucaugcggauggccuggggcgggucuuacauugcgcuggacuccggacgcgauagaugggacuguaucaugaccagcuaccaguaucuuaucauucagaacacgacaugggaggaucacugccaguuuucucggcccuccccuaucggcuaccuggggcuccugagccaacgcaccagagacauuuauaucucccggcgccuucugggaacauucaccuggacccucucugauagcgaaggcaaggacacacccggcggguacugucugacgagauggaugcugauugaggccgagcucaaaugcuuuggaaauaccgcuguggccaaguguaacgaaaaacaugaugaggaguucugcgacaugcugcggcuuuuugauuucaauaagcaggcuauccagcgccugaaagccgaagcgcagauguccauccaacucauuaacaaggccgucaaugcucugaucaacgaccagcuuauuaugaagaaucaccugagagacaucaugggcauuccuuauugcaacuacagcaaauauugguaccucaaucacacaaccacagggaagaccucucugcccaaauguuggcugguguccaacggaagcuaccucaaugaaacgcauuucucugaugacaucgagcagcaagccgauaacaugaucacagagaugcugcagaaggaauauauggagcggcagggcaaaaccccucuugggcugguggaccucuuugucuucagcaccuccuuuuaccugauuucuaucuuccugcaccuuguuaagauuccgacacaucgccacguggugggaaaaagcugccccaagccucauagacucaaucacaugggcaucuguuccugcggccuguaugggcagcccggagucccugugaaguggaaacggugaggacuaguuauaagacugacuagcccgaugggccucccaacgggcccuccuccccuccuugcaccgagauuaauaaaaaaaaaaaaaaaaaaaaaaaaaaaaaaaaaaaaaaaaaaaaaaaaaaaaaaaaaaaaaaaaugcaucccccccccccccccccccccccccccccccaaaggcucuuuucagagccaccagaauu

SEQ ID NO: 3498 - RNA, 1693 nt, Artificial Sequence
  mRNA product Design i-3 comprising derived and/or modified sequence from MOPV/LASV reassortant(IGS-1;Clade IV)__AFY05576__GPC (opt5)
gggagaaagcuuaccaugggccagaucgugaccuucuuucaagaggucccccacguuauugaagaggugaugaacaucgugcugauugcccucagcguccuggcugugcuuaaggggcuguacaauuucgccacaugcggacucguuggccuggugacguuucuucugcucugugggagauccugcaccacaucucuguauaaaggagucuacgaacugcagacccucgagcugaacauggaaacacuuaauaugaccaugccucugagcuguacaaagaacaauucccaucacuauaucauggugggcaacgagaccgggcucgagcugacgcuuaccaauacaucuauuaucaaccauaaauucugcaaucugagcgacgcgcacaagaaaaaccucuacgaucaugcucugauguccaucauuucuaccuuucaccugagcaucccgaauuucaaccaguaugaagccauguccugugacuuuaauggaggcaagauuagcguucaguacaaccucucucacuccuaugccggcgaugcugccaaucauugcgggacaguggcuaacggaguccugcaaaccuucaugcggauggccuggggcgggagcuacaucgcgcuugacucuggacgcggcaacugggauuguauuaugacguccuaccaguaucugaucauucagaauacaaccugggaggaccacugccaguuuagcagacccucuccuaucggguaccucggacugcuuucccaacggacacgcgauaucuauauuagcagacggcugcucggcaccuucaccuggacacuguccgacucugaaggcgaggauacgcccgggggauacugucugacccgcuggaugcucaucgaggccgaacugaagugcuuuggcaacacagcuguggccaaauguaaugagaagcaugacgaagaguucugcgauaugcuuagacuguuugacuucaacaaacaggcuauucagcggcucaaggccgaagcgcagaugagcauccaacugauuaauaaagccgugaacgcucuuaucaaugaucagcugaucaugaagaaccaccuccgcgacauuauggggaucccuuauugcaauuacuccaaguauugguaccugaaccacaccacaaccggaagaacgagccugcccaaauguuggcucgucucuaauggcuccuaccugaacgagacacauuucagcgacgauauugagcagcaagccgacaauaugaucaccgaaaugcuucagaaggaguauauggaacggcaggggaaaaccccucugggacucguugaucuguuuguguucucuaccagcuuuuaccugauuuccaucuuccuucaccucgugaagaucccgacacaucgccacauugucggcaaaucuugccccaagccucauagacugaaccacaugggcaucuguagcugcgggcuguauaaacagcccggagugccuguuaaguggaagcggugaggacuaguuauaagacugacuagcccgaugggccucccaacgggcccuccuccccuccuugcaccgagauuaauaaaaaaaaaaaaaaaaaaaaaaaaaaaaaaaaaaaaaaaaaaaaaaaaaaaaaaaaaaaaaaaaugcaucccccccccccccccccccccccccccccccaaaggcucuuuucagagccaccagaauu

SEQ ID NO: 3499 - RNA, 1693 nt, Artificial Sequence
  mRNA product Design i-3 comprising derived and/or modified sequence from LASV(LM765-SLE-2012;Clade IV)__AIT17814__GPC (opt5)
gggagaaagcuuaccaugggccagaucgugaccuucuuucaagaggucccccacguuauugaagaggugaugaacaucgugcugauugcccucagcauccuggcuguccuuaaggggcuguacaauuucgccacaugcggacucgugggccugguuacguuucuucugcucugugggagauccugcaccacaucucuguauaaaggaguguacgaacugcagacccucgagcugaacauggaaacacuuaauaugaccaugccucugagcuguacaaagaacaauucccaucacuauauuauggucggcaacgagaccgggcucgagcugacgcuuaccaauacaucuaucaucgaccauaaauucugcaaccugagcgaugcgcaccggaagaaucucuacgaccaugcucugauguccauuaucucuaccuuucaccugagcauuccgaacuucaaucaguaugaagccauguccugugauuuuaacggaggcaaaaucagcgugcaguacaaucucucucacuccuaugccaaggacgcugccgaucauugcggcacaguugcuaacggggugcugcaaaccuucaugcgcauggccuggggaggcagcuacauugcgcuugacucugggagaggacggugggauuguaucaugacguccuaccaguaucugauuauccagaauacaaccugggaggaccacugccaguuuagccgccccucuccuaucggcuaccucgggcugcuuucccaaagaacacgggauauuuauaucagccgcagacugcucggaaccuucaccuggacacuguccgacucugaaggcaaggauacgcccggcggguacugucugacccgguggaugcucauugaggccgagcugaaaugcuuuggaaacacagcugucgccaaguguaacgaaaaacaugacgaggaguucugcgauaugcuucgccuguuugacuucaauaagcaggcuauccagagacucaaagccgaagcgcagaugagcauucaacugaucaacaaggccgugaaugcucuuaucaacgaccagcugauuaugaagaaucaccuccgggauaucaugggcauuccuuauugcaacuacuccaaauauugguaccugaaucacaccacaaccgggaagacgagccugcccaaauguuggcucgugucuaacggauccuaccugaaugaaacacauuucagcgacgauaucgagcagcaagccgacaacaugauuaccgagaugcuucagaaggaauauauggagcgccagggcaaaaccccucuggggcucgucgaucuguuuguuuucucuaccagcuuuuaccugaucuccaucuuccuucaccucgugaagauuccgacacauagacacaucgugggaaaacccugcccuaagccccaucggcugaaucacaugggcauuuguucuugcggccuguauaagcagccugggguccccgugaaauggaagcgcugaggacuaguuauaagacugacuagcccgaugggccucccaacgggcccuccuccccuccuugcaccgagauuaauaaaaaaaaaaaaaaaaaaaaaaaaaaaaaaaaaaaaaaaaaaaaaaaaaaaaaaaaaaaaaaaaugcaucccccccccccccccccccccccccccccccaaaggcucuuuucagagccaccagaauu

SEQ ID NO: 3500 - RNA, 1693 nt, Artificial Sequence
  mRNA product Design i-3 comprising derived and/or modified sequence from LASV(LM776-SLE-2012;Clade IV)__AIT17824__GPC (opt5)
gggagaaagcuuaccaugggccagaucgugaccuucuuucaagaggucccccacguuauugaagaggugaugaacaucgugcugauugcccucagcauccuggcuguccuuaaggggcuguacaauuucgccacaugcggacucgugggccugguuacguuucuucugcucugugggagauccugcaccacaucuguguauaaaggagucuacgaacugcagacccuggagcucaacauggaaacacugaauaugaccaugccucuuagcuguacaaagaacaauucccaucacuauauuauggugggcaacgagaccgggcuggagcucacgcugaccaauacaucuaucaucaaccauaaauucugcaaucuuagcgacgcgcacaagaaaaaccuguacgaucaugcucucauguccauuaucucuaccuuucaccugagcauuccgaauuucaaccaguaugaagccauguccugugacuuuaauggaggcaagaucagcguucaguacaaccugucucacuccuaugccggcgaugcugccaaucauugcgggacaguggcuaacggaguccuccaaaccuucaugcggauggccuggggcgggagcuacauugcgcuggacucuggacacggcaagugggauuguaucaugacguccuaccaguaucuuauuauccagaacacaaccugggaggaccauugccaguuuagccgccccucuccuaucggguaccugggacuccugucccaaagaacacgggauauuuauaucagccgcagacuucugggcaccuucaccuggacacucuccgacucugaaggcaaagauacgcccgggggauacugucugacccgguggaugcugauugaggccgagcucaagugcuuuggcaauacagcuguggccaaauguaacgaaaagcacgacgaggaguucugcgauaugcugcgccuuuuugacuucaauaaacaggcuauccagagacugaaggccgaagcgcagaugagcauucaacucaucaacaaggccgugaaugcucugaucaacgaucagcuuauuaugaaaaaucaucugcgggacaucauggggauuccuuauugcaacuacuccaaguauugguaccucaaucacaccacaaccggaaaaacgagccugcccaaguguuggcuggucucuaacggcuccuaccucaaugaaacacacuucagcgacgauaucgagcagcaagccgacaacaugauuaccgagaugcugcagaaagaauauauggagcgccaggggaagaccccucuuggacugguugaucucuuuguguucucuaccagcuuuuaccugaucuccaucuuccugcaucuugugaaaauuccgacacacagacauaucgucggcaagucuugccccaagccucaccggcucaaucacaugggcauuuguagcugcgggcuguauaaacagcccggagugccuguucgcuggaagagaugaggacuaguuauaagacugacuagcccgaugggccucccaacgggcccuccuccccuccuugcaccgagauuaauaaaaaaaaaaaaaaaaaaaaaaaaaaaaaaaaaaaaaaaaaaaaaaaaaaaaaaaaaaaaaaaaugcaucccccccccccccccccccccccccccccccaaaggcucuuuucagagccaccagaauu

SEQ ID NO: 3501 - RNA, 1693 nt, Artificial Sequence
  mRNA product Design i-3 comprising derived and/or modified sequence from LASV(Mad39;Clade IV)__ANH09722__GPC (opt5)
gggagaaagcuuaccaugggccagaucgugaccuucuuucaagaggucccccacguuauugaagaggugaugaacaucgugcugauugcccucagcauccuggcuguccuuaaggggcuguacaauguggccacaugcggacucauuggccugguuacguuccuucugcucugugggagauccugcaccacaacccuguauaaaggaguguacgaacugcaggcgcucgagcugaacauggaaacacuuaauaugaccaugccucugucuuguacaaagaacaauagccaucacuauauccgggucggcaacgagaccgggcucgagcugacgcuuaccaauacaucccugaucaaccauaaauuuugcaaucucucugacgcucacaagaaaaaccuguacgaucaugcccugaugagcauuaucuccaccuuccaccucucuauuccgaauuuuaaccaguaugaagccaugagcugugacuucaaugauggaaagaucuccgugcaguacaaccugagccacacauaugcuggcgacaccgccaaucauugcggcacgguugcuaacggggugcuucaaacauuuaugcgcauggccuggggaggcucuuacauugcgcuggauuccgggagaggaggcugggacuguaucaugaccagcuaccaguaucucauuauccagaacacaaccugggaggaucacugccaguucucucggcccuccccuaucggguaccugggacuucugagccaacgcaccagagacauuuauaucucucggcgccuccugggcacauuuacguggacccuguccgauagcgaaggcaaggacacacccgggggauacugucucaccagauggaugcugauugaggccgagcuuaaaugcuucggcaauacagcugucgccaaguguaacgaaaaacaugaugaggaauuuugcgacaugcugcgccucuucgauuuuaauaagcaggcuauccagcggcugaaagccgaggcgcagauguccauucaacuuaucaacaaggccgugaaugcucugaucaacgaccagcucauuaugaagaaucaccugagagacaucauggggauuccuuauugcaacuacucuaaauauugguaccugaaucacaccgugacgggaaagacaagccuccccaaauguuggcuggucuccaacggcagcuaccuuaaugaaacccauuucucugaugacaucgagcagcaagccgauaacaugauuaccgagaugcugcagaaggaauauauggagcggcaggggaaaacaccucucggacugguugaccuguucguguuuuccaccagcuucuaccuuaucucuaucuuucuccaccuggugaagauuccgacacaucgccacgucgugggcaaacccugcccuaagccccauagacugaaucacaugggcaucuguagcugcggguucuauaagcagccuggaguucccgugcgguggaaacgcugaggacuaguuauaagacugacuagcccgaugggccucccaacgggcccuccuccccuccuugcaccgagauuaauaaaaaaaaaaaaaaaaaaaaaaaaaaaaaaaaaaaaaaaaaaaaaaaaaaaaaaaaaaaaaaaaugcaucccccccccccccccccccccccccccccccaaaggcucuuuucagagccaccagaauu

SEQ ID NO: 3502 - RNA, 1693 nt, Artificial Sequence
  mRNA product Design i-3 comprising derived and/or modified sequence from LASV(Z0947-SLE-2011;Clade IV)__AIT17840__GPC (opt5)
gggagaaagcuuaccaugggccagaucgugaccuucuuucaagaggucccccacguuauugaagaggugaugaacaucgugcugauugcccucagcauccuggcuguccuuaaggggcuguacaauuucgccacaugcggacucgugggccugguuacguuucuucugcucugugggagauccugcaccauuucucuguauaaaggaguguacgaacugcagacacucgagcugaacauggaaacccuuaauaugacaaugccucugagcuguaccaagaacaauucccaucacuauaucauggucggcaacgagacagggcucgagcugacccuuacgaauaccucuaucauuaaccauaaauucugcaaucugagcgacgcgcacaagaaaaaccucuacgaucaugcucugauguccaucauuucuacauuucaccugagcaucccgaauuucaaccaguaugaagccauguccugugacuuuaauggaggcaagauuagcgugcaguacaaccucucucacuccuaugccggcgaugcugccaaucauugcgggaccguugcuaacggagugcugcaaacauucaugcggauggccuggggcgggagcuacaucgcgcuugacucuggacgcgauagaugggacuguauuaugaccuccuaccaguaucugaucauccagaacacgacaugggaggaucacugccaguuuagccggcccucuccuauuggcuaccucgggcugcuuucccaacgcaccagagacaucuauauuagccggcgccugcucggaacauucaccuggacccuguccgauucugaaggcaaggacacacccggcggguacugucugacgagauggaugcucaucgaggccgagcugaaaugcuuuggaaauaccgcugucgccaaguguaacgaaaaacaugaugaggaguucugcgacaugcuucggcuguuugauuucaauaagcaggcuauucagcgccucaaagccgaagcgcagaugagcauccaacugaucaacaaggccgugaaugcucuuauuaacgaccagcugaucaugaagaaucaccucagagacauuaugggcaucccuuauugcaacuacuccaaauauugguaccugaaucacacaaccacagggaagaccagccugcccaaauguuggcucgugucuaacggauccuaccugaaugaaacgcauuucagcgaugacauugagcagcaagccgauaacaugaucacagagaugcuucagaaggaauauauggagcggcagggcaaaaccccucuggggcucgucgaccuguuuguuuucucuaccagcuuuuaccugaucuccauuuuccuucaccucgugaagaucccgacacaucgccacauugugggaaaacccugcccuaagccccauagacugaaucacaugggcaucuguucuugcggccuguauaagcagccugggguccccgugaaauggaagcggugaggacuaguuauaagacugacuagcccgaugggccucccaacgggcccuccuccccuccuugcaccgagauuaauaaaaaaaaaaaaaaaaaaaaaaaaaaaaaaaaaaaaaaaaaaaaaaaaaaaaaaaaaaaaaaaaugcaucccccccccccccccccccccccccccccccaaaggcucuuuucagagccaccagaauu

SEQ ID NO: 3503 - RNA, 1693 nt, Artificial Sequence
  mRNA product Design i-3 comprising derived and/or modified sequence from LASV(Josiah;Clade IV)__NP_694870__GPC (opt6) R7288
gggagaaagcuuaccaugggccaaauaguaaccuucuuucaagaaguaccacacguaauagaagaaguaaugaauauaguacuaauagcucuaagcguucucgccgucuuaaaaggacuauacaacuucgcaacauguggccuaguaggauuaguaacauuucuacuccuaugcggacgaucaugcacaacaucacuauauaaaggaguauacgaacugcaaacacuagaacuaaacauggaaacacuaaauaugacaaugcccuuaaguugcacuaaaaacaacucccaccacuauauaauggucggaaacgaaacaggccucgaauuaacauuaacaaacacaaguauaauaaaucacaaauuuuguaaucuaagcgaugcacacaaaaagaauuuauaugaccacgcacuaaugucaauaauaaguaccuuucauuuaucaaucccuaacuuuaaccaauaugaagcaaugucuugcgauuucaacggaggaaaaauaucaguacaauauaacuuaucacacaguuacgcaggagaugcagccaaccacugcggcacuguagcaaacggaguacuccaaaccuucaugagaauggcauggggcggauccuauauugcacucgacaguggaagagguaacugggauugcaucaugaccucauaccaauauuuaauaauacagaauacaacaugggaagaccauugccaauuuucuagaccaucaccuauagguuacuuaggcuuauuaucacaaagaacacgagauauauacauauccagaagauuacuaggaacauuuacauggacacuaagugauagcgaaggcaaagacaccccaggagguuacugcuuaaccagauggauguuaauagaagcagaauuaaaauguuuuggcaauacagcaguagcaaaaugcaacgaaaaacacgaugaagaauuuugcgauaugcucagacuuuucgacuucaacaaacaagcaauccaaagauuaaaagcugaagcacaaaugagcauacaacuaaucaauaaagcaguuaaugccuuaauaaacgaccaacuaauaaugaaaaaccacuuaagagacauaaugggaauaccauacugcaacuauaguaaauacugguaucuaaaucacacaacuacaggccguacuucacugccaaaauguuggcuaguaagcaacggaucauauuuaaacgaaacacauuuuucagacgauauagaacaacaagcugauaacaugauaaccgaaaugcuucaaaaagaauacauggaaagacaaggcaaaacaccccucggucuaguagaccuauuugucuucagcacaaguuuuuacuuaauaucaauauucuuacaccuuguaaaaauaccaacacauagacacauaguaggaaaaucauguccaaaaccacauagacuaaaccacaugggaauauguagcugcggucuauauaaacaaccaggagucccaguaaaauggaaacgauaaggacuaguuauaagacugacuagcccgaugggccucccaacgggcccuccuccccuccuugcaccgagauuaauaaaaaaaaaaaaaaaaaaaaaaaaaaaaaaaaaaaaaaaaaaaaaaaaaaaaaaaaaaaaaaaaugcaucccccccccccccccccccccccccccccccaaaggcucuuuucagagccaccagaauu

SEQ ID NO: 3504 - RNA, 1690 nt, Artificial Sequence
  mRNA product Design i-3 comprising derived and/or modified sequence from LASV(LP;Clade I)__AAF86701__GPC (opt6)
gggagaaagcuuaccaugggacaaauuauaacauucuuucaagaaguaccccauguaauagaagaagucaugaacauaguucuaauagcacuaucuuuauuagcaauucuaaaaggcuuauauaacauagcaaccugcggcauaaucggccuagucgcuuuccuauucuuaugcggaaaaaguugcucauuaacacuaaaaggaggauaugaacuacaaacucucgaauuaaacauggaaacauuaaacaugacaaugccuuuaucuugcacaaaaaauucaucacaucacuacauaagagucggaaaugaaacaggacuagaacuuacacuaacaaacacaucaauaauuaaccacaaauuuugcaaccucucugacgcacauaaaaaaaaccuauacgaccaugcacuaaugucaauaauaucgacauuccaccuaucaauaccaaacuuuaaccaauaugaagccaugucaugcgacuucaacggugguaaaauauccguccaauacaaucuaucccauuccuacgcaggagacgccgcagaacauugcggaacugucgcaaacggaguacuacaaacuuucaugagaauggcauggggaggaagauauauugcccuagauucaggaaaaggaaacugggacugcaucaugaccucauaccaauaccuuauaauacaaaauacuacaugggaagaccacugccaauucucacgaccaucuccuaucggauaucuaggacuacuaucacaacgaacucgagacauauacauaagcagacgauuauuaggcacauuuacuuggacuuuaucagacucagaaggcaaugaaacaccaggaggauacuguuuaacacgauggaugcucauagaagcagaauuaaaauguuucggaaauacagcaguagcaaaaugcaacgaaaaacacgacgaagaauucugcgacauguuaagauuauucgacuucaauaaacaagcaauacguagacuaaaagcagaagcucaaaugucaauacaacuuauaaacaaagccguaaacgcacuaaucaacgaccaauuaaucaugaaaaaucauuuacgagacauuauggguauaccauacugcaacuacucuaaauacugguaucuaaaucacacaucuucaggacgaacaucauuaccaaaaugcuggcuuauaaguaacggaucauacuuaaaugaaacacaauucucagacgacauagaacaacaagcagauaacaugauaacugaaaugcuacaaaaagaauacauagaacgucaaggaaaaacacccuuaggacuaguagacauauucauauuuuccacaucauuuuacuuaauuucaaucuuccuacaccucauaaaaaucccuacccacagacacauaguaggaaaaccaugcccaaaaccacauagacuaaaccauaugggaguaugcucaugcggcuuauacaaacauccaggaguaccaacaaaauggaaacgauaaggacuaguuauaagacugacuagcccgaugggccucccaacgggcccuccuccccuccuugcaccgagauuaauaaaaaaaaaaaaaaaaaaaaaaaaaaaaaaaaaaaaaaaaaaaaaaaaaaaaaaaaaaaaaaaaugcaucccccccccccccccccccccccccccccccaaaggcucuuuucagagccaccagaauu

SEQ ID NO: 3505 - RNA, 1690 nt, Artificial Sequence
  mRNA product Design i-3 comprising derived and/or modified sequence from LASV(803213;Clade II)__AAF86703__GPC (opt6)
gggagaaagcuuaccaugggacaaauaauaaccuucuuccaagaaguaccacacguaauagaagaagucaugaacauagucuuaauagcauuaucauuauuagcaauauuaaaaggaauauacaacguagcaacaugcggauuauucggacuaauauccuuucuauuauuaugcggacgcagcugcucugucacauacaaaggagucuaugaacuacaaacauuagaacuaaacauggcaaacuuaaacaugacaaugccacuauccugcacaaaaaacaauucccaccacuacauaaugguuggcaacgaaacaggacucgaacuaacccuuacaaacacuucuauaauuaaccauaaauucugcaaccuaucagaugcacacaaaaaaaaccucuaugaccacgcacuaaugucuauaauaucaacauuucaccuaucuauaccaaacuuuaaccaauaugaagcaauguccugugauuuuaaugguggcaaaauaucuguacaauacaacuuaucacauucauucgcaguagacgcagcaaaccacugcggaacaauagcaaacggaguucuccaaacauuuaugagaauggccuggggaggaucauacaucgcacuagacucaggaaaaggaaauugggacuguauaaugaccucauaccaauaccuaaucauacaaaacacaacaugggaagaucauugccaauucucacgucccucuccaauaggauaucuaggccuccuaucacaaagaacaagagauaucuacauaucaagacgacuacucggaacauucacauggacacuaagcgacuccgaaggaaacgaagccccaggaggauacugccuuacacgauggaugcuaaucgaagccgaacuaaaaugcuuuggaaacacagcagucgcaaaauguaaugaaaaacaugaugaagaauuuugcgauaugcuaagacuauuugacuucaacaaacaagcaauaaaaagacucaaaacagaagcccaaaugucuauucaacucauaaauaaagcaguaaaugcauuaauuaacgaccaacuaaucaugaaaaaccaucuuagagauauuaugggaauaccauacuguaacuacucaagauacugguaccuaaaccacacaguaacuggaaaaacaucucuaccacgaugcuggcucguaucuaacgguucauaccuaaaugaaacacacuuuucugacgacaucgaacaacaagcagacaacaugauaacagaaaugcuacaaaaagaauacauggacagacaaggaaaaacaccacuaggucuaguagauuuauucguauucaguacaucuuucuaccuaauaucaauauuccuacaccucguaaaaauacccacacaccgccacauaguaggaaaaccauguccaaaaccacaccgacuaaaccacaugggcaucugcucaugcggacuauauaaacaccccggaguaccagucaaauggaaaagauaaggacuaguuauaagacugacuagcccgaugggccucccaacgggcccuccuccccuccuugcaccgagauuaauaaaaaaaaaaaaaaaaaaaaaaaaaaaaaaaaaaaaaaaaaaaaaaaaaaaaaaaaaaaaaaaaugcaucccccccccccccccccccccccccccccccaaaggcucuuuucagagccaccagaauu

SEQ ID NO: 3506 - RNA, 1690 nt, Artificial Sequence
  mRNA product Design i-3 comprising derived and/or modified sequence from LASV(GA391;Clade III)__CAA36645__GPC (opt6)
gggagaaagcuuaccaugggacaaauaguaacauucuuccaagaaguaccacauguaauugaagaaguaaugaacauaguacuaauagcacuaucaauccuagcaauauuaaaaggauuauauaaugucgcuacuuguggacuaauaggacucguaacauuucuacuauuaucagguagaucaugcagccuuauauacaaaggaacauacgaauuacaaacauuagaacuaaacauggaaacccuaaacaugaccaugccacuauccuguaccaaaaacaacucacaccauuacauuagaguaggaaacgaaacaggucuugaacuaacauugacaaacacaagcauacuaaaccauaaauucugcaaccuaucagaugcacacaaaagaaaccuauaugaccauucacuuaugucuauaaucucaacauuucauuuauccauaccuaacuucaaucaauaugaagcaaugucuugcgauuucaacggcggaaaaauaacaguacaauacaaccucucccauuccuucgcaguagacgcagcaggccacugcgguacauuagcaaacggcguacuacaaacauuuaugagaauggcauggggcggaucauacauagcuuuagacucagguagaggaaacugggauugcaucaugacaaguuaucaauaccuaauaauucaaaacacaacaugggacgaccacugccaauucucaagaccuucaccaauaggauauuuaggucuacucucccaaagaacacgcgacauauauauaucaagaagacuacuagguacauucacauggacacuaucagauucagaaggaaacgaaacaccaggaggauacuguuuaacacgcuggaugcucauagaagcugaacuaaaaugcuuuggcaacacagcaguagcaaaauguaacgaaaaacacgacgaagaauuuugcgacauguuacgacuauucgacuuuaacaaacaagcaauaagaagacuaaaaacagaagcacaaaugucaauccaacucauuaacaaagcaguaaacgcuuuaauaaacgaccaauuaauaaugaaaaaccaccuacgagacauaaugggaauacccuauuguaacuacucacgauauugguaucuaaaccauaccucaacaggaaaaaccucccuacccagaugcuggcuaaucucaaacggaucauaccuaaacgaaacaaaauucucugacgacauagaacaacaagcugacaacaugauaaccgaaauguuacaaaaagaauacauagauagacaaggcaaaacaccacuaggauuaguagacuuauucguauucucaacaucauucuacuuaauaaguaucuuccuacaccuagugaaaauaccaacccacagacacaucgucgguaaaccauguccaaaaccacacagacuaaaucacauggguauaugcucaugcggcuuauauaaacaaccaggaguaccaguuagauggaaaagauaaggacuaguuauaagacugacuagcccgaugggccucccaacgggcccuccuccccuccuugcaccgagauuaauaaaaaaaaaaaaaaaaaaaaaaaaaaaaaaaaaaaaaaaaaaaaaaaaaaaaaaaaaaaaaaaaugcaucccccccccccccccccccccccccccccccaaaggcucuuuucagagccaccagaauu

SEQ ID NO: 3507 - RNA, 1693 nt, Artificial Sequence
  mRNA product Design i-3 comprising derived and/or modified sequence from LASV(AV;Clade V)__CCA30314__GPC (opt6)
gggagaaagcuuaccaugggacaaauaguuaccuucuuccaagaaguaccacacguaauagaagaaguaaugaacauaguacucaucgcauuaagcauacuagcuguauuaaaaggucuauauaauauagcuaccuguggacuaaucggacucaucacauuuuuacuuuuaugcggucgaucauguucuucaaaccucuacaaaggaguauaugaauuacaaucauuagaccuaaauauggaaacauuaaacaugacaaugccacuaucaugcacaaaaaacaacucccaccacuacaucagaguaggaaaugauaccggacuagaacuaacucuaacaaacacaucaauacucaaccacaaauucugcaaccuaucugaugcacacaaaaaagaucuauacgaccaugcauuaauguccauaauaaguacuuuucacuuauccauaccaaacuucaaccaauacgaagcuaugucaugcgacuucaacggaggaaaaauauccguacaauauaaucuaucucacuccuacgcaauagacgcagcaaaucacugcggaaccguagcaaacgguaucuuacaaacuuucaugcgaauggccuggggaggaucauacauagccuuagacucaggaagaggaaacugggacuguauaaugacauccuaccaauaccuaaucauacaaaacacaaccugggaaaaccacugccaauucucuagaccaucacccaucggcuacuuaggauuacuaucacaacgaacuagagauauauacauaucaagaagacuacuaggaacuuuuacauggacauuauccgacucagaaggcaacgcaacaccaggaggauacugccuaacaagauggaugcuaauugaagcagaacuaaaaugcuucggcaauacagcaguagcaaaaugcaacgaaaaacacgacgaagaauuuugcgauaugcuaagauuauucgacuuuaauaaacaagcaauauccagacuaaaaucagaagcacaaaugucaauacaauuaauaaacaaagcuguuaaugcucuaauaaaugaucaacuuauaaugaaaaaccacuuacgagacauaaugggaauaccauauugcaacuacucaaaauacugguacuuaaaccauacaauaacaggaaaaacaucacuuccaaaauguuggcuagucuccaacggaucauaucuaaacgaaacccacuuuucagacgacauagaacaacaagcagacaacaugauaacagaaaugcuacaaaaagaauacauggaaagacagggaaaaacaccauuaggacuaguagaccucuucguauuuucuacaaguuucuaucuaauaucgauauuccuacgacuaguaaaaauacccacccacagacauaucgucggaaaaccaugcccaaaaccacauagacuaaaccauaugggaauaugcucauguggacuauacaaacaaccaggcguaccugucagauggaaaagauaaggacuaguuauaagacugacuagcccgaugggccucccaacgggcccuccuccccuccuugcaccgagauuaauaaaaaaaaaaaaaaaaaaaaaaaaaaaaaaaaaaaaaaaaaaaaaaaaaaaaaaaaaaaaaaaaugcaucccccccccccccccccccccccccccccccaaaggcucuuuucagagccaccagaauu

SEQ ID NO: 3508 - RNA, 1690 nt, Artificial Sequence
  mRNA product Design i-3 comprising derived and/or modified sequence from LASV(Togo/2016/7082;Clade VI)__AMR44577__GPC (opt6)
gggagaaagcuuaccaugggacaaauaauaacauuuuuccaagaaguaccacacgucauugaagaaguaaugaacauaguacuaauagcacuaucauuacuagcaauacuaaaaggaguuuacaacguagcuacaugcggcauuauaggucucguaacauuccuauucuuauguggaagauccugcucacucaucuauaaaggaucauaugaacuacaaacucuagaacucaacauggaaacauuaaacaugacaaugccacucucuugcacuaaaaauucaagccaccacuacauaagaguuggaaacgaaacaggacucgaacuaaccuuaacaaauaccuccauaauaaaccacaaauucuguaauuuaucagacgcacauaaaagaaaucuauacgaccaugcauuaaugucaauacuauccacauuucaccuaucaauccccaacuucaaccaauacgaagcuaugucaugcgacuucaauggcggaaaaauaucaguccaauauaacuuaucccacgcauacgcuguagacgcagcagaacauugcggcacagucgcaaacggaguacuacaaacauucaugagaauggcauggggaggaucauacauagcacuugauucaggcagaggaaacugggauugcauaaugacaucauaccaauacuuaauaauucaaaacacaacaugggaagaucacugccaauuuucgagaccaucacccauaggauaccuaggccuacuaucacaaagaacacgcgacauauacaucucucguagacuacuaggaacauucaccuggacacuaagcgacuccgaaggcaacgaaacacccggaggauauugccuaaccagauggauguuaauagaagcugaacuaaaauguuucggaaacacugcuguagcuaaauguaaugaaaaacacgaugaggaguucugcgacaugcuaagacuauucgacuucaauaaacaagcaauccaaagauuaaaaucagaagcacaaaugucuauacaacuaauaaacaaagccguaaacgcacuaauaaaugaucaacuaaucaugaaaaaucaccucagagauaugauggguauaccauauugcaauuacucaaaauacugguaucuaaaccacacgaguucuggaagaacaucccuaccaaaaugcuggcuaguaagcaauggcagcuaccuaaacgaaacacacuucucagacgacauagaacaacaggcagacaacaugauaacagaaauguuacaaaaagaauacaucgaccgacaaggaaaaacuccacuaggccuaguugaccuauucguauuuucaacaucauuuuacuuaauaucaauauuccuacaucuaauaaaaauaccaacacauagacacauaguaggaaaaccuugccccaagccacacagauuaaaccauaugggaauaugcuccuguggacuauacaaacaaccaggaguaccaacaagauggaaaagauaaggacuaguuauaagacugacuagcccgaugggccucccaacgggcccuccuccccuccuugcaccgagauuaauaaaaaaaaaaaaaaaaaaaaaaaaaaaaaaaaaaaaaaaaaaaaaaaaaaaaaaaaaaaaaaaaugcaucccccccccccccccccccccccccccccccaaaggcucuuuucagagccaccagaauu

SEQ ID NO: 3509 - RNA, 1690 nt, Artificial Sequence
  mRNA product Design i-3 comprising derived and/or modified sequence from LASV(KAK-428;Clade n.d. (VII))__ANH09740__GPC (opt6)
gggagaaagcuuaccaugggacaaauaguaacauucuuccaagaaguaccacacgucaucgaagaaguaaugaacauaguacuaauagcccucucauuauuagcaauauuaaaaggacuauacaacuucgcaacuuguggaguaauaggccuuauaacauuccuucuacuaugcggcagaucaugcuccgcaacauacaaaggacaauacgaauuacaaacauuagaacuaaauauggaaagcuuaaacaugaccaugccacucucaugcacaaaaaacaacucccaccacuauauacgcgccggaaacaacacaggacuugaauuaacccuaaccaacaccucuaucauaucacacaaauuuugcaaucuaucagacgcucacaaaaaaaaucuuuacgaccacacccuaauguccauaauaacaacauuccacuuaucuauaccaaacuucaaccaauacgaagcaaugucaugugauuucaacggaggaaagauuuccauacaauacaacuuaucucacucuuacgccggagacgccgcacaacacugcggaacaguagcaaacggaguacuucaaacauucaugagaauggcauggggaggauccuaccucgcauuagauucaggaagacgaggaugggacuguauaauauccucauaucaauaccuaaucauacaaaacacaacaugggacgaucauugccaauucucaagaccuucaccaauuggauaccuuggauucguuucacaaaaaacacgagauauuuacaucucacgcagauuauuaggaacauucaccuggacacucagcgacucagaaggccacgauaugccaggcgguuacugccuaacaagauggauguuaauagaagcagaccuaaaaugcuucggaaacacugccguagcaaaauguaacgaaaaacacgacgaagaauucugcgacauguggcgccuauucgacuucaacaaacaagcaauccaaagauuaaaagcugaagcacaaaugaauauacaacuaauaaauaaagccguaaacgcacucauaaacgaccaacuaaugaugaaaaaccaucuaagagacauaaugggaaucccauacugcaacuacuccaaauucugguaucucaauaacacaaccacaggaagaaccucuuuaccaagaugcuggcuaauaucaaacggaagcuacuuaaacgaaacacacuucucagacgacauagaacaacaagcugauaacaugauuacagaaaugcuacaaaaagaauacauggauagacaaggaaaaaccccacuaggacuuguugaccuauuuguauuuucaacaaguuucuaccuaauaacaaucuuccuacaucucguaaaaauaccuacacacagacacauaguaggaaaaccaugccccaaaccacacagacuaaaccacauggguauaugcucauguggacucuacaaacaaccaggcguuccaguccgauggaaacgauaaggacuaguuauaagacugacuagcccgaugggccucccaacgggcccuccuccccuccuugcaccgagauuaauaaaaaaaaaaaaaaaaaaaaaaaaaaaaaaaaaaaaaaaaaaaaaaaaaaaaaaaaaaaaaaaaugcaucccccccccccccccccccccccccccccccaaaggcucuuuucagagccaccagaauu

SEQ ID NO: 3510 - RNA, 1690 nt, Artificial Sequence
  mRNA product Design i-3 comprising derived and/or modified sequence from LASV(Pinneo-NIG-1969;Clade I)__AIT17836__GPC (opt6)
gggagaaagcuuaccaugggacaaauaaucacauucuuucaagaagucccccacguuauagaagaaguaaugaauauaguacuaauagcacucucauuacucgcaauacuaaaaggacuauauaacauagccacaugcggaauuauaggauuaguagcauuccuuuucuuaugcggaaaauccugcucacuaacacuaaaaggcggauacgaacuacaaacacuagaauuaaacauggaaacacuaaauaugacaaugccccuaucauguaccaaaaacuccucacaccauuacaucagaguaggaaaugaaacaggacuagaauuaaccuuaacaaacacaucuauaauuaaccacaaauuuugcaaccuauccgacgcacacaaaaaaaacuuauaugaucacgcacuaaugucaauuauaucaacuuuccaccuaucaaucccaaauuuuaaucaauacgaagcaaugucaugcgacuucaacggaggaaaaauauccguacaauauaaccucucucacucauacgcaggagacgcagcagaacacuguggaacaguagcaaacgguguucuacaaacauucaugagaauggcauggggaggacgauacauagcauuagacuccggaaaaggaaauugggauugcauuaugacaucauaucaauaucuuaucauacaaaacacaacaugggaagaccacugccaauuuucacgaccaagccccauagguuacuuagguuuacucucccaaagaacaagagauauauacauuucuagaagauuauuaggaacuuucacuuggaccuuaucugacucugaaggaaacgaaacaccaggaggauauugcuuaacuagauggaugcuaauugaagccgaauuaaaaugcuucggaaacacagcagucgccaaaugcaacgaaaaacaugacgaagaauuuugugacaugcuaagacuuuucgacuucaacaaacaagcuauaagaagauuaaaagcagaagcacaaaugucaauacaauuaauaaacaaagcuguaaacgcauuaauaaacgaccaauuaauaaugaaaaaccaccuaagagacauuaugggaauacccuacuguaauuacucaaaauacugguacuuaaaccauaccucauccgggcgaaccucucuacccaaaugcuggcucauaagcaacggauccuacuuaaacgaaacacaauuuucagacgacauagaacaacaagcagauaauaugauaacagaaaugcuacaaaaagaauauauagaaagacaaggaaaaaccccacuaggauuaguugacauauuuauauucucaaccucauuuuaccucauaucaauauuuuuacaucuaauaaaaauaccaacucacagacauauaguaggaaaaccaugcccaaaaccacauagauuaaaccacaugggaguauguuccugcggacuauacaaacauccaggaguacccacaaaauggaaacgauaaggacuaguuauaagacugacuagcccgaugggccucccaacgggcccuccuccccuccuugcaccgagauuaauaaaaaaaaaaaaaaaaaaaaaaaaaaaaaaaaaaaaaaaaaaaaaaaaaaaaaaaaaaaaaaaaugcaucccccccccccccccccccccccccccccccaaaggcucuuuucagagccaccagaauu

SEQ ID NO: 3511 - RNA, 1690 nt, Artificial Sequence
  mRNA product Design i-3 comprising derived and/or modified sequence from LASV(ISTH0009-NIG-2011;Clade II)__AIT17404__GPC (opt6)
gggagaaagcuuaccaugggacaaaucauaacauucuuucaagaagucccacacguaauagaagaaguaaugaauaucguauuaauagcacuauccuuacuagcaauauuaaaaggaauauacaauguagccacauguggacuauucgguuuaguaucauucuuacuucuaugcggaagaucuugcucaaccacuuacaaaggaguauacgaacuucaaacacucgaacuagauauggcaagucuaaacaugaccaugccacuaucaugcacaaaaaacaauucccaccauuacauaauggucggaaaugaaacaggauuagaauuaacauuaacaaacacaucuauuauaaaccacaaauucugcaaucuaucagacgcucacaaaaaaaaccuauacgaccacgcacucauguccauaauauccacuuuucaccuaucaauaccaaacuucaaccaauacgaagcaaugucaugugacuucaauggaggaaaaauaucaguacaauacaaccuaucccaugcauaugcaguagacgcagccaaucacuguggaacuauagcaaacgguguucuacaaacauuuaugcgaauggccugggguggauccuacauagcacuagacucuggaaaaggaucaugggauugcauaaugacuucauaccaauaccuaauaauacaaaacacaacaugggaagaccacugucaauucucaagacccucuccaauaggauaccuagguuuacuaucucaaagaacaagagauauauacaucagcagacgacuacuuggaacauucacauggacccuauccgacucagaaggaaaugaaacaccuggcggcuacugccuuaccagauggauguuaauagaagcugaauuaaaaugcuucggaaacacagccguagcaaaaugcaacgaaaaacaugacgaagaauuuugugacaugcuuagauuauucgacuuuaacaaacaagcuauacgcagauuaaaaacagaagcacaaaugaguauacaacuaauaaauaaagcaguaaacgcauuaauaaacgaccaacuaaucaugaaaaaccacuuaagagacauaaugggaauaccauacugcaacuacucaaaauacugguacuuaaaccacacugucacuggaaaaaccucauuaccacgcugcuggcuaguaucaaacggaaguuauuuaaaugaaacacauuucucagaugacauagaacaacaagcagacaauaugauaaccgaacucuuacaaaaagaauacauggacagacaaggaaaaacaccauuaggacuaguagaccucuucguuuucucaacaucauucuacuuaauaagcauuuuccuacacuuaauaaaaauaccaacacaccgccacauaaccggaaaaccaugcccaaaaccacacagauuaaaccauaugggaaucugcaguuguggucuauauaaacauccaggagucccaguaaaauggaaaagauaaggacuaguuauaagacugacuagcccgaugggccucccaacgggcccuccuccccuccuugcaccgagauuaauaaaaaaaaaaaaaaaaaaaaaaaaaaaaaaaaaaaaaaaaaaaaaaaaaaaaaaaaaaaaaaaaugcaucccccccccccccccccccccccccccccccaaaggcucuuuucagagccaccagaauu

SEQ ID NO: 3512 - RNA, 1690 nt, Artificial Sequence
  mRNA product Design i-3 comprising derived and/or modified sequence from LASV(ISTH2010-NIG-2012;Clade II)__AIT17482__GPC (opt6)
gggagaaagcuuaccaugggacaaaucauaacuuucuuucaagaaguaccccacguaauagaagaaguaaugaacauaguauuaauagcacuaucucuacucgccauacucaaaggcaucuauaauguagcaacaugcggcuuauuuggauuaguaucuuuucucuuauuauguggacgauccugcucaacaacauauaaagguguauacgaauuacaaacacuagaacuagacauggccucacuaaacaugacaaugccacuaucaugcaccaaaaauaacucacaccauuauauuaugguaggcaacgaaacaggacucgaacuaacccuaacaaacacaucaauaauaaaccacaaauucugcaauuuaucugacgcacacaaaaaaaaucucuaugaccaugcccuaaugucaauaauaucaacuuuccaccuaucaaucccaaacuucaaccaauaugaagcaaugucaugcgacuuuaacggaggcaaaaucuccguacaauacaaucucucccacgcauacgcaguagacgccgcaaaccauuguggcacaauagcaaauggugucuuacaaacauucaugcguauggcauggggaggaucauacauagcucuagacagcggaaaaggcucaugggauuguauaaugacuucauaucaauacuuaauaauacaaaacauaaccugggaagaccacugucaauuuucacgacccucacccauagguuacuuaggacuacuaagccaaagaaccagagauauauacauaucuagaagauuacuaggaacauucacauggacacuaucagacuccgaaggcaacgaaacaccaggaggauacuguuuaacuagauggaugcuaauagaagcagaacuaaaaugcuucggaaauacagcaguagccaaauguaaugaaaaacaugaugaagaauucugcgauaugcuacgucuauucgacuucaacaaacaagcaauucgaagauuaaaaacagaagcacaaaugucaauacaacuaauuaacaaagcaguaaacgcauuaauaaacgaucaauuaauuaugaaaaaccacuuaagagacauaaugggaaucccauauugcaacuacucaaaauacugguauuuaaaucauacaguuacaggcaaaacaucccuaccaagaugcuggcuagucucaaacggaucuuaccugaaugaaacacacuuuucagacgacauagaacaacaagcagauaacaugauaacagaacuauuacaaaaagaauacauagacagacaaggaaaaacuccacuaggacuuguagaccuauucguauucaguacaucauucuaccucauaagcauauucuuacaccuaguaaaaauaccaacacauagacauguagucggaaaaccuugcccaaaaccacacagguuaaaccauauggguauaugcucuugcggacuauauaaacacccaggaguaccugucaaauggaaacgauaaggacuaguuauaagacugacuagcccgaugggccucccaacgggcccuccuccccuccuugcaccgagauuaauaaaaaaaaaaaaaaaaaaaaaaaaaaaaaaaaaaaaaaaaaaaaaaaaaaaaaaaaaaaaaaaaugcaucccccccccccccccccccccccccccccccaaaggcucuuuucagagccaccagaauu

SEQ ID NO: 3513 - RNA, 1690 nt, Artificial Sequence
  mRNA product Design i-3 comprising derived and/or modified sequence from LASV(Lassa virus/H.sapiens-wt/NGA/2015/ISTH_0543;Clade II)__AVO03639__GPC (opt6)
gggagaaagcuuaccaugggccaaauaauaaccuucuuucaagaagucccacacguuauagaagaaguaaugaacauaguacuaauagcauuaucacuacuagcaauccuaaaaggaauauacaacguagcaacuugcggccuauucggacuaguaucauuccuccuacuaugcggacguuccugcuccacaacauacaaaggcguauacgaacuacaaacauuagaacuagacauggcaaacuuaaacaugaccaugccauuauccugcacaaaaaacaacucucaccauuauauaaugguuggaaacgaaacaggacucgaauuaacuuuaaccaacacaucaauaauuaaucauaaauucugcaacuuauccgacgcacacaaaaaaaaccuauacgaucacgcacuaaugagcauaauaucuacuuuccaucuaucaauaccaaauuucaaucaauacgaagcaaugucaugugauuucaauggcggaaaaauauccguacaauauaauuuaucccauacauacgcaguagaugcagcaaaccauugcggaacaauugcaaacggaguccuacaaacauuuaugcgaauggcauggggcggaagcuacauagcacucgauucaggaaaagguuccugggauuguauaaugacuucuuaucaauacuuagucauccaaaacacuacaugggaagaucacugccaauuuucuagaccauccccaauuggauaucugggacuacuuucccaaagaacaagagacauauacaucuccagaagacuauuaggaacauucacauggaccuuaucagacucagaaggaaacgaaacaccaggugguuacugccuaaccagauggaugcuaauagaagcagaacuaaaaugcuuuggaaacaccgcagucgcaaaauguaacgaaaaacacgacgaagaauucugcgauaugcuaagacuauuugacuucaauaaacaagccauaagaagauuaaaaacugaagcacaaaugucaauacaacuaauaaacaaagcaguaaacgcacucauaaacgaccaauuaauaaugaaaaaccacuuacgagacauaaugggcaucccauacugcaacuauucaaaauacugguaccucaaucauacaguaacaggaaaaacaucacuaccaagaugcuggcucguauccaacggaucauacuuaaacgaaacacacuuuucagacgacaucgaacaacaagcagacaauaugauaacagaacuacuccaaaaagaauauauagauagacaaggaaaaaccccacuaggacuagucgaccuauucgucuucagcacaagcuucuaccuaauauccauuuuccuucaucucguaaaaauacccacucacagacacauaacuggaaaaccaugcccaaaaccacacagauuaaaccacaugggaauaugcucauguggacuauacaaacacccagguguuccaguaaaauggaaaagauaaggacuaguuauaagacugacuagcccgaugggccucccaacgggcccuccuccccuccuugcaccgagauuaauaaaaaaaaaaaaaaaaaaaaaaaaaaaaaaaaaaaaaaaaaaaaaaaaaaaaaaaaaaaaaaaaugcaucccccccccccccccccccccccccccccccaaaggcucuuuucagagccaccagaauu

SEQ ID NO: 3514 - RNA, 1690 nt, Artificial Sequence
  mRNA product Design i-3 comprising derived and/or modified sequence from LASV(Lassa virus/H.sapiens-wt/NGA/2016/ISTH_0009;Clade II)__AVO03571__GPC (opt6)
gggagaaagcuuaccaugggccaaauaauaacauucuuccaagaaguaccacacguaauagaagaaguaaugaacauuguauuaauagcacuaucacuacuagcaaucuuaaaaggaauauacaacguagccacaugcggacuacuaggacuagucucauuccuauuacuaugcggaagaucuugcucaacaacauacaaaggcguauacgaacuacaaacauuagaacuagauauggcaucucuaaacaugacaaugccauuaagcugcacaaaaaauaauucacaccauuacauaaugguaggcaacgaaacaggcuuagaacucacauuaacaaauaccucaaucauaaaucauaaauucugcaaucuaucagacgcacauaaaaaaaaccuuuaugaccacgcacuaaugucaauaauaucaacauuccacuuaucuauaccaaauuuuaaucaauaugaagcaaugucuugcgauuuuaacggaggaagaauaucaguccaauacaaucucucacacuccuacgcaguagacgcagcaaaccauugugggacaauagcaaacggaguacuacaaacauuuaugcgaauggcauggggugguaguuacauagcacuagacucaggaaaaggcucaugggacugcauaaugacaucauaccaauaccucauaauacaaaacaccaccugggaggaccacugccaauucucacgaccaucaccaauaggauauuuaggucuucucagucaaagaacaagagacauauauauaucuagaagacuacuaggaaccuucacauggacacuaucagacucagaagggaaugaaacaccaggaggauacugcuuaacaagauggauguuaauagaagcagaacuaaaaugcuucgguaacacagcaguagcaaaaugcaacgaaaaacacgacgaagaauucugcgacaugcuuagacuguucgauuucaauaaacaagcaauaaggagauuaaaaacagaagcacaaaugucaauacaauuaauaaacaaagcaguaaaugcauuaauaaacgaccaacucauaaugaaaaaucacuuaagagauauaaugggaauaccauacuguaacuacucaaaauacugguaucuaaaccauaccguaacaggcaaaaccucauuaccaagaugcugguuaguaucaaacggcuccuacuuaaacgaaacccacuucucagacgauauagaacaacaagcagacaacaugauaacagaacuacuccaaaaagaauacauagaucgacaaggaaaaacaccacuaggucuaguagaccuauucguauucucaacaagcuucuaccuaauaucaaucuuucuacaccuaguaaaaauaccaacacacagacacauaacagguaaaccaugcccaaaaccccauagacuaaaccacaugggcauauguucauguggcuuauacaaccacccaggaguaccaguaaaauggaaacgauaaggacuaguuauaagacugacuagcccgaugggccucccaacgggcccuccuccccuccuugcaccgagauuaauaaaaaaaaaaaaaaaaaaaaaaaaaaaaaaaaaaaaaaaaaaaaaaaaaaaaaaaaaaaaaaaaugcaucccccccccccccccccccccccccccccccaaaggcucuuuucagagccaccagaauu

SEQ ID NO: 3515 - RNA, 1690 nt, Artificial Sequence
  mRNA product Design i-3 comprising derived and/or modified sequence from LASV(Lassa virus/H.sapiens-wt/NGA/2016/ISTH_0017;Clade II)__AVO03567__GPC (opt6)
gggagaaagcuuaccaugggacaaauaauaaccuucuuucaagaaguaccacacgucauagaagaaguaaugaacauagucuuaauugcacucucacuacuugcaauauuaaaaggaaucuacaaugucgcaacaugcggacuauuugggcuaguaaguuuucuauuauuaugcggccgauccugcuccacaacauacaaaggaguauacgaacuacaaacacuagaauuagauauggcauccuuaaacaugacaaugcccuuauccugcacuaaaaauaacucacaccacuacauaaugguaggcaaugaaacaggcuuagaauuaacacuaaccaauacaaguauaauaaaucacaaauucugcaaucuaucagaugcacacaaaaaaaaccuuuaugaccaugcauuaaugagcauuauauccaccuuccaccuuucaauaccuaacuucaaccaauacgaagcaaugucgugcgacuucaauggcggaaaaaucucaguacaauauaaccucucacacacauacgcaauagacgccgcaaaccacugcgggacuauagcaaacggaguacuacaaacauuuaugagaauggcauggggaggcucauacauagcacuagacucaggaaaaggaucaugggauugcauaaugacaucauaccaauaccuaaucauacaaaacaccacaugggaagaucauugccaauuuucaagacccucaccaauaggauaccuaggacuauuaucacaaagaacacgugacaucuacauaucaagacgacuacucggaacauucacauggacuuuaucagauuccgaagguaacgaaacccccggagguuacugccuaacaagauggaugcuaauagaagcagaauuaaaaugcuucggaaacacagcaguagcaaaauguaacgaaaaacacgaugaagaauucugugacaugcuaagacuauuugacuucaacaaacaagcaaucagaagacuaaaaacagaagcacaaaugucaauacaacuaauaaauaaagcaguaaacgcucuaauaaaugaccaacuaauaaugaaaaaccaccucagagacaucaugggaauaccauauugcaauuauuccaaauacugguaccuaaaccauaccguuacaggcaaaacaucauuaccaagauguuggcuaguaucaaauggcucauaucuaaacgaaacccacuucucagacgacauagaacaacaagcugacaacaugauaacugaacuauuacaaaaagaauacauggaccgccaaggcaaaacaccucuaggccuaguagaucucuucguauuuucaaccaguuuuuaccuaauaucaauauuccuacaccuaguaagaauaccaacucacagacacguaauaggaaaaccaugcccaaaaccacauagacuuaaccauauggguauaugcucauguggauuauacaaacaccccggcguaccaguaaaauggaaaagauaaggacuaguuauaagacugacuagcccgaugggccucccaacgggcccuccuccccuccuugcaccgagauuaauaaaaaaaaaaaaaaaaaaaaaaaaaaaaaaaaaaaaaaaaaaaaaaaaaaaaaaaaaaaaaaaaugcaucccccccccccccccccccccccccccccccaaaggcucuuuucagagccaccagaauu

SEQ ID NO: 3516 - RNA, 1690 nt, Artificial Sequence
  mRNA product Design i-3 comprising derived and/or modified sequence from LASV(Lassa virus/H.sapiens-wt/NGA/2018/ISTH_0959;Clade II)__AVV65099__GPC (opt6)
gggagaaagcuuaccaugggccaaauuauaacauucuuccaagaaguaccacauguaauagaagaaguaaugaacaucguauuaauugcacucucauuauuagcuauacucaaagguaucuacaacgucgucacaugcggacuauucggccuaguuucauucuuacuccuuuguggaagaucaugcagcacaacauacaaaggaguauacgaacuacaaaccuuagaacuagauauggcaucacuaaacaugacaaugcccuuauccugcacaaaaaauaacucacaccauuacauaauggucggaaacgaaacaggauuagaauuaacauuaacaaacacauccauaauaaaucauaaauucuguaaccucucagacgcacauaaaaaaaaucuauaugaucacgcauuaaugucaaucaucucaacauuccaccuuucaauaccaaauuucaaccaauacgaagcaaugucaugcgacuucaacgguggaaaaauaucuguacaauacaauuuaucacacgccuaugcaauagaugcagcaaaucacugcggaacaaucgccaacggaguauuacaaacauucaugagaauggcauggggaggaucauacauugcacuagacucaggcaaaggaucuugggacuguaucaugacaucauaucaauacuuaauaauacaaaacacaacaugggaagaccacugccaauucucacgaccaucacccauaggauacuuaggacuacuaucacaacgaacacgagacauauacauaucaagacgacuauuaggaacauuuacuuggacacuauccgacucagaaggaaacgaaaccccugguggauauugucuaaccagauggaugcucauagaagcagaacuaaaaugcuuuggaaacaccgcaguagccaaaugcaacgaaaaacacgacgaagaauucugcgacauguuacgacuauucgauuuuaacaaacaagcaauacgaagacuaaaaacagaagcacaaaugucaauacaacuaauaaacaaagcaguaaacgcacuaauaaacgaccaacuaauaaugaaaaaccacuuacgagacauaaugggaauacccuacugcaacuacucaaaauacugguauuuaaaccacacaguaaccggaaaaacaucacuaccccgauguugguuaguauccaacggaucauaucucaacgaaacacacuucucagaugacauagaacaacaagcagacaacaugauaacagaacuccuucaaaaagaauacauagauagacaaggaaaaacaccucuaggacuaguagacuuauucguauucuccacuucauucuaucuaauaaguauuuucuuacaucuuguuaaaauaccaacacacagacacguuauaggaaaacccuguccaaaaccacacagacuaaaccauaugggcaucuguucaugcggacuauacaaacacccaggaguacccguuaaauggaaaagauaaggacuaguuauaagacugacuagcccgaugggccucccaacgggcccuccuccccuccuugcaccgagauuaauaaaaaaaaaaaaaaaaaaaaaaaaaaaaaaaaaaaaaaaaaaaaaaaaaaaaaaaaaaaaaaaaugcaucccccccccccccccccccccccccccccccaaaggcucuuuucagagccaccagaauu

SEQ ID NO: 3517 - RNA, 1690 nt, Artificial Sequence
  mRNA product Design i-3 comprising derived and/or modified sequence from LASV(LASV003-NIG-2008;Clade II)__AIT17580__GPC (opt6)
gggagaaagcuuaccaugggacaaauaauaacauucuuccaagaaguaccacauguaauagaagaagucaugaacauaguacuaauagcuuuaucauuacuagcaauacuaaaaggcauauacaacguugcaacaugcggauuauucggauuaguuuccuucuuacuacuauguggaagaucauguucaacaacauauaaaggagucuacgaacuccaaacacuagaauuagacauggcaagucuaaauaugacaaugccauuaucaugcaccaaaaacaacucacaccacuacauuauggucggaaacgaaacaggacucgaacucacacuaacaaacaccucuauaaucaaucacaaauucugcaaccuaucggaugcccacaagaaaaaucuauacgaucacgccuuaauguccauuauaucaacauuccaucucucaauaccaaacuucaaucaauacgaagcaaugucaugugauuucaacgguggcaaaauaucaguacaauacaauuuaucccauacauacgccguagacgcagcaaaccauugcggaacgauagccaacggcguauuacaaaccuucaugagaauggcuuggggaggaucauauauagccuuagacucaggaaaaggauccugggacugcauaaugacaucauaccaauauuuaauaauacaaaacacaaccugggaagaccauugccaauucaguagaccaucacccauaggcuacuuaggauuauuaucacaaagaacucgagacauauacauaaguagaagacuacuaggaacauucacauggacacuaucagauagugaaucaaaugaaacaccaggaggauauugccuaacaagauggauguuaauagaagcagaacuaaaaugcuuuggaaauacagcaguagccaaauguaaugaaaaacaugaugaagaauuuugugauaugcuaagacuuuucgacuucaacaaacaagcuauucgaagauuaaaagcagaagcacaaauguccauacaauuaauaaacaaagcaguuaacgcuuuaauaaacgaccaacuuauaaugaaaaaccaccuaagagacauaaugggaauaccauacuguaacuacuccaaauacugguaccuaaaccacacagucacaggaagaaccaguuuaccacgaugcuggcuaguaucaaacgguagcuaucuaaaugaaacucacuucucagacgacaucgaacaacaagcagacaacaugauaacagaauuauuacaaaaagaauacauggauagacaaggaaaaacaccacuaggauuaguugaccuauucgucuuuuccacaaguuucuaucuaauauccauauuucuacaccucguaaaaauuccuacacacagacauguaauaggcaaacccugcccaaaaccccauagauuaaaccacaugggaauaugcuccugcggauuauacaaacacccaggaguaccuguaaaauggaaaagauaaggacuaguuauaagacugacuagcccgaugggccucccaacgggcccuccuccccuccuugcaccgagauuaauaaaaaaaaaaaaaaaaaaaaaaaaaaaaaaaaaaaaaaaaaaaaaaaaaaaaaaaaaaaaaaaaugcaucccccccccccccccccccccccccccccccaaaggcucuuuucagagccaccagaauu

SEQ ID NO: 3518 - RNA, 1690 nt, Artificial Sequence
  mRNA product Design i-3 comprising derived and/or modified sequence from LASV(LASV035-NIG-2009;Clade II)__AIT17588__GPC (opt6)
gggagaaagcuuaccaugggucaaauaauaaccuuuuuucaagaaguaccacacguaauagaagaaguaaugaacauaguacuaauagcacucucccuauuagcaauacucaaaggcauuuacaacguagcaacuuguggacuauuuggauuaguaucuuuucuacuauuauguggaagauccugcucaacaaccuauaaagguguauacgaacuacaaaccuuagaauuagauauggcaucacuaaacaugacaaugcccuuaucaugcacaaaaaacaacucgcaccauuauauaaugguaggaaaugaaacgggauuagaacuaacccuaacaaauacaucaauaauaaaccacaaauuuuguaacuuaucugacgcacacaaaaaaaaucucuaugaccaugcacuaaugucaauaaucucaaccuuucacuuauccauaccaaauuucaaucaauacgaagcaaugucaugcgacuucaacggcggaaaaauauccguucaauacaauuuaucacacgcauacgccguagacgcagcuaaccacugcggcacaauagcaaauggaguacuacaaacauucaugagaauggcauggggaggcuccuacauagcacuagauucagguaaaggaucaugggacugcauuaugacaucauaccaauacuuaauaauacaaaauacaacaugggaagaucacugccaauucucaagaccauccccaauaggcuaucucggacuacuaagucaaagaacaagagacauauacauaucacgcagacuauuaggaaccuucacauggacuuuaagugacagcgaaggaaacgaaacaccaggagguuacugucuaaccagauggauguuaauagaagcagaauuaaaaugcuuuggaaacacagcaguagcaaaaugcaacgaaaaacaugacgaagaauucugugacaugcuacgacuauuugacuuuaacaaacaagcaauaagaagacuaaaagcagaagcacaaaugucaauacaacuaaucaacaaagcaguuaaugcucugauaaacgaccaacucaucaugaaaaaccaccuacgagacauaaugggaauacccuacugcaacuacucaaaauacugguaccuuaaucacacgguuacaggcaaaacuucacuaccaagaugcugguuaguauccaacggaucauaucuaaacgaaacacauuuuuccgacgacauagaacaacaagcagacaauaugauaacagaacuauuacaaaaagaauacauagauagacaagguaaaacaccacuaggacuaguagauuuauucguauucaguacauccuuuuacuuaauaucaauuuuccuccaucuaguaaaaaucccaacacaccgacacguaauaggaaaaccaugcccaaaaccccacaggcuaaaccacaugggaauaugcaguugcggauuauacaaacauccugguguaccuguaaaauggaaaagauaaggacuaguuauaagacugacuagcccgaugggccucccaacgggcccuccuccccuccuugcaccgagauuaauaaaaaaaaaaaaaaaaaaaaaaaaaaaaaaaaaaaaaaaaaaaaaaaaaaaaaaaaaaaaaaaaugcaucccccccccccccccccccccccccccccccaaaggcucuuuucagagccaccagaauu

SEQ ID NO: 3519 - RNA, 1690 nt, Artificial Sequence
  mRNA product Design i-3 comprising derived and/or modified sequence from LASV(LASV1000-NIG-2009;Clade II)__AIT17782__GPC (opt6)
gggagaaagcuuaccaugggacaaauaauaacauucuuccaagaaguaccucacguaaucgaagaagucaugaauauuguccuaauagcacucucauuacuugcaauacuaaaaggaauauauaacguugcaacaugcggucuauucggcuuaguaucuuuuuuacuacuauguggcagaucuugcuccacaacguacaaaggaguauaugaacuacaaacauuagaauuagacauggcaucacuaaauaugacaaugccauuaucaugcacuaaaaacaacucacaccacuacauuauggucggcaacgaaacaggauuagaacuaacccuaacaaacacaucaauaauaaaccauaaauucuguaaucuaucagaugcacacaaaaaaaacuuauacgaccacgcuuuaaugucaauuauaucuacauuccauuuaucaauacccaauuuuaaccaauacgaagcaaugucaugcgacuucaacggaggaaaaaucucaguacaauauaauuuaucccacaccuacgcaguagaugccgcaaaccauugcggcacaauagcaaauggaguccuacaaacauuuaugcgaauggcaugggguggcucauacauagcccuugacucaggaaaaggaucaugggauugcauaaugacauccuaccaauauuuaauaauacaaaacacaacuugggaagaucacugccaauuuucaagacccaguccaaucggauacuuaggacuauuaucacaaagaacacgagauauauacaucagcagaagauuauuaggaacauucacauggacacuaucagauucagaaggcaaugaaaccccaggaggcuacugccuaacaagauggaugcucaucgaagcagaauuaaaaugcuuuggaaauacagcaguagcaaaauguaacgaaaaacacgacgaagaauucugcgacaugcuacgauuauuugacuucaacaaacaagccauaaaaagacuaaaaacagaagcacaaaugucaauacaauuaauaaacaaagccguaaacgcacuaaucaacgaucaauuaaucaugaaaaaucaccuuagagacauaaugggaaucccauauugcaacuacucaaaauacugguacuuaaaucacaccguaacuggaaaaacaucauuaccaagaugcuggcuaguaucaaauggcucauaccucaaugaaacccacuucucagacgacaucgaacaacaagcugacaacaugauaacugaacuauuacaaaaagaauacauugaccgacaaggaaaaacaccauuaggauuaguagaccucuuuguauuuucaacaucauucuaccuaaucucaauauucuuacauuuaguaaaaauuccaacacacagacacguaguaggaaaaccaugcccuaaaccccacagauuaaaccacaugggaauauguagcugcgguuuauacaaacacccaggaguaccaguuaaauggaaaagauaaggacuaguuauaagacugacuagcccgaugggccucccaacgggcccuccuccccuccuugcaccgagauuaauaaaaaaaaaaaaaaaaaaaaaaaaaaaaaaaaaaaaaaaaaaaaaaaaaaaaaaaaaaaaaaaaugcaucccccccccccccccccccccccccccccccaaaggcucuuuucagagccaccagaauu

SEQ ID NO: 3520 - RNA, 1690 nt, Artificial Sequence
  mRNA product Design i-3 comprising derived and/or modified sequence from LASV(LASV221-NIG-2010;Clade II)__AIT17624__GPC (opt6)
gggagaaagcuuaccaugggacaaaucauaaccuuuuuccaagaaguaccacacguaauugaagaaguaaugaauauaguacucaucgcccuaucacuacuagcaauacuaaaaggaauauacaacgucgcaacaugcggauuauuuggacuaguaucuuuucuauuacuaugcggcagaucaugcucaacaacauacaaaggcgucuacgaauuacaaacacuagaacuagauauggcaucucucaacaugacaaugccacuaucaugcacaaaaaauaacucccaccacuacauaaugguaggaaacgaaacuggacuagaacuaacucuaacaaacacuucaauuauaaaccacaaauucugcaaccuaucagacgcacacaaaaaaaaccuauaugaccaugcccuuauguccauaauaucaacauuccaccuaucaauaccuaacuuuaaccaauacgaagcaaugucuugcgacuucaauggagguaaaauaucaguacaauauaaccuaucacacacuuaugcaauagaugccgcaaaccacugcggaacuauagcaaacgguguauuacaaacauucaugagaauggcauggggcggaucauauaucgcacuagauucaggaaaaggcucuugggacuguaucaugacaucuuaccaauaccuaauaauacaaaacaccacaugggaagaccacugucaauucucacgacccucacccauaggauaccuuggacuacuaagccaaagaacacgcgauauauacauaucaagacgucuacugggaacauuuacauggacacuaagugauucagaaggaaacgaaacaccaggcggauacugcuuaacuagguggaugcuaauagaagcagaacuaaaauguuuuggcaauacagcaguagcaaaaugcaacgaaaaacacgacgaagaauuuugcgacaugcuaagauuauucgacuucaauaaacaagcaauacgaagauuaaaaacagaagcacaaaugucuauucaacuaaucaauaaagcaguaaaugcacuaauaaacgaccaacucauaaugaaaaaccauuuaagagacauaaugggaauaccauacugcaacuauuccaaauacugguacuuaaaccacacaguaaccggaaaaacaucacucccaagauguugguuaguaucaaacggauccuaccuuaaugaaacacauuuuucagacgauauagaacaacaagcagauaacaugauaacagaaaugcuccaaaaagaauacauggauagacaaggaaaaacaccacucggacuagucgaucuuuucguauucucuacaucauucuacuuaauaucaaucuucuuacaucuugucaaaaucccuacucaccgacacguuaucggaaaacccugcccaaaaccacaucgauuaaaccacaugggaauaugcuccugcggacuauacaaacacccaggaguaccagucaaauggaaaagauaaggacuaguuauaagacugacuagcccgaugggccucccaacgggcccuccuccccuccuugcaccgagauuaauaaaaaaaaaaaaaaaaaaaaaaaaaaaaaaaaaaaaaaaaaaaaaaaaaaaaaaaaaaaaaaaaugcaucccccccccccccccccccccccccccccccaaaggcucuuuucagagccaccagaauu

SEQ ID NO: 3521 - RNA, 1690 nt, Artificial Sequence
  mRNA product Design i-3 comprising derived and/or modified sequence from LASV(LASV237-NIG-2010;Clade II)__AIT17638__GPC (opt6)
gggagaaagcuuaccaugggucaaaucauaaccuucuuucaagaaguuccacaugucaucgaagaaguaaugaacauaguacuaauagcauuauccuuacuagcaauauuaaaaggaaucuacaacguagcaacuugcggcuuauucggacuagucuccuucuuacugcuauguggcagaucauguucaacaacuuacaaaggagucuacgaacuacaaacauuagaacuagacauggcaaguuuaaacaugacaaugccacuaucuugcaccaaaaauaauucccaucacuacauaauggucggcaacgaaacaggacuagaacucacacuaacaaauacaucaauaauuaaccacaaauuuugcaaccucucagaugcacacaaaaaagaccuauacgaccacgcacuaauguccauaauaucaacauuucauuuaucuauaccaaacuucaaccaauacgaagcaaugucuugcgauuucaauggaggaaaaauaucaguacaauacaaccuaucccacacauaugccguagacgcagcuaaccauugcggaacaauagcaaauggaguacuacaaacauucaugagaauggcauggggaggaucauacaucgcacucgacuccggaaaaggaucuugggacugcaucaugaccucuuaccaauaccuaauaauucaaaauacaaccugggaagaccauugccaauucucaagacccucaccaauaggauaucuaggacuacuaucacaaagaaccagagacauauacauaucccgacgacuacuaggaacauucacauggacauuaucagauucagaaggaaacgaaacaccaggaggcuauugcuuaaccagauggaugcuaauagaagcagaacucaaaugcuucggaaacacagcaguugcaaaaugcaacgaaaaacacgacgaagaauuuugugacauguuaagauuauuugacuucaacaaacaagcaauacgaagauuaaaaacagaagcacaaaugucaauacaacuaaucaacaaagcaguaaacgcacuaauaaacgaccaauuaauaaugaaaaaccauuuacgagauaucaugggcauaccuuacugcaauuacucaaaauacugguaccuaaaccacacaguaacaggaaaaaccucccuaccaagauguugguuaguaucaaacggcuccuauuuaaaugaaacacacuucucagaugacauugaacaacaagcagacaacaugauaacagaacuacuucaaaaagaauacauggacagacaagguaaaacaccacucggucuaguagacuuauucguauuuagcaccucguucuaccucauaucaauauuccuacaccuuauaaaaaucccaacacacagacauauaacaggaaaaccuugcccaaaaccacacagauuaaaccauauggguaucugcucauguggacuauacaaacacccaggcguuccaguaaaauggaaacguuaaggacuaguuauaagacugacuagcccgaugggccucccaacgggcccuccuccccuccuugcaccgagauuaauaaaaaaaaaaaaaaaaaaaaaaaaaaaaaaaaaaaaaaaaaaaaaaaaaaaaaaaaaaaaaaaaugcaucccccccccccccccccccccccccccccccaaaggcucuuuucagagccaccagaauu

SEQ ID NO: 3522 - RNA, 1690 nt, Artificial Sequence
  mRNA product Design i-3 comprising derived and/or modified sequence from LASV(LASV253-NIG-2011;Clade II)__AIT17670__GPC (opt6)
gggagaaagcuuaccaugggacaaauaauaacuuucuuucaagaaguaccccauguaauagaagaaguaaugaacauaguacuaaucgcccuauccuuacuagcaauacuaaaaggaauauacaacguagcaacaugcggauuauucggccuuguaucauuucuacucuuaugcggcagauccuguucaacaacauacaaaggaguauacgaacuacaaacacuagaacuagacauggcaucacuaaauaugacaaugccauuaagcugcacaaaaaacaacucucaccacuacauaaugguaggaaaugaaacaggacucgaacucacacuaacaaauaccucuaucauaaaccacaaauucugcaaucuaucagaugcccacaaaaaaaaccuauaugaucaugcauuaauguccauaauaucaacauuccaucuaucaauucccaacuuuaaccaauacgaagcaaugucaugcgacuuuaacggcggaaaaauaucuguacaauauaaucuaucccacacuuaugcagucgaugccgcaaaucacugcgguaccauagcaaauggaguacuccaaacauucaugcgcauggcuuggggcggaucauacaucgcacuagauuccggaaaaggaucaugggacugcauaaugacaucuuaccaauaucuuaucauacaaaauacuaccugggaagaucacugccaauuuucaagaccgucaccaauaggauaucucggauuacuaucacaacgaaccagagacauauauauaucaagaagacuacuaggaaccuucacauggacauuaagcgauucugaaggaaaugaaacuccagguggauauugccuaacaagauggauguuaauagaagccgaauuaaaaugcuucggaaauacagcaguugcaaaauguaacgaaaaacaugacgaagaauucugugacaugcuaagauuauucgacuucaacaaacaagcaauaagaagacuaaaagcagaagcacaaaugucaauacaacuaauaaauaaagcaguaaaugcucuaauaaaugaccaauuaauaaugaaaaaccaccuuagagacauaaugggaauacccuacuguaacuacucaaaauacugguaccuaaaccacacagucacaggacgcacgucacuaccccgaugcuggcuaguaucaaacggcucuuaccuaaacgaaacacacuucagcgacgacauagaacaacaagcagacaacaugaucaccgaauuauuacaaaaagaauacauagacagacaaggaaaaacaccacuaggccuaguagaccucuuugucuucucaacaucauuuuaccuaauaucaauauuccuacauuuaguuaaaauacccacccauagacacaucauaggaaaacccugccccaaaccacaccgacuaaaccacaugggaauaugcucaugugguuuauacaaacaucccggaguaccaguaaaauggaaaagauaaggacuaguuauaagacugacuagcccgaugggccucccaacgggcccuccuccccuccuugcaccgagauuaauaaaaaaaaaaaaaaaaaaaaaaaaaaaaaaaaaaaaaaaaaaaaaaaaaaaaaaaaaaaaaaaaugcaucccccccccccccccccccccccccccccccaaaggcucuuuucagagccaccagaauu

SEQ ID NO: 3523 - RNA, 1690 nt, Artificial Sequence
  mRNA product Design i-3 comprising derived and/or modified sequence from LASV(LASV254-NIG-2011;Clade II)__AIT17674__GPC (opt6)
gggagaaagcuuaccaugggacaaauaaucacauucuuucaagaaguaccacauguaauagaagaaguaaugaacauaguucuuauagcacucucauuacuagcaauauuaaaaggaauauacaacguagcuacaugcggccucuuuggacuaguaucauuccuccuccuaugcggaagaucuugcucaacaacauacaaagguguauacgaacuacaaacauuagaauuagacaugacaaaucuuaacaugacaaugccacuauccuguaccaaaaauaacucccaccacuauauuaugguaggaaaugaaacaggacuagaacucacacuaacaaacacaucaauaauaaaccacaaauuuugcaaccuaucugaugcccacaaaaaaaacuuauacaaccacgcacuaaugucaauaauaucaacauuccacuuaucaauaccaaauuuuaaccaauaugaagcaauguccugcgacuucaacggaggaaaaaucucaguacaauauaaccuaucccacucauacgcaguagacgcagcaaaucauugcggaacaauagcaaacggaguccuacaaacauuuaugcgcauggcauggggaggaucuuacaucgcauuagacuccggaaaaggaaauugggacuguauuaugacaucuuaccaauaucuaaucauacaaaacacaacaugggaagaccacugccaauuuaguagacccucacccauaggauaccuaggauuacucucucaaagaacaagagauauauacauaucccgccgcuuacucggaaccuucacuuggacacucucagacucagaaggaaacgaaacaccaggaggauacugccuuacaagauggaugcuaauagaagcagaauuaaaauguuucggaaacacagcaguagcuaaaugcaaugaaaaacacgacgaagaauucugugacaugcuaagacuauucgacuucaacaaacaagcaauacgaagacuaaaaaccgaagcacaagcaaauauacaacucaucaacaaagcaguaaacgcacuuauaaaugaccaauuaauaaugaaaaaccaccucagagacaucaugggaauaccuuauugcaacuauucaaaauauugguaccuuaaccacacagucacagguaaaacaucccuaccaagauguuggcucgucucaaauggauccuaccuaaacgaaacccacuucucugacgauauagaacaacaagcagacaauaugauaacugaacuccuacaaaaagaauacauggacagacaaggaaaaacaccacuaggacucguagaccuauucguauuuucaacaucuuucuacuuaauauccauauuccuacaccuaguaaaaauaccaacccacagacacgucauaggaaaaccaugcccuaaaccacaucguuuaaaucacaugggaauauguucauguggauuauauaaacauccagguguaccaguaaaauggaaaagauaaggacuaguuauaagacugacuagcccgaugggccucccaacgggcccuccuccccuccuugcaccgagauuaauaaaaaaaaaaaaaaaaaaaaaaaaaaaaaaaaaaaaaaaaaaaaaaaaaaaaaaaaaaaaaaaaugcaucccccccccccccccccccccccccccccccaaaggcucuuuucagagccaccagaauu

SEQ ID NO: 3524 - RNA, 1690 nt, Artificial Sequence
  mRNA product Design i-3 comprising derived and/or modified sequence from LASV(Nig08-A19;Clade III)__ADU56618__GPC (opt6)
gggagaaagcuuaccaugggacaaaucguaacauucuuucaagaaguaccacacguaauagaagaagucaugaacauaguuuuaauagcccucucaauacuagcaauauuaaaaggcuuauacaacauagccaccugcggacuaauaggacuagucacauuccuccuacuaagcggcagaucuugcucaaugacauauaaaggaguauacgaauuacaaacccuagaacuaaauaugaauacauuaaacaugacaaugccacuaucaugcacaaaaaauaacucucaccauuacauaaugguuggaaacgaaacaggacuagaauuaacacuaacaaacaccagccuuuuacaccacaaauucugcaaccuauccgacgcacacaaaaaaaacuuauaugaccauacccuaaugucaauaaucuccacauuucaucuaucaauaccaaauuucaaccaauacgaagcaaugucaugcgacuucaacggaggaaaaauaacaguacaauacaaucuuucucacucauaugcaaucgaugcagcuaaccauugcggaacaguagcaaacggaguacuacaaacauucaugcgaauggcauggggagguucauacauugcucucgauucaggaagaggcaaaugggacuguaucaugacuucauaccaauaccuaaucauccaaaacacaacaugggaagaccacugccaauucucacgcccaucaccaauaggcuaccucggcuuacuaucccaaagaaccagagauauauacauaucaagaagacuacuaggaacauucacauggacucuuuccgacuccgaaggaaacgaaacaccaggaggcuacugccuaacacgauggauguuaauagaagcagaauuaaaaugcuucggcaacacugccgucgcuaaaugcaacgaaaaacaugaugaagaauuuugcgacaugcucagacuauucgacuucaauaaacaagcaaucagaagacuaaaagcagaagcucaaaugucaauccaacuaauaaacaaagcaguaaacgcucuaauaaaugaucaacuaauaaugaaaaaccaccuaagagacauaaugggaaucccauacuguaauuacucaaaauacugguaccuaaaucacacauccacuggaagaacaucacugccaagaugcugguuaguauccaacggaucauaucuaaaugaaacacacuucucagaugacauagaacaacaagcagacaauaugauaacagaaauguuacaaaaagaauaccuagauagacaaggaaaaacaccccuagguuuaguugacuuauucgucuucagcacaucuuucuaccuaauauccauauuccuccaucuaguaaaaauaccaacacacagacacauaguaggaaaaccaugcccaaaaccccaucgccuaaaccauaugggcauaugcucaugcggacuauacaaacaaccaggagucccagucagauggaaaagauaaggacuaguuauaagacugacuagcccgaugggccucccaacgggcccuccuccccuccuugcaccgagauuaauaaaaaaaaaaaaaaaaaaaaaaaaaaaaaaaaaaaaaaaaaaaaaaaaaaaaaaaaaaaaaaaaugcaucccccccccccccccccccccccccccccccaaaggcucuuuucagagccaccagaauu

SEQ ID NO: 3525 - RNA, 1693 nt, Artificial Sequence
  mRNA product Design i-3 comprising derived and/or modified sequence from LASV(G1180-SLE-2010;Clade IV)__AIT17168__GPC (opt6)
gggagaaagcuuaccaugggacaaauaguaacauucuuccaagaaguaccacauguaauugaagaaguaaugaauauaguacuaaucgcucuaucuauccucgcaguacuaaaaggauuauauaacuucgcaacuuguggacuagucggcuuacuaacuuuccuccuauuaugcggacgaucuugcacagcaucaagauauaaaggaguuuacgaacuacaaacccuugaauuaaacauggaaacacuaaauaugacaaugcccuuaagcuguacaaaaaacaauucucaucauuacauaaugguaggaaacgaaacaggauuagaauuaacauuaacaaauacauccauaauaaaccauaaauucugcaauuuaucagacgcacacaaaaaaaaccucuacgaccaugcacuuaugucaauuauaucaacauuccacuuaucaauacccaacuucaaucaauacgaagcaaugucuugcgacuucaauggaggaaaaauaucaguacaauacaauuuaucccauucauaugcaggagacgcagcaaaccauugcggaacaguugccaacggaguccuacaaacauuuaugcgaauggcauggggaggaucauauaucgcacuagacaguggacacggaucaugggacugcauaaugacaagcuaccaauaucuaaucauacaaaauacuacaugggaagaccacugccaauucagccgaccaagcccaauaggauaucuaggccuacucucacaacgcacaagagauauauacauaucaagaagauuacuaggaacauuuacauggacauugucagacucugaaggaaaagacacaccaggagguuauugccuuacaagauggauguuaauagaagcagaauuaaaaugcuuuggaaacacggcuguagcuaaaugcaacgaaaaacacgaugaagaauucugcgauauguuaagacuauuugauuuuaacaaacaagcaauccaaagacuaaaagcagaagcacaaaugucaauacaacuaaucaacaaagcagucaaugcauuaauaaaugaccaacuuauaaugaaaaaucacuuaagagacauaaugggcauaccauacuguaauuacucaaaauauugguaccuaaaucacacaaccacaggaaaaacuagccuaccaaaaugcugguuaguaucaaauggaucuuacuuaaaugaaacacacuucucugacgauauagaacaacaagcugacaacaugauaacagaaaugcuccaaaaagaauacauggaaagacaaggaaaaacaccacuuggauuaguagaccuauucguauucagcaccuccuuuuauuuaauaucaauauuccuacaccucguaaaaauaccaacacauagacauaucgucggaaaaagcugcccaaaaccacaccgacuaaaucacaugggaauaugcucguguggccuauauaaacaaccaggagucccaguaaaauggaaaagauaaggacuaguuauaagacugacuagcccgaugggccucccaacgggcccuccuccccuccuugcaccgagauuaauaaaaaaaaaaaaaaaaaaaaaaaaaaaaaaaaaaaaaaaaaaaaaaaaaaaaaaaaaaaaaaaaugcaucccccccccccccccccccccccccccccccaaaggcucuuuucagagccaccagaauu

SEQ ID NO: 3526 - RNA, 1693 nt, Artificial Sequence
  mRNA product Design i-3 comprising derived and/or modified sequence from LASV(G1442-SLE-2011;Clade IV)__AIT17180__GPC (opt6)
gggagaaagcuuaccaugggacaaauagucacuuuuuuccaagaaguaccacauguaauagaagaaguuaugaacauaguauuaauagcauuaucuauauuagccguacucaaaggucuauacaaugucgcaacauguggacuaauagguuuagucacauucuuacuccuaugcggaagaucauguacaacaacacuauacaaaggcguauacgaacuucaaacuuuagaacuaaacauggaaacauuaaacaugaccaugccucuauccugcacaaaaaacaacucacaccauuacauuagaguaggaaacgaaacaggacuagaacuaaccuuaacgaauacaucaauaauuaaccacaaauucugcaaccuaucagacgcccacaaaaaaaaccuauaugaccacgcauuaaugucuauaaucucaacauuccaccuaucaauuccaaacuucaaccaauacgaagcaaugucaugcgauuucaauggaggaaaaauaucaguacaauauaaccuuucacacucauacgcaggagacgcagcuaaccacugcgguacagucgcaaauggaguauuacaaacauucaugcguauggcaugggguggcucauauauagcacuugauucaggaagaggaaauugggauugcauuaugacuuccuaucaauaucuaauaauacaaaauacaacaugggaugaccacugucaauucucaagaccuucaccaauaggcuaccuaggacuauuaucacaaagaacccgagauguauacauaucacgacgacuuuuaggaacauucacauggacauuaucagacucagaaggcaaagacacaccaggagguuacugucuaaccagauggauguuaaucgaagcagaacuaaaaugcuuuggaaacacugcaguagcaaaauguaacgaaaaacacgaugaagaauucugugauauguuaagacuauucgauuucaacaaacaagcaauacaacgacucaaagcagaagcacaaauguccauucaacuaauuaacaaagcaguaaacgcucuaauaaacgaccaacucaucaugaaaaaccacuuaagagauauaaugggaauccccuacugcaauuacucaaaauacugguaccuaaauaacacugcaacuggcaaaaccucauuaccaaaaugcuggcucauaucuaauggcucauauuuaaacgaaacccauuucucagacgacauagaacaagaagccgauaacaugauaacagaaauguuacaaaaagaauacauggaaagacaaggaaaaaccccacuaggauuaguagacuuauucguauuuuccacuucauucuaucuaauaucaauauuccuacaccuagucaaaauaccuacacaccgacacauaguaggaaaauccuguccaaaaccccaucgacuaaaccacauggguauaugcuccugcggacuauacaaacaaccaggagucccaguaagauggaaaagauaaggacuaguuauaagacugacuagcccgaugggccucccaacgggcccuccuccccuccuugcaccgagauuaauaaaaaaaaaaaaaaaaaaaaaaaaaaaaaaaaaaaaaaaaaaaaaaaaaaaaaaaaaaaaaaaaugcaucccccccccccccccccccccccccccccccaaaggcucuuuucagagccaccagaauu

SEQ ID NO: 3527 - RNA, 1693 nt, Artificial Sequence
  mRNA product Design i-3 comprising derived and/or modified sequence from LASV(G3010-SLE-2013;Clade IV)__AIT17344__GPC (opt6)
gggagaaagcuuaccaugggacaaauaguaacauuuuuccaagaaguaccccacguaauagaagaagucaugaauaucguguuaauugcacuaucaauccucgcaguucuaaaaggccuauacaauuucgccacauguggccuaguuggauuaguaaccuuccuauuacuauguggccgaucuuguacuaccuccuuauauaaaggagucuaugaacuacaaacacuagaacuaaauauggaaacacugaauaugacaaugccacucucauguacaaaaaacaacucacaccacuauauaaugguaggaaacgaaacaggcuuagaacuaacacuaacaaauacaagcauaauaaaccacaaauucugcaaccuuagcgaugcacauaaaaaaaacuuauacaaccacgcccuaaugucuauaauauccacauuccacuuauccauaccuaacuucaaucaauacgaagccaugucaugugacuucaauggaggaaaaaucuccguacaauacaaccuaucucauaguuacgcaggagacgcagccucucauugcggaacuguagcaaauggaguauuacaaacauucaugcgaauggcauggggaggaucauauauagcauuagauucuggauacggaaaaugggauugcaucaugacaucauaccaauacuuaauaauacaaaacaccaccugggaagaccacugucaauucucccgacccaguccaauaggauaccucgguuuauuaucacaacgaacaagagacauauacauaucaagaagauugcuaggaacauuuacauggacacuaagugauucagaaggaaaagacaccccaggaggauacugccuaacaagauggaugcuaauagaagcagaacuaaaaugcuucggaaauacagcagucgccaaaugcaacgaaaaacacgacgaagaauuuugcgacaugcuuagauuauucgacuuuaacaaacaagcuauacaaagauuaaaaaccgaagcacaaaugucaauacaauuaauaaauaaagcaguaaacgcccuaauaaacgaucaacuuauaaugaaaaaccaucuuagagacauaaugggaaucccuuacugcaacuauucaaaauauugguacuuaaaccacaccacaacaggaaaaacaucacuccccaaaugcuggcuaguauccaauggcucauaucucaacgaaacacacuucucagaugauaucgaacaacaagccgacaacaugaucacagaaaugcuucaaaaagaauacauggaacgacaaggaaaaacaccacuaggccucguggaccuauucguauucuccacaucauucuaucuaauuucuauauuccuacaucucguuaaaauaccaacacaccgacauauaguaggcaaaucauguccaaaaccacacagacuaaaccauaugggaaucuguuccuguggacucuauaaacaaccaggaguaccaguaagauggaaaagauaaggacuaguuauaagacugacuagcccgaugggccucccaacgggcccuccuccccuccuugcaccgagauuaauaaaaaaaaaaaaaaaaaaaaaaaaaaaaaaaaaaaaaaaaaaaaaaaaaaaaaaaaaaaaaaaaugcaucccccccccccccccccccccccccccccccaaaggcucuuuucagagccaccagaauu

SEQ ID NO: 3528 - RNA, 1693 nt, Artificial Sequence
  mRNA product Design i-3 comprising derived and/or modified sequence from LASV(G502-SLE-2009;Clade IV)__AIT17126__GPC (opt6)
gggagaaagcuuaccaugggacaaauaguaacauuuuuccaagaaguaccacacgucauagaagaaguaaugaauauaguauuaauagcccuuagcauccucgcaguacuaaaaggucuauacaacuucgcaacaugcggccuagucggacuacuaacauuccuauuauuauguggucgcucaugcacuacaggacucuauaaaggaguauacgaauuacaaacauuagaauuaaauauggaaacauuaaacaugacaaugccacuauccuguaccaaaaacaacucacaccauuauauaaugguaggcaacgaaacaggacucgaacuaacucuuacaaauacaucuauaauaaaccacaaauucugcaacuuaucugacgcacacaagaaaaaccuauacgaccacgcuuuaaugucaauaaucucaacauuccaucuaucaauaccaaacuucaaccaauaugaagcaaugucaugugauuucaacggaggaaaaauaucaguacaauacaaccuaucacacucauacgcaggagacgcagccgaccacugcggaacaguagcuaaugguguacuacaaacauucaugagaauggcauggggcggauccuacaucgcacuugauuccggaagaggaagaugggacugcaucaugacuucauaucaauacuuaauaauacaaaacaccacaugggaagaccauugccaauucucaagaccaucacccauaggauaccuaggcuuauuaucccaaagaacaagagacauauacauaucuagaagacuacucggaacauucacuuggacacucucugauucagaaggaaaagacacucccggaggauacugccuaacacgauggauguuaauagaagccgaauuaaaaugcuucggaaauacagcaguugcuaaaugcaacgaaaaacaugacgaagaauuuugcgauauguuaagauuauucgacuucaacaaacaagcaauccaaagacuaaaagcagaagcacaaaugucaauacaacuaauuaauaaagcaguaaacgcucuuauuaacgaucaacuuguaaugaaaaaccaucuaagagacauaauggguauuccauauuguaacuacucccguuacugguacuuaaaccacaccacaacaggaagaacaucauuaccuaaauguuggcuaguaucaaacggaucauaccuaaacgaaacacauuucuccgaugacauugaacaacaagcagacaacaugauaacagaaaugcuacaaaaagaauacauggaaagacaaggaaaaacaccacuaggccucguagaccucuucgucuucuccacuucauucuauuuaauaucaauauucuuacaccuaguaaaaauaccaacucacagacauauagucggaaaaaguugcccaaaaccacaccgccuaaaccacaugggcauuuguucauguggacucuacaaacaaccaggcguaccaguuaaauggaaacgaugaggacuaguuauaagacugacuagcccgaugggccucccaacgggcccuccuccccuccuugcaccgagauuaauaaaaaaaaaaaaaaaaaaaaaaaaaaaaaaaaaaaaaaaaaaaaaaaaaaaaaaaaaaaaaaaaugcaucccccccccccccccccccccccccccccccaaaggcucuuuucagagccaccagaauu

SEQ ID NO: 3529 - RNA, 1693 nt, Artificial Sequence
  mRNA product Design i-3 comprising derived and/or modified sequence from LASV(G733-SLE-2010;Clade IV)__AIT17154__GPC (opt6)
gggagaaagcuuaccaugggacaaaucguaaccuucuuccaagaagucccacacguaauagaagaaguaaugaauaucguacuaauagcauuaucaauacuugcaguacucaaaggacuauauaacuucgcuacaugcggaauaguaggacuaguaucauucuuauuauuaugcggacgaucaugcaccacaucauuauacaaaggagucuaugaauuacaaacacuagaauuaaacauggaaacccuaaacaugacaaugccacucucaugcacaaaaaauaacucacaucacuacauaaugguuggaaacgagacaggacuagagcuaacacuaacaaacacaucaauaauaaaccacaaauucuguaauuuaagcgacgcacacaaaaaaaaucuauacgaccacgcauuaauguccauaaucucaaccuuccacuuaucaauaccaaauuuuaaucaauacgaagcaaugucaugcgauuucaacggaggaaaaauaucaguucaauauaaccuuagucacuccuacgcaggagaugccgccaaccacugcggcacaauagcaaacgguguccuacaaacuuucaugagaauggcauggggaggaagcuacauagcauuagauagcgggagagaucgaugggacuguauaaugacuaguuaucaauauuuaauaauacaaaacaccacaugggaagaccacugccaauucucaagaccaagcccaaucgguuaccucggacucuuaucacaaagaacccgagacauauacauaucaagaagacuacuaggcacauucacauggacccuaucugacagcgaaggaaaagauacuccaggagguuacugccuuacuagauggaugcuaauagaagcagaauuaaaauguuucggaaacaccgcaguagcaaaauguaacgaaaaacaugacgaagaauucugcgacaugcuccgacuauuugauuucaacaaacaagcaauacaaagacuaaaagcagaagcacaaaugucaauacaauuaauaaauaaagcaguaaacgcccuaauaaacgaccagcuaauaaugaaaaaccacuuacgagauaucaugggaaucccauacuguaacuacucaaaauacugguacuuaaaccauacaacaacuggaaaaacaucacuaccaaaaugcugguuaguaaguaacggaucuuaccucaacgaaacacauuuuucagaugacauagaacaacaagccgauaauaugauaacagaaaugcuacaaaaagaauacauggaaagacaagguaaaacuccacuaggacuagucgaccuauucguauucaguacaucauuuuacuuaauaucaaucuuccuacaccuaguaaaaauaccuacccacagacacguaguaggaaaaucaugcccaaaaccacaucgacuaaaucacaugggaauaugcucauguggacuauacggccaaccaggaguaccaguaaaauggaaaagauaaggacuaguuauaagacugacuagcccgaugggccucccaacgggcccuccuccccuccuugcaccgagauuaauaaaaaaaaaaaaaaaaaaaaaaaaaaaaaaaaaaaaaaaaaaaaaaaaaaaaaaaaaaaaaaaaugcaucccccccccccccccccccccccccccccccaaaggcucuuuucagagccaccagaauu

SEQ ID NO: 3530 - RNA, 1693 nt, Artificial Sequence
  mRNA product Design i-3 comprising derived and/or modified sequence from MOPV/LASV reassortant(IGS-1;Clade IV)__AFY05576__GPC (opt6)
gggagaaagcuuaccaugggacaaauaguaacauucuuccaagaagucccacacguaauagaagaaguaaugaauauaguacucauagcauuaucaguccuugcaguacuaaaaggccuauauaauuucgcuacauguggccuaguuggccuaguaacauuccuauuauuauguggacgauccugcacuacaucauuauacaaaggaguauacgaauuacaaacacucgaauuaaacauggaaacacucaacaugacaaugccacuauccugcacuaaaaacaacagccaccauuauaucaugguaggaaaugaaacaggacuagaauuaacacucacaaauacaucaauaauaaaccauaaauucuguaaucuaucugacgcacacaagaaaaacuuauacgaccacgcauuaaugucuauaauuucaacauuccaucuaucuauaccaaacuucaaucaauacgaagcaaugagcugugacuucaacggaggaaaaauaucaguacaauacaaccucucacacucauacgccggagaugcagcaaaccauuguggcacaguagcuaacggaguacuacaaacauuuaugcgcauggcuuggggaggaucauauauagcccucgauucaggucgaggcaacugggacugcauaaugacaucauaccaauaccuaauaauacaaaauacaacaugggaagaucauugccaauucucaagaccauccccuauaggcuacuuaggacuacucucucaacgaacaagggacauauacaucagcagaagauuauuaggaaccuuuacuuggacuuuaagcgacucagaaggcgaagauacacccggaggauacugucuaacaagauggaugcuaauagaagcagaauuaaaaugcuuugguaacacagcaguagccaaaugcaacgaaaaacacgaugaagaauuuugcgacauguuaagacuauucgauuucaacaaacaagcaauccaaagacucaaagcagaagcacaaauguccauacaacuaaucaauaaagcaguaaacgcacuaauuaacgaccaacuaauaaugaaaaaccacuuaagagacauaaugggaauaccuuauugcaacuacucuaaauacugguaccuaaaccacacaacaacaggccguacaucauuaccaaaaugcuggcuaguaucgaacggaucauacuuaaaugaaacacauuucucagaugauaucgaacaacaagcagacaauaugauaacagaaaugcuacaaaaagaauacauggaaagacaaggaaaaacaccacuaggucuaguagaccuauucguauucucaacuagcuucuaucucaucucaauauuccuacaccuaguaaaaauaccaacacauagacauauaguaggaaaaucaugcccaaaaccccacagacuaaaccacaugggaauaugcucauguggacucuacaaacaaccaggaguaccaguaaaauggaaacgcuaaggacuaguuauaagacugacuagcccgaugggccucccaacgggcccuccuccccuccuugcaccgagauuaauaaaaaaaaaaaaaaaaaaaaaaaaaaaaaaaaaaaaaaaaaaaaaaaaaaaaaaaaaaaaaaaaugcaucccccccccccccccccccccccccccccccaaaggcucuuuucagagccaccagaauu

SEQ ID NO: 3531 - RNA, 1693 nt, Artificial Sequence
  mRNA product Design i-3 comprising derived and/or modified sequence from LASV(LM765-SLE-2012;Clade IV)__AIT17814__GPC (opt6)
gggagaaagcuuaccauggggcaaauugucacauucuuucaagaaguaccacacguuauagaagagguaaugaacauaguacuaauagcacuaucaauacuagccguauuaaaaggacuauacaacuucgccacaugcggacuaguaggccuaguaacauuccuacuacuguguggacgaagcugcacuaccucccuauacaaaggaguauaugaacuccaaacauuagaacuaaauauggaaacacuuaacaugacuaugccccuauccugcacaaaaaacaacucacaucauuacauuaugguuggaaaugaaacaggauuagaacuaaccuuaaccaacacuucaauaauagaccacaaauucugcaacuuaucagacgcacaucgaaaaaauuuauaugaccaugcacuaaugucaauuauaucaacauuucaccuaagcauaccaaacuucaaccaauaugaagcaaugucaugcgacuucaacggaggaaaaauaucaguacaauacaauuuaucacauagcuaugcaaaagacgcagcagaucauugcggaacaguagcaaacggaguacuacaaacauucaugcgaauggccuggggaggaucauacauagcacuagacuccggaagaggaagaugggauuguauaaugacuucauaccaauauuuaauaauacaaaauacuacuugggaagaucacugccaauucucuagaccaucacccauuggauacuuaggacuacuaucacaaagaacaagggacauauacauaucaagacgacuacucgguacauucacauggacauuaucagauagugaaggaaaagauacuccaggcggauauugcuuaaccagauggaugcuaauugaagcagaacuaaaauguuuuggaaacacagcuguagcaaaaugcaacgaaaaacaugaugaagaauucugugauaugcuaagauuauucgauuuuaauaaacaagcaauucaaagacuaaaagcagaagcacaaaugucaauucaacuaauaaacaaagcaguaaaugcauuaauaaacgaucaacuaauaaugaaaaaucaccuaagagacauaaugggaauaccauacugcaacuacucuaaauacugguaccuaaaucacacaacaacaggcaaaacaucacuaccaaaaugcugguuaguaucaaacggaucauaccuaaacgaaacacacuucagcgaugacauagaacaacaagcagauaauaugauaacugaaauguuacaaaaagaauacauggaaagacaaggaaaaacaccauuaggcuuagucgacuuauucguauucucaacaucauuuuacuuaaucuccauauuccuacaccuaguaaaaauacccacacauagacacauagucggaaaaccaugcccaaaaccacacagacuaaaccacaugggaauauguucauguggacuauauaaacaaccaggaguaccaguaaaauggaaacgauaaggacuaguuauaagacugacuagcccgaugggccucccaacgggcccuccuccccuccuugcaccgagauuaauaaaaaaaaaaaaaaaaaaaaaaaaaaaaaaaaaaaaaaaaaaaaaaaaaaaaaaaaaaaaaaaaugcaucccccccccccccccccccccccccccccccaaaggcucuuuucagagccaccagaauu

SEQ ID NO: 3532 - RNA, 1693 nt, Artificial Sequence
  mRNA product Design i-3 comprising derived and/or modified sequence from LASV(LM776-SLE-2012;Clade IV)__AIT17824__GPC (opt6)
gggagaaagcuuaccaugggacaaaucguaacauuuuuccaagaagucccccacguaauagaagaaguaaugaacauuguacuuaucgcauuaucaauacucgcaguccuaaaaggacuauacaacuuugcaacaugcggacuaguaggcuuagucacauuccuauuacuaugcggaagaucaugcacaacaagcguauacaaaggaguauaugaacuccaaacacuagaacucaauauggaaacucuaaacaugacaaugccauuaucaugcacaaaaaacaacucacaccauuacauaaugguaggaaacgaaacaggacuagaauuaacacuaacaaacacuucaauaaucaaccacaaauucugcaaccuuucagacgcacauaaaaaaaaccuauacgaccacgcacuaaugucuauaauaucaaccuuccaucuaucaauaccgaacuuuaaccaauacgaggcaaugucaugugauuucaauggcggaaaaauaucaguacaauacaaccuaucacacucauacgccggugaugcagccaaccacugcggaacaguugccaaugguguacuacaaacauucaugagaauggcauggggcggaucauacauagcccuagacucagggcacggaaaaugggacuguauaaugacaucuuaccaauaccucauaauacaaaauacaacaugggaagaccacugccaauuuucacgaccaucaccaauaggauaucuaggacuauuaucacaaagaacuagagacauauauauaucaagaagauuauuaggaacauuuacuuggacacuaucagacucagaaggaaaagacacaccagguggauauugcuuaaccagauggauguuaauagaagcagaacuaaaaugcuuuggaaacacagcaguugcgaaauguaaugaaaaacacgacgaagaauucugcgauaugcuaagauuauucgacuuuaacaaacaagcaauacaaagacuaaaagcugaagcacaaaugagcauacaacugauaaacaaagcaguaaacgcccucauuaacgaccaauuaauaaugaaaaaccacuuaagagacauaaugggaauaccauacugcaacuacucaaaauacugguauuuaaaccacacaacaaccggaaaaacaucccuaccaaaaugcuggcuaguauccaauggaucauaccuaaaugaaacacacuuuucagacgacauugaacaacaagcagacaauaugauaacagaaauguuacaaaaagaauacauggaacgacaaggcaaaacuccccuaggacucguagaccuuuucgucuucucaaccaguuucuaucuaauaucaauauuccuccaccuagucaaaauacccacacauagacacauaguugguaaaucaugccccaaaccccauagacucaaccacaugggaauaugcucuugcggacuauacaaacaaccaggagucccaguacgauggaaaagauaaggacuaguuauaagacugacuagcccgaugggccucccaacgggcccuccuccccuccuugcaccgagauuaauaaaaaaaaaaaaaaaaaaaaaaaaaaaaaaaaaaaaaaaaaaaaaaaaaaaaaaaaaaaaaaaaugcaucccccccccccccccccccccccccccccccaaaggcucuuuucagagccaccagaauu

SEQ ID NO: 3533 - RNA, 1693 nt, Artificial Sequence
  mRNA product Design i-3 comprising derived and/or modified sequence from LASV(Mad39;Clade IV)__ANH09722__GPC (opt6)
gggagaaagcuuaccaugggacaaaucguaacauucuuccaagaaguaccacacguaauagaagaaguaaugaacauaguacuuauagcucuaucuauauuagcaguucuaaaaggauuauacaauguagccacaugcggacugaucggacuaguaacauuccuacuccuauguggaagaucauguaccacaacucuauauaaaggcguauaugaacuacaagcauuagaacuuaacauggaaacucuaaacaugacaaugccccuaucaugcacaaaaaauaacucccaccacuacauaagaguaggaaaugaaacuggacucgaacuaacacuaacaaacacauccuuaaucaaccacaaauucuguaaccuaagcgacgcacauaaaaaaaaucuauacgaccacgcauuaauguccauaaucucaaccuuccacuuauccauccccaauuuuaaccaauacgaagcaaugucaugcgauuucaaugacgguaaaauauccguccaauauaauuuaucccauacauacgccggagauaccgcaaaccacugcggaacuguugcaaacggagucuuacaaacauucaugagaauggccuggggaggaucauacauagcacuagacuccggaagaggaggaugggacugcaucaugacuucauaucaauaccuaauuauacaaaacacuacaugggaagaccacugucaauuuucaagaccaucaccaauaggauaccuaggucuacuuucacaaagaaccagagacaucuauaucuccagaagacuccucgguacauucacauggacacuuucagacucagaaggaaaagacacacccggaggauauugucuaacaagauggaugcucauagaagccgaacucaaaugcuucggaaauacagcaguagcuaaaugcaacgaaaaacaugaugaagaauuuugcgauaugcuuagauuauucgauuucaauaaacaagccauacaaagacuaaaagcagaagcccaaaugucaauacaacuaauaaacaaagccguaaacgcacuaauaaacgaucaauuaauaaugaaaaaccaccuaagagacauaaugggaauaccauacugcaauuauucaaaauauugguaccuaaaucacacaguaacaggaaaaaccucauuaccuaaaugcuggcuagucucuaacggaucauacuuaaacgaaacccacuucucagaugacauagaacaacaagccgacaacaugaucacggaaaugcuucaaaaagaauacauggagagacaaggcaaaacaccacuaggacuaguugaccuauucguuuuuucaaccuccuucuacuuaauaucaaucuuccuacaccuagucaaaauacccacacauagacauguaguaggaaaaccauguccaaaaccacaucgauuaaaucacaugggaauuugcucaugcggcuuuuacaaacaacccggagucccaguacgauggaaacgauaaggacuaguuauaagacugacuagcccgaugggccucccaacgggcccuccuccccuccuugcaccgagauuaauaaaaaaaaaaaaaaaaaaaaaaaaaaaaaaaaaaaaaaaaaaaaaaaaaaaaaaaaaaaaaaaaugcaucccccccccccccccccccccccccccccccaaaggcucuuuucagagccaccagaauu

SEQ ID NO: 3534 - RNA, 1693 nt, Artificial Sequence
  mRNA product Design i-3 comprising derived and/or modified sequence from LASV(Z0947-SLE-2011;Clade IV)__AIT17840__GPC (opt6)
gggagaaagcuuaccaugggacaaauagucaccuucuuccaagaagucccacauguaauagaagaaguaaugaauauaguccuuauagcacuaucaauccuugccguacuaaaaggacuauacaacuucgccacaugcggucuagucggccuaguaacauucuuacuauuaugcggacgaucuuguacuaucagccucuacaaaggaguuuacgaauuacaaacacuagaacuaaauauggaaacauuaaacaugacuaugccccugucauguaccaaaaauaacucacaucacuauauuaugguuggcaaugaaacaggacucgaacucacacuaacaaacacaucaauaaucaaccauaaauucuguaacuuauccgaugcacacaagaaaaaccuauaugaccaugcacuaauguccauaauaucaacauuucaccuaucaauucccaauuucaaccaauacgaagcaaugucaugcgacuuuaauggagguaaaauaucaguacaauauaaccuaucacacucuuaugcaggagaugcagcaaaccauugcggaacaguagcaaacggaguauuacaaacauucaugcguauggccuggggaggaucuuauauagcauuagacucaggaagagauagaugggauuguauaaugacaucauaccaauacuuaauaauacaaaauacaaccugggaagaccacugccaauucucaagacccuccccaauaggauaucucggauuacuuucacaacgcacaagagauauauacauaucaagaagauuacuaggaacuuucacauggacccuauccgauucugaaggaaaagauacaccagguggauacugccuaacccgauggaugcuaauagaagcagaacuaaaauguuucggaaacacagcuguagcaaaaugcaacgaaaaacacgacgaagaguucugcgacaugcuaagauuauucgauuucaacaaacaagcaauccaaagauuaaaagcagaagcacaaauguccauccaacuaauuaacaaagcagucaacgcauuaauaaacgaccaacuaauaaugaaaaaccaccuucgagacaucauggguauuccauacugcaauuacucaaaauacugguacuuaaaucacacuaccacaggaaaaacaucauuacccaaaugcuggcuaguaucuaacggauccuaucuaaaugaaacacacuucucagacgacauagaacaacaagcugauaacaugauaacagaaauguuacaaaaagaauacauggaacgccaaggcaaaacaccacucggauuaguagaucuauucguauucucaacaucauucuaucuaauaucaauauuucuccaccuaguuaaaauccccacacauagacauauaguaggaaaacccugcccaaaaccacaccgacuaaaccacauggguaucugcucaugcggauuauacaaacaaccuggaguaccuguaaaauggaaaagauaaggacuaguuauaagacugacuagcccgaugggccucccaacgggcccuccuccccuccuugcaccgagauuaauaaaaaaaaaaaaaaaaaaaaaaaaaaaaaaaaaaaaaaaaaaaaaaaaaaaaaaaaaaaaaaaaugcaucccccccccccccccccccccccccccccccaaaggcucuuuucagagccaccagaauu

SEQ ID NO: 3535 - RNA, 1693 nt, Artificial Sequence
  mRNA product Design i-3 comprising derived and/or modified sequence from LASV(Josiah;Clade IV)__NP_694870__GPC (opt11) R7289
gggagaaagcuuaccaugggccaaauagucaccuucuuccaagaagucccccacguaaucgaagaaguaaugaacaucguccucaucgcacucucaguccucgccguccucaaaggccucuacaacuuugccacaugcggccuagucggacucgucaccuuccuccuccuuugcggccgcuccugcacuaccagccuuuacaaaggcgucuacgaacuccaaacccuugaacucaacauggagacccucaacaugaccaugcccuuauccugcaccaaaaacaacucacaccacuacauaauggucggcaacgaaaccggcuuagaacuaacccucaccaacaccuccauaaucaaccacaaauucugcaaccucagcgacgcccacaagaaaaaccuauacgaccacgcccucaugucaaucauauccaccuuccaccucucuauacccaacuucaaccaauacgaagcaauguccugcgacuucaacggcgguaaaauauccguucaauacaaccugucucacuccuacgccggcgacgccgccaaccacuguggcaccgucgcuaacggcguacuacaaacauucaugcgaauggccuggggcggcagcuacaucgcccucgacucagggagaggaaacugggacugcaucaugaccucuuaccaauaccucaucauacaaaacaccaccugggaagaccacugccaauucagccgaccaucccccaucggcuaccuaggccuacuaucacaacguacccgcgacaucuauauaagccgccgccuacucggcaccuucaccuggacacucuccgacuccgaagguaaagacacccccggaggcuacugccuaacccgcuggaugcuaaucgaagccgaacuuaaaugcuucggcaacaccgcggucgccaaaugcaacgaaaagcacgacgaagaguucugcgacaugcucaggcucuuugacuucaacaaacaagccauccaacgccucaaagcagaagcccaaauguccauccaacucauaaacaaagccgucaaugcccucauuaacgaccaacucauuaugaaaaaccaccuacgagacaucauggguauccccuacugcaacuacagcaaauacugguaccucaaccauacaacuaccggccgcacuagccugcccaagugcuggcucguauccaauggcuccuaccucaacgaaacccacuucuccgacgacauugaacaacaagccgacaacaugaucaccgaaaugcuucaaaaggaauacauggaacggcaaggaaaaacuccccucggccucgucgaccucuucgucuucagcacauccuucuaccucauauccaucuuccuccaccuagucaaaauccccacacacagacacauagucggaaaauccugccccaaaccccacagacucaaccacaugggcaucuguuccugcggucucuacaaacaaccuggcguacccgucaaauggaagcgcuaaggacuaguuauaagacugacuagcccgaugggccucccaacgggcccuccuccccuccuugcaccgagauuaauaaaaaaaaaaaaaaaaaaaaaaaaaaaaaaaaaaaaaaaaaaaaaaaaaaaaaaaaaaaaaaaaugcaucccccccccccccccccccccccccccccccaaaggcucuuuucagagccaccagaauu

SEQ ID NO: 3536 - RNA, 1690 nt, Artificial Sequence
  mRNA product Design i-3 comprising derived and/or modified sequence from LASV(LP;Clade I)__AAF86701__GPC (opt11)
gggagaaagcuuaccaugggccaaaucaucaccuucuuccaagaagucccacacgucauagaagaagugaugaacaucguccucauagcccuaucacuccuugccauccucaaaggccucuacaacaucgcaaccugcggcaucaucggccucgucgccuuccucuuucucugcggcaagagcuguucccuaacccuuaaaggagguuacgaacuccaaacacuagagcuaaacauggaaacacuuaacaugaccaugccccuaagcugcaccaaaaacuccucacaccacuacauccgcgucggaaacgaaaccggccucgaacucacucucaccaacacguccaucaucaaccacaaauucugcaaccuaucugacgcccauaagaaaaauuuauacgaccacgcccuaaugagcaucaucucgaccuuccaccuuuccauccccaacuucaaccaauacgaagccauguccugcgacuucaauggcggaaaaauauccguccaauacaaccucucacacagcuacgccggggacgccgccgaacacugcggcaccgucgccaacggcguccuacaaaccuucaugcgcauggccuggggaggccgcuauauagcccucgauuccgguaaaggcaacugggacugcauaaugaccuccuaccaauaccuuaucauacaaaacaccacaugggaagaccacugccaauucucccgcccgagccccauuggauaccucggccuacucucucaacgcacuagagacaucuacaucucccgccgucuccucggcaccuucaccuggacccucuccgacucagaaggcaacgaaacacccggaggcuacugccuuacccgauggaugcucaucgaagcagaacuaaaaugcuucggcaacacugccgucgccaaauguaacgaaaaacacgacgaagaguucugcgacaugcuccgccucuucgacuucaacaaacaagccauccgucgccucaaagcugaagcacaaauguccauacagcucaucaacaaagccgucaacgcacuaaucaacgaccaacucaucaugaaaaaccaccuccgagacaucaugggcauaccauacugcaacuacuccaaauacugguaccugaaccacaccuccucuggccgaaccucccuaccaaagugcuggcucauaucaaacggcuccuaccuuaacgaaacccaauucucagacgacaucgaacaacaagcagacaacaugaucaccgaaaugcugcaaaaagaguacauagaacgccagggcaaaacaccccuuggccuugucgacauauucaucuucucaaccagcuucuaccucaucagcaucuuccuccaucucauaaaaauccccacccaucgucacaucgucggaaaaccaugcccaaaaccccaucgucucaaccacaugggcgucugcuccugcggucucuacaagcaccccggcguacccaccaaauggaagcgcuaaggacuaguuauaagacugacuagcccgaugggccucccaacgggcccuccuccccuccuugcaccgagauuaauaaaaaaaaaaaaaaaaaaaaaaaaaaaaaaaaaaaaaaaaaaaaaaaaaaaaaaaaaaaaaaaaugcaucccccccccccccccccccccccccccccccaaaggcucuuuucagagccaccagaauu

SEQ ID NO: 3537 - RNA, 1690 nt, Artificial Sequence
  mRNA product Design i-3 comprising derived and/or modified sequence from LASV(803213;Clade II)__AAF86703__GPC (opt11)
gggagaaagcuuaccaugggccaaaucauaacauucuuccaagaagucccccacgucaucgaagaagucaugaacaucguacucaucgcucucucacuccuagccauccucaaagguaucuacaauguagcgaccugcggccucuucggccucaucucauuccuucuccucugcggccgcuccugcuccgucaccuacaaaggcgucuacgagcuccagacccuagaacuaaacauggccaaccucaauaugaccaugccccucuccugcacuaaaaacaacagccaucacuacaucauggucggaaacgagaccggacucgaacucacacuuacuaacaccuccaucaucaaccacaaauucugcaaccucuccgacgcccacaagaaaaaucucuaugaccacgcccucauguccauuaucucaacguuccaccucuccaucccuaacuucaaccaauacgaagccaugucaugcgacuucaacggcggcaaaauaagcguccaauacaaccuaucccacuccuucgccguagacgccgccaaccacugcggcaccaucgccaacggcguucuccaaacauucaugcgcauggccugggguggcuccuacauugcccucgacucaggcaaaggcaacugggauugcaucaugacauccuaccaauaccucauuauccaaaacacaacuugggaagaccacugccaauucagccgcccaucccccauaggcuaccucggccuccucucccaacgcacacgcgacaucuacaucucccgccgccuacuaggaaccuucaccuggacccucagcgacucggaaggcaacgaagccccaggcggcuacugccucacuagauggaugcucaucgaagccgaacucaaaugcuucggcaacaccgccguggccaaauguaacgaaaaacacgacgaagaguucugcgacaugcuccgccucuucgacuucaacaagcaagccaucaaacgccucaaaaccgaagcgcaaaugucaauccagcucauaaacaaggcagucaacgcccucaucaaugaucaacuuaucaugaaaaaccaccuccgcgacauaaugggcauccccuacuguaacuacucucgcuacugguaccucaaccacacugugacaggcaaaaccucacuaccccgcuguuggcucguauccaacggcuccuaccucaacgaaacccacuucagcgacgacaucgaacaacaggccgacaauaugaucaccgaaaugcuacaaaaggaauacauggaccgacaaggcaaaacaccccuuggccucgucgaccuauucgucuucuccaccucauucuaccucaucuccaucuuccuccaccucgucaaaaucccaacccaccgccacaucgucggcaagcccugccccaaaccccaccgccucaaccauaugggcaucugcucaugcggccucuacaaacaccccggaguaccaguaaaauggaaacgcuaaggacuaguuauaagacugacuagcccgaugggccucccaacgggcccuccuccccuccuugcaccgagauuaauaaaaaaaaaaaaaaaaaaaaaaaaaaaaaaaaaaaaaaaaaaaaaaaaaaaaaaaaaaaaaaaaugcaucccccccccccccccccccccccccccccccaaaggcucuuuucagagccaccagaauu

SEQ ID NO: 3538 - RNA, 1690 nt, Artificial Sequence
  mRNA product Design i-3 comprising derived and/or modified sequence from LASV(GA391;Clade III)__CAA36645__GPC (opt11)
gggagaaagcuuaccaugggucaaaucgucaccuucuuccaagaaguaccccacgucaucgaagaagucaugaacauaguccucaucgcccucuccauccucgcgauccucaaaggacuauauaacgucgcaaccugcggccucaucggccucgucaccuuccuccuccucagcggacguuccugcagccucaucuacaaaggcaccuacgaacuccagacucucgaacuuaacauggaaacacucaacaugaccaugccccucuccugcaccaagaacaacucccaccacuacauccgcguaggcaacgaaaccggccuagagcuaacccuaacaaacacaucaauccucaaccacaaauucugcaaccucuccgacgcccacaaacgcaaccuauacgaccacucccucauguccaucaucuccaccuuccaccucucaauccccaacuucaaccaauacgaagccauguccugcgacuuuaacggaggcaagaucaccguacaauacaaccucucccacuccuucgccgucgacgccgccggccacugcggcacccucgccaacggaguacuacaaaccuucaugcgcauggcauggggcggcucauacaucgcgcucgacuccggccgcggcaacugggacuguaucaugacauccuaucaauaccuuauaauccagaacaccaccugggacgaccacugccaauuuucccgccccucacccaucggauaucuaggccuccucucccaacgcacccgagacaucuacaucucccgacgacuccucggcacauucacauggacccucuccgacucagaaggcaacgaaacccccggcggauauugccuaacacgcuggaugcucaucgaagcugaacuuaagugcuuuggcaacaccgcaguagcuaaaugcaacgaaaaacacgacgaagaguucugcgacaugcuccgacucuucgacuucaacaaacaagcaauccgccgguuaaaaacugaagcacaaauguccauccaacucaucaacaaagcaguaaacgcucucaucaacgaucaacucauaaugaaaaaccaccuccgagacauaaugggcauacccuacugcaauuacucaagauacugguaccucaaccacaccucaaccgguaaaaccucccuaccccgcugcuggcuaaucucaaauggcucauaccucaacgaaacuaaauucuccgacgacaucgaacaacaagcagacaacaugauuaccgaaaugcugcaaaaagaauacaucgaccgacaaggcaagacccccuuaggccuugucgaccucuucgucuucuccaccucauucuaccucaucucaaucuuccuccaccucgucaaaaucccaacccaccgccacaucgucggcaaacccugccccaaaccccaccggcucaaucacaugggcaucugcagcugcggacucuacaaacaacccggcgucccaguccgcuggaaacgcuaaggacuaguuauaagacugacuagcccgaugggccucccaacgggcccuccuccccuccuugcaccgagauuaauaaaaaaaaaaaaaaaaaaaaaaaaaaaaaaaaaaaaaaaaaaaaaaaaaaaaaaaaaaaaaaaaugcaucccccccccccccccccccccccccccccccaaaggcucuuuucagagccaccagaauu

SEQ ID NO: 3539 - RNA, 1693 nt, Artificial Sequence
  mRNA product Design i-3 comprising derived and/or modified sequence from LASV(AV;Clade V)__CCA30314__GPC (opt11)
gggagaaagcuuaccaugggacagaucguaacauucuuccaagaagucccccacguaaucgaagaagucaugaacaucguacuuaucgcccucuccauccucgccguccucaaaggccuauacaacaucgccacaugcggccuaaucggacuuauaaccuuccuccuccuuugcggccguucaugcucaagcaaccuuuacaaaggagucuacgaacuacaaagucucgaccucaacauggaaacacucaacaugaccaugccccucagcugcaccaaaaacaacucccaccacuacauccgcgucggcaacgacacaggacucgaacucacucucacaaacaccaguauccucaaccacaaguucugcaaccucuccgacgcccacaagaaagaccucuacgaccacgcacugauguccauaauuuccacuuuccaccuuuccauucccaacuucaaccaauacgaagccaugucaugcgacuuuaacggcggaaaaaucagcguacaauacaaccucucucacuccuaugccaucgacgcugcaaaccacugcggcaccgucgcaaacggcauccuccaaaccuucaugagaauggccuggggcggcucuuacaucgcccuagauucaggccgcggcaacugggacuguaucaugacauccuaccaauaccucaucauacaaaacaccaccugggaaaaccacugccaauuuucccgccccagcccaaucgguuaccucggccuccucucucaacggacccgcgacaucuacaucucccggcgacuauuagggacguucaccuggacccucucagacagcgaaggcaacgccacccccggcggauacugccuaacucgcuggaugcuuauagaagccgaacuuaaaugcuucggcaacacugcaguugccaaaugcaacgaaaaacacgacgaggaguucugcgacaugcuccgccucuucgacuucaacaagcaagccaucagccgccuuaaauccgaagcccaaauguccauucagcucaucaacaaagcuguaaacgcccucauaaacgaccaacucaucaugaaaaaucaccuccgcgacauaaugggcauacccuacugcaacuacuccaaauacugguaccuaaaucacaccaucaccggcaaaaccucucuccccaaaugcuggcucgucuccaacggcucauaccucaacgaaacccacuucucggacgacaucgaacaacaagccgacaacaugaucaccgaaaugcuccaaaaagaauacauggaacgccaaggcaaaacaccacuaggccuagucgaccuauucgucuucucgacuuccuucuaccuaauauccaucuuccuucgacucguaaaaauccccacacacagacacauugucggcaagcccugccccaaaccccaccgccuaaaccacaugggcaucugcucaugcggccucuacaaacaacccggcgucccaguccgcuggaaacgcuaaggacuaguuauaagacugacuagcccgaugggccucccaacgggcccuccuccccuccuugcaccgagauuaauaaaaaaaaaaaaaaaaaaaaaaaaaaaaaaaaaaaaaaaaaaaaaaaaaaaaaaaaaaaaaaaaugcaucccccccccccccccccccccccccccccccaaaggcucuuuucagagccaccagaauu

SEQ ID NO: 3540 - RNA, 1690 nt, Artificial Sequence
  mRNA product Design i-3 comprising derived and/or modified sequence from LASV(Togo/2016/7082;Clade VI)__AMR44577__GPC (opt11)
gggagaaagcuuaccaugggacaaaucaucaccuuuuuccaagaagucccccacguuaucgaagaagucaugaacauaguccucaucgcacuuucacuccucgccauacucaaaggcguauacaacgucgcaaccugcggaauaaucggccuggucaccuuccuguuccuaugcggacgauccugcucccuaaucuacaagggguccuacgaacuacaaacccuagaacucaacauggaaacacuuaacaugacaaugccacucucaugcaccaaaaacucaucccaccacuacaucagaguuggcaacgaaacaggccucgagcuaacccucaccaauacaucaaucaucaaccacaaauucugcaaccucuccgacgcccacaaacgaaaccucuaugaccacgcacucauguccauccuuagcaccuuccaccuuagcauccccaacuucaaccaauacgaggccaugagcugcgacuucaacggaggaaaaaucuccguccaauacaaccuaucccacgccuacgccgucgacgcagccgaacacugcgguaccgucgcgaacggcguccuccaaaccuucaugcgcauggccuggggcggcagcuacaucgcccucgacagcggccgcgggaacugggacugcaucaugaccucauaucaauaccuaauuauccaaaacaccaccugggaggaucacugccaauucucccgcccauccccaaucggcuaccuuggccuccucucccaacgcacccgugacaucuacaucucccgcagacuacucgguaccuucacauggacccucuccgacuccgaaggcaacgaaaccccaggcggcuacugccugacacgcuggaugcucaucgaagccgagcucaaaugcuucggcaacaccgccgucgccaagugcaaugaaaaacacgacgaagaguucugcgacaugcuucgccucuucgacuuuaacaaacaggccauccaacgccuaaaaagugaagcccaaaugagcauccaguuaaucaacaaagccgucaaugccuuaaucaacgaccaacucaucaugaaaaaccaucuccgcgacaugaugggcauaccuuacugcaacuauuccaaauacugguaccuaaaccacacuuccucgggccgaacaagccucccaaaauguuggcucgucuccaacggaucauaccucaacgaaacccacuucuccgacgacaucgaacaacaagccgacaauaugauuaccgaaauguuacaaaaggaauacaucgaccgccaaggcaaaacaccccuaggccucgucgaccuuuucguauucucgacgucauucuaccuaaucaguaucuuccuccaccucaucaaaauccccacccaccgucacaucgucggcaaaccgugccccaaaccccaccgccugaaccacaugggaaucugcucuuguggccuauacaaacaacccggaguacccaccagguggaaacgguaaggacuaguuauaagacugacuagcccgaugggccucccaacgggcccuccuccccuccuugcaccgagauuaauaaaaaaaaaaaaaaaaaaaaaaaaaaaaaaaaaaaaaaaaaaaaaaaaaaaaaaaaaaaaaaaaugcaucccccccccccccccccccccccccccccccaaaggcucuuuucagagccaccagaauu

SEQ ID NO: 3541 - RNA, 1690 nt, Artificial Sequence
  mRNA product Design i-3 comprising derived and/or modified sequence from LASV(KAK-428;Clade n.d. (VII))__ANH09740__GPC (opt11)
gggagaaagcuuaccaugggccaaaucgucaccuucuuccaagaagucccccacgucaucgaagaagucaugaacauaguccuaauagcccucucccuccuagccauccucaagggacuauauaacuucgccacaugcggcgucaucggccuuauaacuuuccuccuacucugcggccgcuccugcucugccaccuacaaaggccaauacgagcuucaaacucuugaacucaacauggaaucacuaaacaugaccaugccccuauccugcaccaaaaauaacucacaccacuacauccgcgccgggaacaacacaggccuagaacucacgcucaccaacaccuccaucaucucacauaaauucugcaaccuauccgacgcccacaagaaaaaccucuaugaccacacacucauguccaucauaacaaccuuccaccucuccaucccuaacuucaaccaguacgaagccaugagcugcgacuucaacggcggcaaaauauccauccaauacaaucugucccacuccuacgccggcgacgcagcccagcacugcggcaccgucgccaacggcguccuccagaccuucaugcguauggcauggggaggcuccuaccucgccuuagacagcggacgacguggaugggacugcauaaucuccuccuaccaauacuuaauaauccaaaacaccaccugggacgaucacugccaauucucacgccccucccccaucggcuaccucggauucgucucacagaaaacccgagacaucuacaucuccagacgccuacucggaacguucaccuggacacucagcgacuccgagggccacgacaugcccggcggauacugccucacccgcuggaugcucaucgaagccgaccugaaaugcuucggcaacacagccgucgccaaaugcaacgaaaaacacgacgaagaguucugcgacauguggcgacucuucgacuucaacaaacaagcaauccaaagacucaaagccgaagcccaaaugaacauccaacuaaucaacaaggccgucaacgcccugauaaacgaccaacucaugaugaaaaaccaccucagagacaucaugggcaucccauacugcaacuacuccaaauucugguaccucaacaacaccacaaccggccgcaccucccuaccgcgcugcuggcuaaucucaaaugguuccuaccucaacgaaacccauuuuagcgacgacaucgaacaacaagccgacaacaugaucaccgaaaugcugcaaaaggaauacauggaccgccaaggaaaaacaccccucggccucguagaccucuucgucuucuccaccagcuucuaccuaaucacaaucuuccuccaucuggucaaaauaccgacucacagacacaucgucggaaaacccugccccaaaccccaccgacucaaccacauggguaucugcuccugcggccucuacaaacaacccggagucccaguucgauggaaacgcuaaggacuaguuauaagacugacuagcccgaugggccucccaacgggcccuccuccccuccuugcaccgagauuaauaaaaaaaaaaaaaaaaaaaaaaaaaaaaaaaaaaaaaaaaaaaaaaaaaaaaaaaaaaaaaaaaugcaucccccccccccccccccccccccccccccccaaaggcucuuuucagagccaccagaauu

SEQ ID NO: 3542 - RNA, 1690 nt, Artificial Sequence
  mRNA product Design i-3 comprising derived and/or modified sequence from LASV(Pinneo-NIG-1969;Clade I)__AIT17836__GPC (opt11)
gggagaaagcuuaccaugggccaaaucauaacuuucuuucaagaagucccacacgucaucgaagaagucaugaacauaguccucaucgcccuaucccuccuagcaauccuaaaaggccuauacaauaucgcaaccuguggcaucaucggccuugucgccuuccucuuccucugcggcaaauccuguucccuuacccuaaagggcggcuacgagcuccaaacccucgaacucaacauggaaacccucaacaugacuaugccccucuccugcaccaagaacuccucccaccacuacauccgcguuggcaaugaaaccggacucgaacugacccuaaccaacaccucaaucaucaaccacaaauuuugcaaccuuuccgacgcacacaagaaaaaccucuacgaccacgcccucaugagcaucaucucaaccuuccaccucucaauccccaacuucaaucaauacgaagccauguccugcgacuucaacggcggaaaaaucagcguccaguacaaccugucacacagcuacgccggcgacgccgccgaacacugcggaacagucgcuaacggagucuuacaaacauucaugcgcauggcauggggcggccgguacaucgcccucgacuccggcaaaggcaacugggacugcaucaugaccuccuaccaauaccucauaauccaaaacaccaccugggaagaccacugccaauucucccgcccuucccccaucggcuaccuaggccuccuaagccaacgaacccgagacaucuacaucucaagacgccuccucggcacuuucaccuggacccucuccgacucagagggaaacgaaacccccggaggcuacugccuuacccgcuggauguuaaucgaagccgaacucaaaugcuucggcaacaccgccguagccaaaugcaacgaaaaacacgacgaagaguucugcgacaugcuacgccucuucgacuucaacaaacaagccauacgccgacucaaagcagaagcccaaauguccauccaauuaaucaacaaggccgucaacgcccuaauaaacgaccagcuaauaaugaaaaaccaccuccgcgacaucauggguauccccuacugcaacuacuccaaauacugguaccuaaaccacaccucauccggccgaacaucccuccccaaaugcuggcucaucuccaacggcuccuaccucaacgaaacacaauucuccgacgacaucgaacaacaagccgacaacaugaucacugagaugcuacaaaaagaauacaucgaacgacaaggcaaaacaccccuaggacucgucgauaucuucauauucucaaccucuuucuaccucaucucuaucuuccuucaccucaucaaaauccccacucaccggcacauagucggcaaacccugccccaaaccacaccgccuaaaccacaugggugucugcuccugcggccucuacaaacaccccggcguccccacaaaauggaaacgauaaggacuaguuauaagacugacuagcccgaugggccucccaacgggcccuccuccccuccuugcaccgagauuaauaaaaaaaaaaaaaaaaaaaaaaaaaaaaaaaaaaaaaaaaaaaaaaaaaaaaaaaaaaaaaaaaugcaucccccccccccccccccccccccccccccccaaaggcucuuuucagagccaccagaauu

SEQ ID NO: 3543 - RNA, 1690 nt, Artificial Sequence
  mRNA product Design i-3 comprising derived and/or modified sequence from LASV(ISTH0009-NIG-2011;Clade II)__AIT17404__GPC (opt11)
gggagaaagcuuaccaugggccaaaucaucaccuuuuuccaagaagucccccacgucaucgaagaagucaugaacaucguccuaaucgcacucucccuacucgccauccucaaaggaaucuacaacguugcuacaugcggacucuucggccucgucuccuuccuccuccucugcggccgcucaugcuccaccaccuacaaaggcgucuacgaacuccaaacacucgaacucgacauggccucccuaaacaugaccaugccccucuccugcaccaaaaacaacucccaccacuacaucaugguaggcaacgaaaccggccuagaacucacccucacaaacacaucaaucaucaaccacaaauucugcaaucucuccgacgcacacaagaaaaaccucuacgaccacgcccucaugucuaucaucuccacauuccaccucucaauccccaacuucaaccaauacgaagcaauguccugcgacuucaacggaggcaaaaucucggugcaauacaaccucucgcacgccuacgcuguagacgccgccaaccacugcggcacuaucgccaacggcguccuacagaccuucaugcgcauggccuggggcggcuccuacaucgcccucgacucgggcaaaggcuccugggacugcaucaugacguccuaccaauaccucaucauccaaaacacaaccugggaagaccacugccaauucucccgacccagccccaucggguaccucggccuucuaucacaacggacccgagauauauacaucucccgcagacuacucggcacuuucaccuggacacucucagacuccgaaggcaacgaaacccccggcggcuacugccucacacguuggaugcuuauagaagccgaacucaaaugcuucggcaacaccgccgucgccaaaugcaacgaaaaacacgacgaagaauuuugcgacaugcucagacucuucgacuucaacaaacaagccauaagacgcuuaaaaacagaagcacaaaugucuauacaacucaucaacaaagccgucaaugcacuaaucaacgaccagcuaaucaugaaaaaccaccuccgcgacaucaugggcauccccuacugcaacuacuccaaauacugguacuugaaccacaccgucaccggcaaaaccucccucccgcgcugcuggcuagucagcaacggcagcuaccucaacgaaacccacuucucugacgacauagaacaacaagccgacaacaugaucaccgaacuccugcaaaaagaauacauggaccgccaaggaaagacuccccucggccucguggaccuauucgucuucucaaccucauucuaccuuaucagcaucuuccuccaccuuaucaaaauaccuacacaccgccacaucacaggcaaaccaugccccaagccccaccgauuaaaccauaugggcauaugcuccugcggccucuacaaacaccccggaguaccagucaaauggaaacgaugaggacuaguuauaagacugacuagcccgaugggccucccaacgggcccuccuccccuccuugcaccgagauuaauaaaaaaaaaaaaaaaaaaaaaaaaaaaaaaaaaaaaaaaaaaaaaaaaaaaaaaaaaaaaaaaaugcaucccccccccccccccccccccccccccccccaaaggcucuuuucagagccaccagaauu

SEQ ID NO: 3544 - RNA, 1690 nt, Artificial Sequence
  mRNA product Design i-3 comprising derived and/or modified sequence from LASV(ISTH2010-NIG-2012;Clade II)__AIT17482__GPC (opt11)
gggagaaagcuuaccaugggccaaaucaucaccuucuuccaagaagucccacacgucauagaagaaguaaugaacaucguccuaauugcucucucacuacucgcgauccucaaagguaucuacaacgucgcaaccugcggacuguuuggacucguaucauuccuccuccugugcggccgcagcugcucaaccacauacaaaggcguauacgaacuacaaacccucgaacucgacauggccagccucaacaugacaaugccccucagcugcaccaaaaauaacagccaccacuacaucauggucggcaacgaaaccggccuugaacucacccucacaaacaccucaaucauaaaccacaaauucugcaaccucagcgacgcccacaagaaaaaccuauacgaccaugcacuaauguccaucauaagcaccuuccaccucuccauacccaacuucaaccaguacgaggccaugucaugcgauuucaacggaggcaaaaucuccguccaauacaaccuaagccacgccuacgcagucgacgccgccaaccacugcggcaccauagcaaacggcguccuucaaaccuucaugcgaauggccuggggcggcucauacaucgcccuagacucaggcaaaggcuccugggacugcauaaugacaucauaccaauaucucaucauccaaaacauaacaugggaagaccacugccaauucucccguccaucgccaaucggauaccucggccuccuaucacaacgaacucgcgacaucuacauaucccgccgucuccuaggaacauucaccuggacacucagcgacuccgaaggaaacgaaacccccggcggcuacugccucacgcgcuggaugcugaucgaagcagaacucaaaugcuucggcaacacugccgucgccaaaugcaacgaaaaacacgacgaagaguucugcgacaugcuacgacucuucgacuucaacaaacaagccauccgucgccucaaaaccgaagcccaaaugucgauccaacucaucaacaaggcaguaaacgcccuaaucaacgaccaacucauaaugaagaaccaccuacgcgauaucaugggcauacccuacugcaacuacuccaaguacugguaccucaaccacaccgucacaggcaaaaccucccucccccgaugcuggcuagucuccaacggcucuuaucuaaacgaaacccacuucuccgacgacauagaacaacaagccgauaacaugauuaccgaacuccuacaaaaagaauacaucgaccgccaaggcaagaccccacucggacucgucgaccuauucgucuucucaaccucguucuaccucauuucuauauuccuccaccuaguaaaaauccccacacaccgccaugucgucggcaaacccugccccaaaccccaccgccuaaaccacaugggaauaugcagcugcggccucuacaaacaccccggcguacccgugaaauggaaacgauagggacuaguuauaagacugacuagcccgaugggccucccaacgggcccuccuccccuccuugcaccgagauuaauaaaaaaaaaaaaaaaaaaaaaaaaaaaaaaaaaaaaaaaaaaaaaaaaaaaaaaaaaaaaaaaaugcaucccccccccccccccccccccccccccccccaaaggcucuuuucagagccaccagaauu

SEQ ID NO: 3545 - RNA, 1690 nt, Artificial Sequence
  mRNA product Design i-3 comprising derived and/or modified sequence from LASV(Lassa virus/H.sapiens-wt/NGA/2015/ISTH_0543;Clade II)__AVO03639__GPC (opt11)
gggagaaagcuuaccaugggccagauuaucacauucuuccaagaagucccccacgucaucgaagaagucaugaacauaguacuaaucgcccugucacuccucgcaauccuaaaagguaucuacaacguugcuaccugcggacucuucggccucguuucauuccuccuccucuguggccgauccugcuccacaacuuauaaaggcgucuacgaacuccaaacacucgaacuugacauggccaaccucaacaugaccaugccacucucaugcaccaaaaacaacucccaccacuacauuauggucggcaacgaaaccggccucgaacuaacucucaccaacacaucaauaaucaaccacaaauucugcaaccuaagcgacgcccacaagaaaaaccuauacgaccacgcccuaauguccaucauaagcaccuuccaccucuccauuccaaacuuuaaccaauacgaagcaauguccugcgacuucaacggaggcaaaaucucaguccaauauaaccucucccacaccuacgccgucgacgcggccaaccacugugguaccaucgccaacggaguccuccaaaccuucaugcgcauggcuuggggcggaagcuacaucgcccuagacuccggcaaaggaucaugggacugcaucaugaccuccuaucaguaucucguaauacaaaacacaacuugggaagaccacugucaauucucccgcccaucgcccaucggcuaccucggccuucuaucccaacgaacaagagacaucuacaucucucgccgacuucuuggcaccuucacauggacccucucagacucagaaggcaacgaaaccccugguggcuacugccucacccgcuggauguugaucgaagccgaacuaaaaugcuucggcaacacagccguugccaaaugcaacgagaaacacgacgaagaguucugcgacaugcuccgccuauucgacuucaacaaacaagccauccgccgccucaaaaccgaagcccagauguccauccagcucaucaacaaagccguaaacgcucuaauaaacgaccaacucaucaugaaaaaccaccuacgcgacaucaugggcauccccuacugcaacuacuccaaauacugguaccuaaaccacaccgucaccgguaaaaccucucuaccacgcugcuggcucgucuccaacggaucauaccucaacgaaacccacuucucagaugacaucgaacaacaagccgacaacaugauaaccgaacuccuacagaaagaauacaucgaucgacagggcaaaacaccccucggccucgucgaccucuucguuuucucaaccuccuucuaccuaaucuccauauuccuccaccucgucaaaauccccacccaucgacacaucaccggcaaaccaugcccaaaaccccaccgacucaaccacaugggcaucugcuccugcgguuuauacaaacacccuggcguccccgucaaauggaaacgguaaggacuaguuauaagacugacuagcccgaugggccucccaacgggcccuccuccccuccuugcaccgagauuaauaaaaaaaaaaaaaaaaaaaaaaaaaaaaaaaaaaaaaaaaaaaaaaaaaaaaaaaaaaaaaaaaugcaucccccccccccccccccccccccccccccccaaaggcucuuuucagagccaccagaauu

SEQ ID NO: 3546 - RNA, 1690 nt, Artificial Sequence
  mRNA product Design i-3 comprising derived and/or modified sequence from LASV(Lassa virus/H.sapiens-wt/NGA/2016/ISTH_0009;Clade II)__AVO03571__GPC (opt11)
gggagaaagcuuaccaugggccaaaucaucaccuucuuccaagaagucccccacgucauugaagaaguaaugaacauaguccucaucgcccucucacuacuagcuauccuaaagggaaucuacaacgucgccaccuguggccuccucggccucguaucguuccuccuucuuuguggacgauccugcuccaccaccuacaaagguguauacgaacuccaaacccucgaguuagacauggccagccuaaacaugaccaugccccucuccugcaccaaaaauaauucccaccacuacaucauggucggcaacgaaaccggccucgaacucacacucacuaacacauccaucaucaaccacaaauucugcaacuuaucagaugcccacaagaaaaaccucuacgaccacgcacuaaugucaaucaucucaaccuuccaccucagcauccccaacuucaaccaguacgaggcaaugucuugcgacuucaacggcggacgcaucuccguccaauacaaccucucccacagcuaugccgucgacgccgccaaccacugcggcacgaucgccaacggcguccuacaaaccuucaugcgaauggccuggggcgguuccuauaucgcccucgacuccggcaaaggaagcugggacugcaucaugaccucauaccaauaccucauaauccaaaacaccacaugggaagaucacugccaauucucccguccaucccccaucggcuaccucggccuccucucacaacgcacacgcgacaucuacaucucaagacgccuacucggcaccuucacuuggacccucucagacuccgaaggcaacgaaacccccggaggcuacugccuuacccgcuggaugcuaaucgaagccgaacucaaaugcuucggcaacaccgccguagcaaaaugcaacgaaaaacacgacgaagaguucugcgacaugcuccgacuuuucgacuucaacaaacaggccauccgccgccucaaaaccgaagcacaaauguccauccaacucaucaacaaagcaguaaacgcccuuauaaacgaucaacuaaucaugaaaaaccaccuccgcgacaucaugggcauccccuacugcaacuacuccaaauacugguaccuaaaccacaccguaaccggaaaaaccagccuccccagaugcuggcuagucagcaacggaucauaccuuaacgaaacccacuucuccgaugacaucgaacaacaagccgacaacaugaucaccgaacuucuacagaaagaauacaucgaccgccaaggcaaaacgccccucggccuugucgaccucuucgucuucuccaccuccuucuaccucaucagcauauuccuacaccuugucaaaaucccaacccaccgucacaucaccggcaaacccugcccaaaaccccaccgacuaaaccacaugggcaucugcuccugcggccucuacaaccacccaggcguccccgucaaauggaaacguuagggacuaguuauaagacugacuagcccgaugggccucccaacgggcccuccuccccuccuugcaccgagauuaauaaaaaaaaaaaaaaaaaaaaaaaaaaaaaaaaaaaaaaaaaaaaaaaaaaaaaaaaaaaaaaaaugcaucccccccccccccccccccccccccccccccaaaggcucuuuucagagccaccagaauu

SEQ ID NO: 3547 - RNA, 1690 nt, Artificial Sequence
  mRNA product Design i-3 comprising derived and/or modified sequence from LASV(Lassa virus/H.sapiens-wt/NGA/2016/ISTH_0017;Clade II)__AVO03567__GPC (opt11)
gggagaaagcuuaccaugggccaaauaaucacauuuuuccaagaagucccccacgucaucgaagaagucaugaauaucguccuuaucgcccucagccuccuugcaauccugaaaggcaucuacaacgucgccacaugcggccucuucggccuagucuccuucuuacuccuaugcggacgcuccugcucgacaaccuacaaaggcgucuacgaacuccaaacacuggaacucgacauggccucccuuaacaugaccaugccccuauccugcaccaaaaacaacagccaccauuacauaaugguaggaaacgaaaccggccucgaacuaacacucaccaacaccuccauaauaaaucacaaauucugcaaccucucagacgcccacaagaaaaaccuuuacgaccaugcacucauguccaucauaucaaccuuccaccucuccauacccaauuucaaccaauacgaagccaugucaugcgacuucaauggcggcaaaaucuccguccaguacaaccuuucccacacuuacgccaucgacgccgccaaccacugcggcaccauagccaacggcguacuccaaacauucaugcgcauggcgugggguggcuccuacaucgcacucgacucaggcaaaggaucaugggacugcauaaugaccucauaccaauaccucaucauccaaaacacaaccugggaagaccacugccaauucagccggccaucucccaucggcuaccucggccuacuaagccaacgcacgcgcgacaucuacaucucccgccgccuucuaggcaccuucaccuggacccucucagacuccgaagggaacgaaacgcccggcggauacugccucacccgcuggaugcucaucgaagccgaacucaaaugcuucggcaacacagcagucgccaaaugcaacgaaaaacacgacgaagaguucugcgacaugcuccgccuauucgacuucaacaaacaagcaauacgccgacuuaaaaccgaagcacaaaugucaauccaacuaaucaacaaagcagucaacgcucuaauuaacgaccaacuuaucaugaaaaaccaccuccgagacaucaugggcaucccauacugcaacuacucaaaauacugguaccucaaucacaccgucacgggcaaaaccucccucccacgcugcuggcuagucuccaacggcucauaccucaacgaaacgcacuuuucagaugacaucgaacaacaagcugacaauaugaucaccgaacuccuacaaaaagaauacauggaccgccaaggaaaaacaccccucggacucgucgaucucuucguauucuccaccucauucuaccuaaucuccauauuccuccaccuaguacgaauccccacccaccgccacgucauaggcaaacccugccccaaaccccaccgccuaaaccacaugggcauaugcuccugcggccucuacaaacacccuggcguccccgucaaauggaagcgcugaggacuaguuauaagacugacuagcccgaugggccucccaacgggcccuccuccccuccuugcaccgagauuaauaaaaaaaaaaaaaaaaaaaaaaaaaaaaaaaaaaaaaaaaaaaaaaaaaaaaaaaaaaaaaaaaugcaucccccccccccccccccccccccccccccccaaaggcucuuuucagagccaccagaauu

SEQ ID NO: 3548 - RNA, 1690 nt, Artificial Sequence
  mRNA product Design i-3 comprising derived and/or modified sequence from LASV(Lassa virus/H.sapiens-wt/NGA/2018/ISTH_0959;Clade II)__AVV65099__GPC (opt11)
gggagaaagcuuaccaugggacaaaucaucaccuucuuccaagaagucccacacguuauagaagaagucaugaacaucguacucaucgcacuuucacuacuugccauccucaaaggaaucuauaacgugguaaccugcggccuauucggccucgucuccuuccuccuccucugcggccgcuccugcuccaccaccuacaaaggagucuacgaacuccaaacccucgagcuugacauggccucacuaaauaugacaaugccacuuucaugcacuaagaacaacucacaccacuacauaauggucggcaacgaaaccggccucgaacugacccucacaaacaccucuaucauaaaccauaaauucugcaaucucuccgacgcacacaagaagaaccucuacgaccacgcucucaugucaauaauauccaccuuccaccucuccauacccaacuucaaccaauacgaagcaauguccugcgacuucaacggcggaaaaaucuccguccaauacaaccuaucccacgccuaugccaucgacgccgccaaucacugcggaacaaucgccaauggaguccuccaaacauucaugcgcauggccuggggcggauccuacaucgcacucgacucaggcaaaggcucaugggacugcauaaugacauccuaccaauaccucaucauccaaaacaccaccugggaagaccacugccaauucucccgccccucgccaaucggcuaccucggacuccucucccagcgcacucgcgacaucuacaucucacgccgccugcuaggcacauucaccuggacccuauccgacuccgaagguaacgaaacccccggcggguauugccuaacucgcuggaugcuaauagaagccgaacuaaaaugcuucgguaacaccgccgucgccaaaugcaacgaaaaacacgacgaagaguucugcgacaugcuccgacucuucgacuucaacaaacaagccauccgccgacuaaagacagaagcacaaaugucaauccagcugaucaacaaagccgugaacgcccuaaucaacgaccaacucaucaugaaaaaccaccuccgagacaucaugggcaucccguacugcaacuacuccaaauacugguaccuuaaccacaccgucacuggaaaaaccucacucccccguugcuggcucguuuccaacggaagcuaucuaaacgaaacccacuucuccgacgacaucgaacaacaagcagacaauaugaucacugaacuccuccaaaaagaauacauagaccgccaaggcaaaaccccacucggccuagucgaccuauucgucuucucuaccuccuucuaucucaucucuaucuuccuccaccuaguuaaaauccccacacaucgacacgucaucggaaaaccaugcccaaaaccccaucgccugaaccauaugggcaucugcucauguggccuauacaaacaccccggcguccccguaaaauggaaacgcuaaggacuaguuauaagacugacuagcccgaugggccucccaacgggcccuccuccccuccuugcaccgagauuaauaaaaaaaaaaaaaaaaaaaaaaaaaaaaaaaaaaaaaaaaaaaaaaaaaaaaaaaaaaaaaaaaugcaucccccccccccccccccccccccccccccccaaaggcucuuuucagagccaccagaauu

SEQ ID NO: 3549 - RNA, 1690 nt, Artificial Sequence
  mRNA product Design i-3 comprising derived and/or modified sequence from LASV(LASV003-NIG-2008;Clade II)__AIT17580__GPC (opt11)
gggagaaagcuuaccaugggacaaaucauaaccuuuuuccaagaagucccgcacguaaucgaagaagucaugaacauuguccucaucgcccucucacuccuugccauuuuaaaaggcaucuacaacgucgcaaccugcggacuauucggacucgucucuuuccuccuccuaugcggccgcuccugcuccaccaccuacaaaggagucuacgagcuucaaacccucgaacucgacauggccucacucaacaugacaaugccccucagcugcacuaaaaacaacucacaccacuacauaaugguuggaaacgaaaccggccucgaacucacccuaacaaacaccuccauuaucaaccauaaauucugcaaccucuccgacgcccacaaaaagaaccucuacgaccacgcccugaugucuaucaucuccacauuccaccucucaauccccaacuucaaccaauacgaggccauguccugcgacuucaaugguggcaaaaucuccguacaauacaaccucucccacaccuacgcagucgacgccgcaaaccacugcggcaccaucgccaacggaguacuucaaaccuucaugcgaauggccuggggcggcuccuacaucgcccucgacuccggaaaaggcagcugggacugcaucaugaccucauaccaauaccuaaucauccaaaacaccaccugggaagaccacugccaauucagccgcccaucccccaucggcuaccucggccuccucucccaacgcacacgcgacaucuacaucucccgccgccuacucggcaccuucacuuggacccuaucugacagcgaauccaacgaaacuccaggaggcuacugccuaacucgcuggaugcucaucgaagcagaacucaaaugcuucggcaacacugccguagcaaaaugcaacgaaaaacacgacgaagaguucugcgacaugcuccgccuauucgacuucaacaagcaggccauccgccgccucaaagccgaagcucaaauguccauccaacuaaucaacaaagccgucaacgcccucaucaacgaccaacucaucaugaaaaaccaccuccgcgacaucaugggcauccccuacugcaacuacucuaaauacugguaccucaaccacaccguaaccggccgcacaucccucccacgcugcuggcucgucagcaacggauccuaccuaaacgaaacccacuucucagacgacauugaacaacaagcagacaacaugaucaccgaacuccuccaaaaagaauacauggaccgccaagguaaaaccccacucggccuaguggaccuauucgucuucuccaccucauucuaccugauauccaucuuccuccaccucgucaaaauccccacacaccgccacgucaucggcaaacccugccccaaaccccaccgccuaaaccacaugggaauaugcucuugcggccucuacaaacacccaggaguccccguaaaauggaaacgauaaggacuaguuauaagacugacuagcccgaugggccucccaacgggcccuccuccccuccuugcaccgagauuaauaaaaaaaaaaaaaaaaaaaaaaaaaaaaaaaaaaaaaaaaaaaaaaaaaaaaaaaaaaaaaaaaugcaucccccccccccccccccccccccccccccccaaaggcucuuuucagagccaccagaauu

SEQ ID NO: 3550 - RNA, 1690 nt, Artificial Sequence
  mRNA product Design i-3 comprising derived and/or modified sequence from LASV(LASV035-NIG-2009;Clade II)__AIT17588__GPC (opt11)
gggagaaagcuuaccaugggccaaaucaucaccuucuuccaggaagucccccacgucaucgaagaaguaaugaacauaguccuaaucgcccuaucccuccucgccauucuaaaaggcaucuacaacgucgcaaccugcggacucuucggacucgucuccuuccuucucuuaugcggccgaucaugcuccaccacuuauaaagggguuuacgaacuccaaacccucgaacucgacauggccucccucaacaugaccaugccccuauccugcaccaaaaacaauucacaccacuacaucaugguaggcaacgaaacaggccucgaacucacccucacaaacaccuccaucauaaaccacaaauucugcaaccugucagacgcacacaagaaaaaccuauaugaccacgcacucauguccaucaucuccaccuuccaccucagcaucccaaacuucaaccaauacgaagccaugucaugcgacuucaacggcggcaaaaucuccguacaauacaaccucucccacgccuacgccgucgacgcagcaaaccacugcggaaccaucgccaauggcguccuacaaacauucaugcguauggccuggggcgguuccuacauagcacucgacuccggaaaaggauccugggacugcaucaugaccuccuaccaauaucucaucauccaaaacaccaccugggaagaccacugccaauucucacgcccuucucccauaggcuaccucggccuacuaucgcaacgaacacgcgacaucuacauuucccgacgacuacucggcaccuucacauggacccuuucagauucugaaggcaacgaaaccccaggcggauacugccuaacccgcuggaugcuaaucgaagccgaacuuaaaugcuucggcaauacagccguagccaaaugcaacgaaaaacacgacgaagaguucugcgacaugcuccgccucuucgacuucaacaaacaagcaauccgccgccucaaagccgaagcccaaauguccauccaacucaucaacaaagccgucaacgcccucaucaacgaccaacuuauaaugaaaaaucaccuccgcgacaucaugggaauaccauacuguaacuacuccaaauacugguaccucaaccacacagucaccggcaaaacaucacucccucgcugcugguuagucuccaauggauccuaccucaacgaaacccacuucuccgacgacaucgaacaacaagcagacaacaugaucaccgaacuccugcaaaaagaauacaucgaccgccaaggcaaaacaccacucggccuugucgaccuauucguauucucaaccuccuucuaccugaucuccaucuuccuccaccucguaaaaauaccaacccaccgccacgucauagggaaacccugccccaaaccccaccgccugaaccacaugggaauaugcucaugcggccucuacaaacacccgggcguacccgucaaguggaaacgcuaaggacuaguuauaagacugacuagcccgaugggccucccaacgggcccuccuccccuccuugcaccgagauuaauaaaaaaaaaaaaaaaaaaaaaaaaaaaaaaaaaaaaaaaaaaaaaaaaaaaaaaaaaaaaaaaaugcaucccccccccccccccccccccccccccccccaaaggcucuuuucagagccaccagaauu

SEQ ID NO: 3551 - RNA, 1690 nt, Artificial Sequence
  mRNA product Design i-3 comprising derived and/or modified sequence from LASV(LASV1000-NIG-2009;Clade II)__AIT17782__GPC (opt11)
gggagaaagcuuaccaugggacaaaucaucaccuucuuccaagaggucccccacgucauagaagaagucaugaacaucguccucaucgcacucucccuccucgccauccugaaaggcauauacaacgucgcgaccugcggccucuucggccucgucucuuuccuccuccucugcggcagaucgugcuccaccaccuacaaaggcgucuacgaacugcaaacccucgagcucgacauggccucccucaacaugacuaugccccuguccuguaccaaaaacaacucccaccauuauaucauggucggcaaugaaaccggacucgaacucacccucacuaacaccucaauaaucaaccacaaauucugcaaccucucagacgcccacaaaaagaaccucuacgaccacgcacuaauguccauaauaucaaccuuccaccucucaauccccaacuucaaccaauacgaggcgauguccugcgacuuuaacggcgggaaaaucuccguccaauacaaccuuucucacaccuacgccgucgacgcagccaaccacugcggcacaaucgccaacggcguccuccaaacauucaugcgaauggccuggggcggcuccuacauugcccucgacuccggcaaaggcuccugggacugcaucaugaccuccuaccaguaccucauaauucaaaacacaacuugggaagaccacugccaauuuucccgcccguccccaauuggauaccucggccuccuuagccaaaggacccgcgacaucuauauuucccgacgccuccucggcacauucaccuggacacuauccgacuccgaaggcaacgaaacccccggcggauacugccuaacccgcuggaugcucaucgaagccgaacucaaaugcuucggaaacaccgccgucgcuaaaugcaacgaaaaacacgacgaggaguucugcgacaugcuccgccuauucgacuucaacaagcaagcuaucaaacggcucaaaaccgaagcgcaaauguccauccaacucaucaacaaagcaguaaacgcccucaucaacgaccaacuaaucaugaagaaccaccuacgcgacaucaugggaauccccuacugcaacuacuccaaauauugguaccuaaaccacaccgucacaggcaaaaccucccuaccccgaugcuggcuaguuagcaacggcucauaccuaaaugaaacccacuucucagacgacaucgaacaacaggcggacaacaugaucaccgaacuccuccaaaaggaauacaucgacaggcaaggaaaaacgccccugggccuagucgaccuauucgucuucuccaccucauucuaccuaauaagcaucuuccuccaccucgucaaaauccccacccaccgacacgucgucggaaaacccugcccaaaaccccaccgacucaaccacauggguaucugcuccugcggccuauacaaacaucccggcguccccguaaaauggaaacgcuaaggacuaguuauaagacugacuagcccgaugggccucccaacgggcccuccuccccuccuugcaccgagauuaauaaaaaaaaaaaaaaaaaaaaaaaaaaaaaaaaaaaaaaaaaaaaaaaaaaaaaaaaaaaaaaaaugcaucccccccccccccccccccccccccccccccaaaggcucuuuucagagccaccagaauu

SEQ ID NO: 3552 - RNA, 1690 nt, Artificial Sequence
  mRNA product Design i-3 comprising derived and/or modified sequence from LASV(LASV221-NIG-2010;Clade II)__AIT17624__GPC (opt11)
gggagaaagcuuaccaugggacaaaucaucaccuucuuccaggaaguaccacacguaauagaagaagucaugaacaucguucuaaucgcccucucacuacucgcaauacucaaaggcauauacaacgucgcaaccugcggccucuucggccucgucuccuuccuacuccuuugcggccgcuccugcuccacaaccuacaaaggcgucuacgaacuccaaacucucgaacuagacauggcuucccucaacaugaccaugccccuuucuugcaccaaaaacaacucccaccacuacaucauggucggcaacgaaaccggccuagaacucacccuaacaaacaccuccaucaucaaccacaaauucugcaaccucucagaugcccacaaaaagaaccucuacgaucacgccuuaaugaguaucaucuccaccuuccaccuaucaauacccaacuucaaccaguacgaagcaauguccugcgacuucaacggcggaaaaaucucgguccaauacaaccucucccacaccuacgccaucgacgccgcaaaccacugcggcaccaucgccaacggcguucuccaaacauucaugcgcauggccuggggcggcuccuacaucgcccucgacuccggaaaaggaagcugggacugcaucaugaccagcuaccaguaccuaaucauacaaaacaccaccugggaagaucacugccaauuuucucgccccucccccaucggcuaccucggccuacucucccaacgcacucgcgacaucuacaucagcagacgccuccuuggcaccuucaccuggacccuauccgacuccgaagguaacgaaacucccggcggcuacugccucacacgcuggaugcuuaucgaagccgaacucaaaugcuucggaaacacagccguagccaaaugcaacgaaaaacacgacgaagaauuuugcgacaugcuccgccuauucgacuucaacaagcaagccauccgccgcuuaaaaaccgaagcccaaaugucaauccaacucaucaacaaagccgucaacgcccucauaaacgaccaacucaucaugaaaaaccaccuccgugacaucaugggcauccccuacugcaacuacuccaaauacugguaccucaaccacacugucacgggaaaaacaagccuuccccgaugcuggcuagucuccaauggcucuuaccucaacgaaacacacuucucugacgacaucgaacaacaagccgacaacaugaucaccgaaaugcuacaaaaggaauacauggaccgacagggcaaaacaccccucggccucgucgaccucuucguguucucaaccuccuucuaccugaucuccaucuuccuucaccucguaaaaauccccacccacagacacguaaucggaaagccaugcccaaaaccccaccgccuaaaccacaugggaauuugcucaugcggccucuacaaacaccccggcgucccagucaaauggaaacgcuaaggacuaguuauaagacugacuagcccgaugggccucccaacgggcccuccuccccuccuugcaccgagauuaauaaaaaaaaaaaaaaaaaaaaaaaaaaaaaaaaaaaaaaaaaaaaaaaaaaaaaaaaaaaaaaaaugcaucccccccccccccccccccccccccccccccaaaggcucuuuucagagccaccagaauu

SEQ ID NO: 3553 - RNA, 1690 nt, Artificial Sequence
  mRNA product Design i-3 comprising derived and/or modified sequence from LASV(LASV237-NIG-2010;Clade II)__AIT17638__GPC (opt11)
gggagaaagcuuaccaugggccagaucaucaccuucuuccaagaaguaccccacgucaucgaagaagucaugaacauaguccugaucgcacucucacuccuagccauacucaagggaaucuauaacguagccacaugcggacuauucggucucguaucauuccuacuacucugcggccguuccugcucgaccaccuauaaaggcgucuacgaacuccagacacucgaacucgacauggcaucccucaacaugaccaugccccuaucuugcaccaaaaacaacucccaccacuacaucauggucggaaacgaaaccggacucgaacucacacucaccaacaccucuauaaucaaccacaaauucugcaaccuaucagacgcucacaaaaaagaccucuacgaccacgcacucaugucaaucaucucaaccuuccaccucuccaucccaaacuucaaccaguacgaagccaugucuugcgacuucaauggaggaaaaaucucgguucaguacaaucucagccacaccuacgccgucgacgccgccaaccauugcggaaccaucgcaaacggcguccuacaaaccuucaugcgcauggccuggggcggcuccuacaucgcccucgacuccggcaaaggcuccugggacugcaucaugacuagcuaccaauaucuuaucauacaaaacacaaccugggaagaccacugccaauucucucgacccucaccaaucggcuaccucggacuacucucccagcggacacgcgacaucuacaucagccgccgacuccuaggcacauucaccuggacccuaagcgacagcgaaggcaacgaaacacccggaggcuacugccucacccgcuggaugcucaucgaagccgaacucaaaugcuucggaaacacagcagucgcaaaaugcaacgaaaaacacgacgaagaauucugcgacaugcuccgccucuucgacuucaacaaacaagccauucgcagacucaaaacggaagcccagaugucaauacaacuaauaaacaaagccgucaacgcccuaaucaacgaccaacucaucaugaaaaaccaccuccgcgacaucaugggcauccccuacugcaacuacagcaaauacugguaccucaaccacacagucaccggcaaaaccucacucccacgcuguuggcucgucuccaacgggucauaccucaacgaaacccacuucuccgacgacauugaacaacaagccgacaacaugauaaccgaacuccuccaaaaagaauacauggacagacaaggcaaaacuccccuaggccuagucgaccucuucgucuucagcaccucguucuaccucaucucaauauuccuccaccuaaucaaaauccccacccaccgacacauaaccggcaaacccugucccaaaccacaccgccucaaccacaugggaauaugcucauguggccucuacaaacaccccggcguccccgucaaguggaaacguuaaggacuaguuauaagacugacuagcccgaugggccucccaacgggcccuccuccccuccuugcaccgagauuaauaaaaaaaaaaaaaaaaaaaaaaaaaaaaaaaaaaaaaaaaaaaaaaaaaaaaaaaaaaaaaaaaugcaucccccccccccccccccccccccccccccccaaaggcucuuuucagagccaccagaauu

SEQ ID NO: 3554 - RNA, 1690 nt, Artificial Sequence
  mRNA product Design i-3 comprising derived and/or modified sequence from LASV(LASV253-NIG-2011;Clade II)__AIT17670__GPC (opt11)
gggagaaagcuuaccaugggacaaaucaucacauucuuucaagaagucccccacgucaucgaagaaguaaugaacauaguccucaucgcacucagccuccucgcaauacucaaagguaucuacaacguggccacuugcggucucuuuggccuagucucauuccuucuucucugcgggcguucaugcuccaccacauacaaaggcgucuacgaacuccaaacccuagaacucgacauggccucccucaacaugaccaugccccucuccugcaccaaaaauaacucccaccacuacaucauggucggcaacgaaaccggccucgaacuaacccucaccaacaccuccaucaucaaccacaaauucugcaaccucuccgacgcacacaagaaaaaccuauacgaccacgcacuaaugucaaucaucucaaccuuccaccucuccauccccaacuucaaccaguacgaagccauguccugcgacuucaauggcggcaaaaucuccguccaauacaaccucucccacaccuacgccgucgacgccgccaaccacugcggcacgauagccaauggaguccuacaaaccuucaugcgcauggccuggggcggcucauauauagcccuagacuccggcaaaggcuccugggacugcaucaugacauccuaccaauaccucaucauucaaaacaccaccugggaagaccauugccaauucucccgacccagccccaucggauaccuaggacuccuaagccagcgcacccgcgacaucuacaucucccgacgccuccuaggaaccuucaccuggacacuauccgacuccgaaggaaacgaaaccccaggcggauacugucucacccgcuggaugcucauagaagccgaacucaaaugcuucggaaauaccgccgucgccaaauguaacgaaaaacaugacgaagaauuuugcgacaugcuccgccucuucgacuucaacaaacaagccauacgccgccucaaggccgaagcccagaugucaauccaacucaucaacaaagccgucaacgcccuaauaaacgaucaacuuaucaugaagaaccaccuacgagacaucaugggaauacccuacugcaacuacuccaaauauugguaucuaaaccauacagucacaggccgcaccucacuaccccgcugcuggcucguauccaacgguucauaccucaacgaaacccacuucagcgacgacaucgaacaacaagcagacaacaugaucaccgaacuucuccaaaaagaauacauagaccgacaaggcaaaacaccccucggccucgucgaccucuucgucuuuuccaccuccuucuaccucaucucaaucuuccugcaccuggucaagaucccaacccaccgacacaucaucggcaaacccugccccaaaccccaccgccucaaccacaugggcaucugcuccugcggccucuacaagcaccccggcguccccguaaaauggaaacgcuaaggacuaguuauaagacugacuagcccgaugggccucccaacgggcccuccuccccuccuugcaccgagauuaauaaaaaaaaaaaaaaaaaaaaaaaaaaaaaaaaaaaaaaaaaaaaaaaaaaaaaaaaaaaaaaaaugcaucccccccccccccccccccccccccccccccaaaggcucuuuucagagccaccagaauu

SEQ ID NO: 3555 - RNA, 1690 nt, Artificial Sequence
  mRNA product Design i-3 comprising derived and/or modified sequence from LASV(LASV254-NIG-2011;Clade II)__AIT17674__GPC (opt11)
gggagaaagcuuaccaugggccaaauaaucaccuucuuucaagaagucccccauguaaucgaggaagucaugaacaucguacuaaucgcucucucccugcuagccauccuaaaaggcauauacaacgucgccacaugcggacucuucggacucguaucauuccuacuccuuugcggccgcuccugcucaaccaccuacaaaggcgucuacgaacuacaaacccuugagcucgacaugacaaaccucaacaugaccaugccccuaagcugcacuaaaaacaacucccaccacuacaucauggucggcaacgaaaccggacuggaacuuacccucacaaacacauccaucaucaaccacaaauucugcaaccuauccgacgcacacaagaaaaaucuuuacaaccaugcccucauguccaucaucuccacauuccaccuauccauccccaacuucaaccaauacgaggccaugucaugugacuucaacggcggcaaaaucuccguucaauacaaccuuucccacucauacgccguagacgccgccaaccacugcggcaccaucgcuaauggaguccuccaaacauucaugagaauggccuggggcggcuccuacaucgcccuagacuccggcaaaggcaacugggauugcaucaugaccucauaccaauaccucaucauccagaacacaaccugggaggaccacugccaauucucacgccccucucccaucggauaccucggccuacuaagccaacgcacccgggacaucuacaucucacgacgccuacuaggcaccuucaccuggacccucuccgacuccgaaggaaacgaaacacccggcggcuacugccuaacacgcuggaugcucaucgaagcagaacuaaaaugcuuugggaacaccgcaguagccaaauguaacgagaaacacgacgaagaguucugcgacaugcuacgccuguucgauuucaacaaacaggccauccgacgacucaaaaccgaagcacaagccaacauacaacucaucaacaaggccguuaacgcacuuaucaacgaccaacucaucaugaaaaaccaccuucgcgacaucaugggcauccccuacugcaacuacuccaaauacugguaccuaaaccacaccgucacaggaaaaaccucccucccccgcuguuggcuugucuccaacggcucauaucucaacgaaacccacuucuccgacgacaucgaacaacaagccgacaacaugaucacagaacuacuccagaaggaauacauggaccgacaaggcaaaaccccacucggacucgucgaccuauucgucuucucaaccuccuucuaccucauuagcaucuuccuacaucucguaaaaauccccacccaccgccacgucaucggcaaacccugccccaaaccccaucgccucaaccacaugggaaucugcagcugcggccucuacaaacaccccggcguucccgucaaauggaaacgcugaggacuaguuauaagacugacuagcccgaugggccucccaacgggcccuccuccccuccuugcaccgagauuaauaaaaaaaaaaaaaaaaaaaaaaaaaaaaaaaaaaaaaaaaaaaaaaaaaaaaaaaaaaaaaaaaugcaucccccccccccccccccccccccccccccccaaaggcucuuuucagagccaccagaauu

SEQ ID NO: 3556 - RNA, 1690 nt, Artificial Sequence
  mRNA product Design i-3 comprising derived and/or modified sequence from LASV(Nig08-A19;Clade III)__ADU56618__GPC (opt11)
gggagaaagcuuaccaugggccaaaucgugaccuucuuccaagaaguaccucacgucaucgaagaaguaaugaacauaguccucaucgcccucaguauccucgccauccuaaaaggccuauacaacaucgcuaccugcggccucaucggccucguuaccuuccuccuccugagcgggcgcucaugcuccaugaccuacaaaggcgucuacgaacuccaaacccucgaacuaaacaugaacacacuaaacaugaccaugccccucucgugcaccaagaacaacucccaccacuacauaauggucggaaacgaaacaggccuagaacugacccuuaccaacacaucccuccuccaccacaaauucuguaaccucucagacgcccacaagaaaaaccucuacgaccauacacugaugucaaucauauccaccuuccaccucagcauacccaacuucaaccaauacgaagccaugucaugcgacuucaacggcggcaaaauaaccguccaauacaaccucucacacucauacgccauagacgccgccaaccacugugggaccguagcuaacggaguccuccaaacauucaugcgcauggccuggggaggcucauacauagcccuagacucuggccgcggaaaaugggacugcauaaugacaucauaccaauaccucaucauccaaaacaccaccugggaagaccacugccaauucucacgacccucacccaucggcuaccucggacuccuaucccagcgcaccagagacaucuacauaucccgccgacuccuaggcacauucaccuggacacuaucagacuccgaaggcaacgaaacccccggcggguacugccuaacccgcuggaugcuaaucgaagcagaacucaaaugcuucggcaacaccgccguggccaaaugcaacgaaaaacacgacgaagaguucugcgacaugcuccgacucuucgacuucaacaaacaagcaauccgccgacucaaagccgaagcccaaaugucaauacaacuaaucaacaaagccgucaacgcacuaaucaacgaccaacucaucaugaaaaaccaccuccgugacaucaugggaauccccuacugcaacuauucaaaauauugguaccuaaaccacaccuccaccggacgcaccuccuuaccccgcugcuggcuagucucaaaugguucauaccucaacgaaacccacuucuccgaugacaucgaacaacaagccgacaacaugaucaccgaaaugcugcaaaaagaauaccuugaccgacaaggcaaaacaccccucggacucgucgaccucuucgucuuuucaaccuccuuuuaccucaucucgaucuuucuacaccucgucaaaauccccacccacagacacaucgucggcaagcccugccccaaaccccaccggcuuaaucacaugggaaucugcuccugcggccuuuacaagcaaccaggaguccccguaagauggaaacgauaaggacuaguuauaagacugacuagcccgaugggccucccaacgggcccuccuccccuccuugcaccgagauuaauaaaaaaaaaaaaaaaaaaaaaaaaaaaaaaaaaaaaaaaaaaaaaaaaaaaaaaaaaaaaaaaaugcaucccccccccccccccccccccccccccccccaaaggcucuuuucagagccaccagaauu

SEQ ID NO: 3557 - RNA, 1693 nt, Artificial Sequence
  mRNA product Design i-3 comprising derived and/or modified sequence from LASV(G1180-SLE-2010;Clade IV)__AIT17168__GPC (opt11)
gggagaaagcuuaccaugggccaaaucguaaccuucuuccaagaagucccccacgucauagaggaggucaugaacaucguccucauagcccucuccauccucgcaguucucaaaggacucuacaacuucgcaaccugcggccuagucggacuccucaccuuucuucuccucugcggccgcuccugcaccgccucccgcuacaaaggugucuacgaacuccaaacacucgaacucaacauggaaacacuaaacaugaccaugccccuauccugcaccaaaaacaauucccaccacuacaucauggugggcaacgaaaccggccucgagcucacgcuaacaaacaccuccaucaucaaccauaaauucugcaaccucuccgacgcucacaagaaaaaccucuacgaccaugcccucaugucaaucaucuccaccuuccaucuauccauccccaacuucaaccaauaugaagccauguccugcgacuucaacggaggcaaaaucuccguacaauacaaccucucccacuccuacgccggagacgccgccaaucacugcggcaccgucgccaacggcguccugcaaacauucaugcguauggccuggggcggcucauacaucgcccucgacuccggccacggcuccugggacugcauaaugacaagcuaccaauaccucaucauacaaaacacaaccugggaagaccacugccaauucagccgaccaucaccaaucgguuaccucggccugcuaucccaacgaacacgcgacaucuacauaucccgacgacugcucggaaccuucaccuggacccugagcgacucugaaggcaaagacacacccggcggcuacugccuaacccgcuggaugcuaaucgaagccgaacucaaaugcuucggaaacacagccguagccaaaugcaacgaaaaacacgacgaagaguucugcgacaugcuccgccuauucgacuucaacaaacaagccauucaacgacuaaaagccgaagcacaaauguccauacaacuaauaaacaaagccgucaacgcccuuaucaacgaccaacucaucaugaaaaaccaccuaagagacauaaugggcauccccuacugcaacuacagcaaauacugguaccucaaccacacgacaacaggaaaaaccucuuuacccaagugcuggcuaguaagcaacgguucauaccucaacgaaacccacuucuccgacgacaucgaacaacaagccgacaacaugaucaccgagaugcuacaaaaagaauacauggaacgacaaggcaaaacaccccucggacucgucgaccucuucgucuucuccaccuccuucuaccuaaucucaaucuuccuacaccuagucaaaauacccacccaccgccacaucgucggaaaauccugcccaaaaccccaucgacucaaccacaugggcaucugcuccuguggccuauacaaacagcccggagucccagucaaguggaaacgauaaggacuaguuauaagacugacuagcccgaugggccucccaacgggcccuccuccccuccuugcaccgagauuaauaaaaaaaaaaaaaaaaaaaaaaaaaaaaaaaaaaaaaaaaaaaaaaaaaaaaaaaaaaaaaaaaugcaucccccccccccccccccccccccccccccccaaaggcucuuuucagagccaccagaauu

SEQ ID NO: 3558 - RNA, 1693 nt, Artificial Sequence
  mRNA product Design i-3 comprising derived and/or modified sequence from LASV(G1442-SLE-2011;Clade IV)__AIT17180__GPC (opt11)
gggagaaagcuuaccaugggccaaauugucaccuucuuccaagagguaccccacgucaucgaagagguaaugaacaucguccucaucgcccuauccauccucgcuguccuuaaaggccucuacaacguagcaacuugcggccuaauaggucuggucaccuuccuccuccucugcggccgcucuugcacaaccacccucuacaaaggagucuacgagcuccaaacgcuagaacuaaacauggaaacccucaacaugaccaugccacuauccugcaccaaaaauaacucacaccacuacauccgcguaggaaacgaaacuggacucgagcugacacucaccaacaccagcaucauuaaccacaaauucugcaaccucuccgacgcccacaagaaaaaccucuacgaccacgccuuaauguccaucaucuccaccuuccacuuauccauaccaaacuucaaccaguacgaagcaaugucaugcgacuucaacggcggcaaaauauccguccaauacaaccuaucccacuccuacgccggcgacgccgccaaccacugcgguaccgucgccaacggcgugcuccaaacauucaugcggauggcauggggcggcucguacaucgcacucgacuccggacgaggcaacugggacugcaucaugaccuccuaccaauaccuaauaauacaaaacaccaccugggacgaccacugccaauucucacgcccauccccaaucggcuaccuaggacuacucucccaacgcacccgcgacguauacauaucccgccgccuccuggggaccuucaccuggacacucagcgacuccgaaggcaaagauacccccggcggauacugccucacccgcuggaugcucaucgaagccgaacuaaaauguuucggcaacaccgccgucgcaaaauguaacgaaaaacacgacgaagaguucugcgacaugcuccgccuauucgacuucaacaaacaagccauccaacgccuuaaagcagaagcccagauguccauccaacucaucaacaaagcaguaaacgcccuaaucaacgaccaacucaucaugaaaaaccaccuccgugacaucaugggcauaccuuacuguaauuacuccaaguacugguaccucaacaacacagccaccggcaaaaccucccucccaaaaugcuggcucaucuccaacggcucuuaccucaacgaaacccacuucuccgacgacaucgaacaagaagccgacaacaugauaaccgaaaugcuacaaaaagaguacauggaaagacaaggcaaaacaccccuaggccuagucgaccucuucgucuucucuaccucauucuaccucauauccaucuuccuccacuuagucaaaaucccgacccaucgccauauagucggcaaauccugccccaaaccacaccgccuuaaccacaugggcauaugcagcugcggacucuacaaacagcccggcguccccguccgauggaaacgauaaggacuaguuauaagacugacuagcccgaugggccucccaacgggcccuccuccccuccuugcaccgagauuaauaaaaaaaaaaaaaaaaaaaaaaaaaaaaaaaaaaaaaaaaaaaaaaaaaaaaaaaaaaaaaaaaugcaucccccccccccccccccccccccccccccccaaaggcucuuuucagagccaccagaauu

SEQ ID NO: 3559 - RNA, 1693 nt, Artificial Sequence
  mRNA product Design i-3 comprising derived and/or modified sequence from LASV(G3010-SLE-2013;Clade IV)__AIT17344__GPC (opt11)
gggagaaagcuuaccaugggccaaaucguaaccuuuuuccaagaagucccccauguaaucgaagaagucaugaauaucguccugaucgcccuaucaauccucgccguccucaagggccucuacaacuucgcaaccugcggccucguagggcuaguaaccuuccuccuccucugcggccgcucaugcaccaccucacucuacaaaggcgucuacgaacuacaaacccuagagcuuaacauggaaacccucaacaugaccaugccccuaagcugcaccaaaaacaacucacaccacuacaucauggucggcaacgaaaccggccucgaacucacacucaccaacacaucuaucaucaaccacaaauucugcaaccucuccgacgcacacaaaaagaaccucuacaaccacgcacuaauguccauaaucucaaccuuucaccucuccauccccaacuucaaccaauacgaagcaauguccugugacuuuaacggcggaaagaucucaguacaauacaaccucucccacagcuacgccggcgacgccgccucacacugcggcacgguagccaacggcguccugcaaacguucaugcgcauggccuggggcgguagcuacaucgcccucgacuccggcuacggaaaaugggacugcaucaugaccuccuaccaauaccucaucauccaaaacaccaccugggaagaccacugccaauucucccgccccucccccaucggcuaccucgggcuccuuucccaaagaacccgcgacaucuacaucucccgccgacuccuaggcaccuucacauggacccuaucugacuccgaaggaaaggacaccccagggggauacugccucacccgcuggaugcucauagaagcagaacucaaauguuucggcaacaccgccgucgcaaaaugcaacgaaaaacacgacgaagaguucugcgacaugcucagacucuucgacuucaacaaacaagccauacaacgccucaaaacagaagcccaaauguccauacagcucauuaacaaagccgucaacgcacucaucaacgaucaacuaaucaugaaaaaccaccuccgcgacauuaugggcauccccuacugcaacuacuccaaauacugguaccucaaccacaccacaacgggcaaaacuucacucccaaagugcuggcuuguauccaacggcuccuaccucaacgaaacccacuucagcgacgacaucgaacaacaggccgacaacaugaucacagagaugcugcagaaagaguacauggaacgccaaggcaaaacaccccucggccuggucgaccuuuucguauucagcaccuccuucuauuuaaucuccaucuuccuccaccucgucaaaaucccaacccacagacacaucgucggaaaaucaugccccaaaccccaccgacucaaccacaugggcaucugcuccugcggccucuacaagcaaccgggaguccccguacgauggaaaagaugaggacuaguuauaagacugacuagcccgaugggccucccaacgggcccuccuccccuccuugcaccgagauuaauaaaaaaaaaaaaaaaaaaaaaaaaaaaaaaaaaaaaaaaaaaaaaaaaaaaaaaaaaaaaaaaaugcaucccccccccccccccccccccccccccccccaaaggcucuuuucagagccaccagaauu

SEQ ID NO: 3560 - RNA, 1693 nt, Artificial Sequence
  mRNA product Design i-3 comprising derived and/or modified sequence from LASV(G502-SLE-2009;Clade IV)__AIT17126__GPC (opt11)
gggagaaagcuuaccaugggacaaaucguuacguucuuccaagaaguaccacacgucaucgaagaaguaaugaacauaguacucaucgcccuauccauccucgccguacuaaaaggccucuacaacuucgcaaccugcggacucgucggccuacucaccuuccugcuccuaugcggucgcuccugcacaacgggacucuauaaaggcgucuacgaacuccaaacacucgaacuuaacauggaaacccuaaacaugaccaugccacucucaugcaccaaaaacaacucccaccacuacaucaugguaggcaacgaaacaggacucgaacugacccucacaaacacguccaucauaaaucacaaauucugcaaccucucagacgcccacaagaaaaaccuauaugaccacgcacuaaugagcaucauaagcacauuccaccucucaauacccaacuucaaccaauacgaagccaugucgugcgacuucaacggcggaaaaauuuccguccaauacaaccuuucccacucauacgccggcgaugcagccgaccacugcggcaccgucgccaacggaguacuccaaaccuucaugcgcauggccuggggcggcagcuacaucgcucucgacagcggacgaggucguugggacugcaucaugacaucuuaccaauaccucaucauccaaaacacaacuugggaagaccacugccaguucucccgcccuucacccaucggauaccucggccuccucucacaacgcacucgagacaucuacaucucccgacgccuacucggaaccuucaccuggacccucucagacuccgaaggaaaagacacccccggcggauacugccucacacgcuggaugcuaaucgaagcagaacucaaaugcuucggcaacacagccguagcaaaaugcaacgaaaaacacgacgaagaguucugcgauauguuacgacucuucgacuuuaacaaacaagccauccaacgacuuaaagccgaagcucaaauguccauacaacuaaucaacaaagccguaaacgcccuaaucaacgaccaacucguaaugaaaaaccaccuccgagacauaaugggaauaccauacugcaacuacucccgcuacugguaccuuaaccauaccaccaccggccgcaccagccuacccaaaugcuggcucguaagcaacggcucauaccucaacgaaacucacuucuccgaugacaucgaacaacaagccgauaacaugauuaccgaaaugcuacaaaaagaauacauggaacgccaaggcaaaacaccucuaggccuagucgaccuauucgucuucucaaccucuuucuaccucaucuccauauuccuccaccuaguaaaaauccccacccaccgccacauagucggcaaguccugccccaaaccccaccgccucaaccacauggguauuugcuccugcgggcuuuacaaacaaccaggcgucccaguaaaauggaaacgcuaaggacuaguuauaagacugacuagcccgaugggccucccaacgggcccuccuccccuccuugcaccgagauuaauaaaaaaaaaaaaaaaaaaaaaaaaaaaaaaaaaaaaaaaaaaaaaaaaaaaaaaaaaaaaaaaaugcaucccccccccccccccccccccccccccccccaaaggcucuuuucagagccaccagaauu

SEQ ID NO: 3561 - RNA, 1693 nt, Artificial Sequence
  mRNA product Design i-3 comprising derived and/or modified sequence from LASV(G733-SLE-2010;Clade IV)__AIT17154__GPC (opt11)
gggagaaagcuuaccaugggccaaaucgucaccuucuuccaggaagucccccacgucaucgaagaagucaugaacauaguccucauagcccugucaauccucgccguccucaaaggacucuacaacuucgccacuugcggaauagucggccuagucuccuuucuacuucucugcggacgcucaugcacaaccagccuguacaaaggcguauacgaacuccaaacacuugaacugaacauggaaacccucaacaugaccaugccccucuccugcaccaaaaacaacucccaccacuacauaauggucggcaacgaaacaggccuagaacucacccucacaaacaccuccaucaucaaucacaaauucugcaaccuaucagacgcccauaagaaaaaccucuacgaccaugcccucaugagcaucaucucaacauuccaccucuccauccccaacuucaaccaauacgaagccauguccugcgauuucaacgguggcaaaaucagcguacaguacaaccuaucucacucauacgccggcgacgccgccaaccacugcggcaccauagccaacggcguacugcaaacauucaugcgcauggccuggggcggcuccuacaucgcgcucgauucaggccgcgaccgcugggacugcauaaugaccucauaccaguaccuaaucauccaaaacacaaccugggaagaccacugccaauucucccgacccucucccauaggcuaccucggccuucucucccaacgaacccgagacaucuacaucagccgccgacuucucggcaccuucaccuggacccucagcgacuccgaaggcaaagacaccccuggcggcuacugccucacacgguggaugcuaaucgaggccgaacuaaaaugcuucggaaacaccgcaguugccaaaugcaacgaaaaacacgacgaagaguucugugauaugcuccgccucuucgacuucaacaaacaagcuauacaacgccucaaagccgaagcacaaauguccauccaacuaaucaacaaagccgucaaugcccugaucaacgaccaacugaucaugaaaaaccaccuccgggacauaaugggcauccccuacugcaacuacucgaaguacugguaucuuaaccacaccaccaccggaaaaacaagccuccccaaaugcuggcucguauccaacggauccuaccucaacgaaacccacuucucagacgacaucgaacaacaagcggacaacaugauaacugaaaugcuccaaaaagaauacauggaacgccaaggaaagaccccacuaggcuuaguugaccuauucguauucuccaccuccuucuaucucaucuccaucuuccuacaccucgucaaaauccccacccaccgacacguagucggcaaaucaugccccaaaccccaccgccugaaccacaugggcauaugcagcugcggucuuuacggucaacccggaguacccgucaaauggaaacgcuaaggacuaguuauaagacugacuagcccgaugggccucccaacgggcccuccuccccuccuugcaccgagauuaauaaaaaaaaaaaaaaaaaaaaaaaaaaaaaaaaaaaaaaaaaaaaaaaaaaaaaaaaaaaaaaaaugcaucccccccccccccccccccccccccccccccaaaggcucuuuucagagccaccagaauu

SEQ ID NO: 3562 - RNA, 1693 nt, Artificial Sequence
  mRNA product Design i-3 comprising derived and/or modified sequence from MOPV/LASV reassortant(IGS-1;Clade IV)__AFY05576__GPC (opt11)
gggagaaagcuuaccaugggccaaaucgucaccuucuuccaagagguaccccacgucaucgaagaagucaugaacaucguacucaucgcccuuuccguccucgcaguacuaaaaggacuauacaacuucgccacuugcggccuagucggacucgucaccuuccugcuccuauguggccgcagcugcaccacuucccuuuacaagggcgucuacgaacuccaaacccucgaacucaacauggaaacccucaacaugaccaugccccucuccuguaccaaaaacaacucucaccacuacauaauggucggcaacgaaacuggccucgaacucacacucaccaacacguccaucaucaaccacaaauucugcaaccucagcgacgcccacaaaaagaaccucuacgaucacgcccucauguccauaaucagcaccuuccaccucuccauccccaacuuuaaccaauacgaagcaauguccugcgauuucaacgguggcaaaaucuccguccaauacaaccuaucccacuccuacgccggagacgccgcgaaccacugcggcacagucgccaacggaguccuccaaacauucaugcgaauggccuggggagguagcuacauagcccucgauucaggcagaggcaacugggacugcaucaugaccucauaccaauaccucaucauccaaaacacaacaugggaagaccacugccaauucagccgacccagccccaucgguuaccuaggccuccucucccaacgcacacgagacaucuacaucucacgacgucuacucgguaccuucaccuggacacucuccgacuccgaaggugaagacacccccggcggcuacugccucacccgcuggaugcucaucgaagccgagcucaaaugcuucggaaacaccgccguagcaaaaugcaacgagaaacacgacgaagaguucugcgacaugcuucgccucuucgacuucaacaaacaagccauacaacgccuaaaagccgaagcccaaaugucaauccaacucaucaacaaagcuguaaacgcacuaaucaacgaccaacucaucaugaaaaaucaucuucgcgacaucauggguauccccuacugcaacuacuccaaauacugguaccucaaccacacaaccaccggacgaaccucccucccuaaaugcuggcucguaucaaacggcuccuaccuuaacgaaacccacuucucagacgacauagaacaacaagccgacaacaugaucacagaaaugcuucaaaaagaauacauggaacgccaaggaaaaacuccccuaggucucgucgaccucuucgucuucuccaccagcuucuaccuaaucucgauauuccuacaccuagucaaaauacccacccaccgccacaucguaggcaaaagcugccccaaaccccaccgccucaaccacaugggcauaugcuccugcggccuauacaagcagcccggugucccugucaaauggaaacgcugaggacuaguuauaagacugacuagcccgaugggccucccaacgggcccuccuccccuccuugcaccgagauuaauaaaaaaaaaaaaaaaaaaaaaaaaaaaaaaaaaaaaaaaaaaaaaaaaaaaaaaaaaaaaaaaaugcaucccccccccccccccccccccccccccccccaaaggcucuuuucagagccaccagaauu

SEQ ID NO: 3563 - RNA, 1693 nt, Artificial Sequence
  mRNA product Design i-3 comprising derived and/or modified sequence from LASV(LM765-SLE-2012;Clade IV)__AIT17814__GPC (opt11)
gggagaaagcuuaccaugggccaaaucgucaccuucuuccaagaaguaccacacgucaucgaagaagucaugaacaucguacucauagcccuaagcauccucgccguacucaaaggacucuacaacuucgcaacuugcggccucgucggccucguaacauuccuucugcucugcggucgaagcugcaccaccucccuauacaaaggcgucuacgaacuccaaacacuagaacucaacauggaaacccucaacaugaccaugccccuaucaugcaccaaaaacaacucccaccacuacaucauggucgguaacgaaacaggccuagaacucacucuaacaaacaccuccaucaucgaucacaaauucugcaaccucucagacgcgcaccggaaaaaccucuacgaccacgcacucauguccaucauauccacguuccaccuuucaauccccaacuucaaccaauacgaagcuaugucaugcgacuucaacggcgguaagauaucaguccaguacaaccucucccacuccuacgccaaggacgccgcagaccacugcggcaccgucgccaacggcguccuccaaaccuucaugcgaauggccuggggcggcuccuauaucgcccucgacucaggccgaggccgcugggacugcaucaugaccagcuaccaauaccucaucauccaaaacacaaccugggaagaccacugccaauucucacgaccaucuccuaucggcuaccuaggcuuacucucccaacgcacccgagacaucuacauaagccgccgccuacuugguacauucaccuggacacuauccgacuccgaaggaaaagacaccccugguggauauugccuaacacgcuggaugcucaucgaagcagagcucaaaugcuucggcaacaccgccguagcaaaaugcaacgaaaaacacgacgaagaguucugcgacaugcuccgccucuucgacuucaacaaacaagccauccaacgccuaaaagccgaagcccaaauguccauacaacucaucaacaaagcagucaacgcccucaucaacgaccagcucaucaugaaaaaccaccuuagagacauaaugggcaucccauacugcaacuacucaaaauauugguaucucaaccacacaaccaccggaaaaaccagccuccccaaaugcuggcucgucaguaauggaucauaccucaacgaaacccacuucuccgacgacauugaacaacaagcagacaauaugaucacugaaaugcuucaaaaagaauacauggaacgacaaggcaaaacuccucucggccucgucgaccucuucgucuucagcaccagcuucuaccucaucucgaucuuccuacaccuugucaaaauccccacacaucgccacaucgucggaaaacccugccccaaaccccaccgccucaaccacaugggaaucugcucaugcggccucuauaaacaacccggcguccccgucaaauggaaacgcuaaggacuaguuauaagacugacuagcccgaugggccucccaacgggcccuccuccccuccuugcaccgagauuaauaaaaaaaaaaaaaaaaaaaaaaaaaaaaaaaaaaaaaaaaaaaaaaaaaaaaaaaaaaaaaaaaugcaucccccccccccccccccccccccccccccccaaaggcucuuuucagagccaccagaauu

SEQ ID NO: 3564 - RNA, 1693 nt, Artificial Sequence
  mRNA product Design i-3 comprising derived and/or modified sequence from LASV(LM776-SLE-2012;Clade IV)__AIT17824__GPC (opt11)
gggagaaagcuuaccauggggcaaaucgucaccuucuuccaagaaguuccccacgucaucgaagaagucaugaacaucguacuaaucgcccucuccauccucgcaguacuaaaaggacucuacaacuucgccacaugcggccucgucggccucgucacauuccuacuccuaugcggccgcucaugcaccaccuccgucuacaaaggcgucuacgaacuccaaacccucgaacucaacauggaaacccucaacaugaccaugccucucuccugcaccaaaaacaacucccaucacuacaucauggucggcaacgagaccggacuagaacucacacucacaaacaccuccaucaucaaccacaaauucugcaaccuaucugacgcacacaagaaaaaccucuacgaccacgcccucaugucaauuaucuccaccuuccaccuauccauacccaacuucaaccaauacgaagccaugucaugcgacuucaacggcggcaaaaucuccguccaauacaaccucagccacucauacgcuggcgacgccgcuaaccacugcgguaccgucgccaacggcguccugcaaacauucaugcgcauggccuggggcggauccuacaucgcccucgacuccggacacgggaaaugggacugcaucaugacuuccuaccaauaccucauaauacaaaacaccaccugggaagaccacugccaguucucccgaccauccccaaucggauaccucggacuccuaucucaacgcacccgagacaucuacaucagccgacgccuccuuggcaccuucaccuggacccucucagacuccgagggcaaagacaccccgggcggcuacugccucacccgcuggaugcuaauagaagccgaacucaaaugcuucggcaacaccgccguagccaaauguaacgaaaaacacgacgaagaguucugcgauaugcuucgccucuucgacuucaacaaacaagcaauccaacgacucaaagcagaagcacagaugagcauucaacuuaucaauaaagccguaaacgcccugaucaacgaccaacucaucaugaaaaaccaccuucgcgacauaaugggcauccccuacugcaacuacuccaaauacugguacuugaaccacaccaccaccgguaaaacuagccuaccuaaaugcuggcuugucucuaacggauccuaccucaacgaaacacacuucagcgacgacaucgaacaacaagccgauaacaugaucacagaaaugcuccagaaagaguacauggagcgccaaggaaaaaccccgcucggccuagucgaccucuucguauucuccaccagcuucuaucucaucuccauauuccuccaccucgucaaaaucccuacccaccgccacauaguagguaaaucaugcccaaaaccccaccgacucaaccacaugggcaucugcuccugcggccucuacaaacaaccaggcguacccguucgauggaaacgaugaggacuaguuauaagacugacuagcccgaugggccucccaacgggcccuccuccccuccuugcaccgagauuaauaaaaaaaaaaaaaaaaaaaaaaaaaaaaaaaaaaaaaaaaaaaaaaaaaaaaaaaaaaaaaaaaugcaucccccccccccccccccccccccccccccccaaaggcucuuuucagagccaccagaauu

SEQ ID NO: 3565 - RNA, 1693 nt, Artificial Sequence
  mRNA product Design i-3 comprising derived and/or modified sequence from LASV(Mad39;Clade IV)__ANH09722__GPC (opt11)
gggagaaagcuuaccaugggccaaaucguaacuuucuuccaagaagucccccacguaauugaagaagugaugaacaucguccucaucgcccucuccauccuagccguacugaagggccucuacaacguagcaacgugcggccucaucggccucgucaccuuccuacugcucugcggaagaucaugcaccaccacccucuacaagggagucuacgaacuccaagcccucgaacucaauauggaaacccuaaacaugaccaugccacuauccugcaccaaaaacaacagccaccacuacauucgcgucgguaacgaaacaggccucgaacuaacccuuaccaacaccucccucaucaaccacaaauuuugcaaucugucugacgcacacaagaaaaaccucuacgaccacgcacucaugucaaucaucuccacauuccaccuauccauaccaaacuucaaccaguacgaggcaauguccugcgacuuuaacgauggcaaaaucucaguccaauauaaccucucccacaccuacgccggagacacagccaaccacugcggaaccgucgcaaauggcguacuccaaacuuucaugcgaauggccuggggcggauccuacauagcccuagacuccggacgcggagguugggacuguaucaugaccuccuaucaauaccuaaucauacagaacaccaccugggaagaccacugccaauucucacgacccucuccgaucggcuaccucggccuccuaucacaacgaacccgggacauauacaucucacgccgacuauuaggcacguucaccuggacacucucagacucagaaggaaaagauacccccggaggcuacugccugacccgauggaugcucaucgaagcagaacucaaaugcuucggaaacaccgccguugccaaaugcaacgaaaaacacgacgaagaguucugcgacaugcuccgacuauuugacuucaacaaacaagccauccagcgccucaaagccgaagcccagaugucaauccaacuaauaaacaaagcagucaacgcccucaucaacgaccaacucaucaugaaaaaccaccuacgcgacauaaugggcaucccauacugcaacuacuccaaauacugguaccuaaaccacaccguaaccgguaaaacaucacuuccuaaaugcuggcucgucuccaacggaagcuaccuaaacgaaacacacuucucagacgacaucgaacaacaagcagacaacaugauuacagaaaugcuccaaaaagaauacauggaacgacaaggcaagacaccacucggccucgucgaccucuucgucuucagcaccucauucuaccucaucuccaucuuccuucaccucgugaagauacccacccaccgucacgucguagguaaacccugcccaaaaccccaccgacucaaccacaugggaauaugcuccugcggcuucuacaaacaacccggcguucccguccgauggaaacgcuaaggacuaguuauaagacugacuagcccgaugggccucccaacgggcccuccuccccuccuugcaccgagauuaauaaaaaaaaaaaaaaaaaaaaaaaaaaaaaaaaaaaaaaaaaaaaaaaaaaaaaaaaaaaaaaaaugcaucccccccccccccccccccccccccccccccaaaggcucuuuucagagccaccagaauu

SEQ ID NO: 3566 - RNA, 1693 nt, Artificial Sequence
  mRNA product Design i-3 comprising derived and/or modified sequence from LASV(Z0947-SLE-2011;Clade IV)__AIT17840__GPC (opt11)
gggagaaagcuuaccaugggccaaauugucaccuucuuccaggaagucccucacgucaucgaagaagucaugaacaucguacugaucgcacucucgauccucgcuguccugaaaggccuauacaacuucgcaaccugcggacucgucggacucguaacauuucuccuccucuguggccgaucuugcacaaucucccuauacaaaggcgucuacgaacuucaaacccuagaacuaaauauggaaacccucaacaugacaaugccccucuccugcacuaaaaacaacucacaccacuacauaaugguagguaacgaaaccggccucgaacucacccucaccaacaccuccaucaucaaccacaaauucugcaaccuuuccgacgcccacaagaaaaaccuauacgaccacgcccucaugucaauaaucuccacauuccaccucuccauccccaauuucaaccaauacgaagccaugucaugcgacuucaacgguggaaaaauauccguacaauacaaccucucccacuccuacgccggcgacgcugccaaccacugcggcacagucgccaacggcguccuccaaaccuucaugagaauggcguggggcggcuccuacauagcccucgacagcggccgugaccgcugggacugcaucaugacuuccuaccaguaccucaucauccaaaauacgacaugggaagaccacugccaauucucccgcccgucccccaucggcuaccuuggccuccuaucacaaagaacacgcgacaucuacaucucccgccgccuccuggguaccuucacauggacccucuccgacagcgaaggcaaagacacccccggcggcuacugccucacccgauggaugcucaucgaagcagaacucaaaugcuucggcaauaccgccgucgccaaaugcaacgaaaaacacgacgaagaauuuugcgacaugcucagacucuucgacuucaacaaacaagcgauccaacggcuaaaagccgaagcccaaaugucuauccaacuaauaaacaaagccgucaacgcacuaauaaacgaccaacuaaucaugaaaaaccaucuacgugacaucaugggcaucccauacugcaacuacuccaaauauugguaccuaaaccacacaacaaccggaaaaaccucacuuccuaaaugcuggcucgucuccaauggcuccuaccucaacgaaacucacuucucugacgacaucgaacaacaagccgacaacaugauuacagaaaugcuccaaaaagaauauauggaacgccaaggaaaaaccccacucggccuaguagacuuauucgucuucuccaccagcuucuaccucaucucaaucuuccuccaccucgucaaaauccccacacaccgccacaucgucggcaaacccugccccaaaccccaccgccugaaccacaugggcaucugcagcugcggccucuacaaacaacccgguguuccaguaaaguggaaacgauagggacuaguuauaagacugacuagcccgaugggccucccaacgggcccuccuccccuccuugcaccgagauuaauaaaaaaaaaaaaaaaaaaaaaaaaaaaaaaaaaaaaaaaaaaaaaaaaaaaaaaaaaaaaaaaaugcaucccccccccccccccccccccccccccccccaaaggcucuuuucagagccaccagaauu

SEQ ID NO: 3567 - protein, 491 aa, Artificial Sequence
  derived and/or modified protein sequence (wt) from LASV(Josiah;Clade IV)__NP_694870__GPCstabilized
MGQIVTFFQEVPHVIEEVMNIVLIALSVLAVLKGLYNFATCGLVGLVTFLLLCGRSCTTSLYKGVYELQTLELNMETLNMTMPLSCTKNNSHHYIMVGNETGLELTLTNTSIINHKFCNLSDAHKKNLYDHALMSIISTFHLSIPNFNQYEAMSCDFNGGKISVQYNLSHSYAGDAANHCGTVANGVLQTFMRMAWGGSYIALDSGCGNWDCIMTSYQYLIIQNTTWEDHCQFSRPSPIGYLGLLSQRTRDIYISRRRRGTFTWTLSDSEGKDTPGGYCLTRWMLIEAELKCFGNTAVAKCNEKHDEEFCDMLRLFDFNKQAIQRLKAPAQMSIQLINKAVNALINDQLIMKNHLRDIMCIPYCNYSKYWYLNHTTTGRTSLPKCWLVSNGSYLNETHFSDDIEQQADNMITEMLQKEYMERQGKTPLGLVDLFVFSTSFYLISIFLHLVKIPTHRHIVGKSCPKPHRLNHMGICSCGLYKQPGVPVKWKR

SEQ ID NO: 3568 - protein, 490 aa, Artificial Sequence
  derived and/or modified protein sequence (wt) from LASV(LP;Clade I)__AAF86701__GPCstabilized
MGQIITFFQEVPHVIEEVMNIVLIALSLLAILKGLYNIATCGIIGLVAFLFLCGKSCSLTLKGGYELQTLELNMETLNMTMPLSCTKNSSHHYIRVGNETGLELTLTNTSIINHKFCNLSDAHKKNLYDHALMSIISTFHLSIPNFNQYEAMSCDFNGGKISVQYNLSHSYAGDAAEHCGTVANGVLQTFMRMAWGGRYIALDSGCGNWDCIMTSYQYLIIQNTTWEDHCQFSRPSPIGYLGLLSQRTRDIYISRRRRGTFTWTLSDSEGNETPGGYCLTRWMLIEAELKCFGNTAVAKCNEKHDEEFCDMLRLFDFNKQAIRRLKAPAQMSIQLINKAVNALINDQLIMKNHLRDIMCIPYCNYSKYWYLNHTSSGRTSLPKCWLISNGSYLNETQFSDDIEQQADNMITEMLQKEYIERQGKTPLGLVDIFIFSTSFYLISIFLHLIKIPTHRHIVGKPCPKPHRLNHMGVCSCGLYKHPGVPTKWKR

SEQ ID NO: 3569 - protein, 490 aa, Artificial Sequence
  derived and/or modified protein sequence (wt) from LASV(803213;Clade II)__AAF86703__GPCstabilized
MGQIITFFQEVPHVIEEVMNIVLIALSLLAILKGIYNVATCGLFGLISFLLLCGRSCSVTYKGVYELQTLELNMANLNMTMPLSCTKNNSHHYIMVGNETGLELTLTNTSIINHKFCNLSDAHKKNLYDHALMSIISTFHLSIPNFNQYEAMSCDFNGGKISVQYNLSHSFAVDAANHCGTIANGVLQTFMRMAWGGSYIALDSGCGNWDCIMTSYQYLIIQNTTWEDHCQFSRPSPIGYLGLLSQRTRDIYISRRRRGTFTWTLSDSEGNEAPGGYCLTRWMLIEAELKCFGNTAVAKCNEKHDEEFCDMLRLFDFNKQAIKRLKTPAQMSIQLINKAVNALINDQLIMKNHLRDIMCIPYCNYSRYWYLNHTVTGKTSLPRCWLVSNGSYLNETHFSDDIEQQADNMITEMLQKEYMDRQGKTPLGLVDLFVFSTSFYLISIFLHLVKIPTHRHIVGKPCPKPHRLNHMGICSCGLYKHPGVPVKWKR

SEQ ID NO: 3570 - protein, 490 aa, Artificial Sequence
  derived and/or modified protein sequence (wt) from LASV(GA391;Clade III)__CAA36645__GPCstabilized
MGQIVTFFQEVPHVIEEVMNIVLIALSILAILKGLYNVATCGLIGLVTFLLLSGRSCSLIYKGTYELQTLELNMETLNMTMPLSCTKNNSHHYIRVGNETGLELTLTNTSILNHKFCNLSDAHKRNLYDHSLMSIISTFHLSIPNFNQYEAMSCDFNGGKITVQYNLSHSFAVDAAGHCGTLANGVLQTFMRMAWGGSYIALDSGCGNWDCIMTSYQYLIIQNTTWDDHCQFSRPSPIGYLGLLSQRTRDIYISRRRRGTFTWTLSDSEGNETPGGYCLTRWMLIEAELKCFGNTAVAKCNEKHDEEFCDMLRLFDFNKQAIRRLKTPAQMSIQLINKAVNALINDQLIMKNHLRDIMCIPYCNYSRYWYLNHTSTGKTSLPRCWLISNGSYLNETKFSDDIEQQADNMITEMLQKEYIDRQGKTPLGLVDLFVFSTSFYLISIFLHLVKIPTHRHIVGKPCPKPHRLNHMGICSCGLYKQPGVPVRWKR

SEQ ID NO: 3571 - protein, 491 aa, Artificial Sequence
  derived and/or modified protein sequence (wt) from LASV(AV;Clade V)__CCA30314__GPCstabilized
MGQIVTFFQEVPHVIEEVMNIVLIALSILAVLKGLYNIATCGLIGLITFLLLCGRSCSSNLYKGVYELQSLDLNMETLNMTMPLSCTKNNSHHYIRVGNDTGLELTLTNTSILNHKFCNLSDAHKKDLYDHALMSIISTFHLSIPNFNQYEAMSCDFNGGKISVQYNLSHSYAIDAANHCGTVANGILQTFMRMAWGGSYIALDSGCGNWDCIMTSYQYLIIQNTTWENHCQFSRPSPIGYLGLLSQRTRDIYISRRRRGTFTWTLSDSEGNATPGGYCLTRWMLIEAELKCFGNTAVAKCNEKHDEEFCDMLRLFDFNKQAISRLKSPAQMSIQLINKAVNALINDQLIMKNHLRDIMCIPYCNYSKYWYLNHTITGKTSLPKCWLVSNGSYLNETHFSDDIEQQADNMITEMLQKEYMERQGKTPLGLVDLFVFSTSFYLISIFLRLVKIPTHRHIVGKPCPKPHRLNHMGICSCGLYKQPGVPVRWKR

SEQ ID NO: 3572 - protein, 490 aa, Artificial Sequence
  derived and/or modified protein sequence (wt) from LASV(Togo/2016/7082;Clade VI)__AMR44577__GPCstabilized
MGQIITFFQEVPHVIEEVMNIVLIALSLLAILKGVYNVATCGIIGLVTFLFLCGRSCSLIYKGSYELQTLELNMETLNMTMPLSCTKNSSHHYIRVGNETGLELTLTNTSIINHKFCNLSDAHKRNLYDHALMSILSTFHLSIPNFNQYEAMSCDFNGGKISVQYNLSHAYAVDAAEHCGTVANGVLQTFMRMAWGGSYIALDSGCGNWDCIMTSYQYLIIQNTTWEDHCQFSRPSPIGYLGLLSQRTRDIYISRRRRGTFTWTLSDSEGNETPGGYCLTRWMLIEAELKCFGNTAVAKCNEKHDEEFCDMLRLFDFNKQAIQRLKSPAQMSIQLINKAVNALINDQLIMKNHLRDMMCIPYCNYSKYWYLNHTSSGRTSLPKCWLVSNGSYLNETHFSDDIEQQADNMITEMLQKEYIDRQGKTPLGLVDLFVFSTSFYLISIFLHLIKIPTHRHIVGKPCPKPHRLNHMGICSCGLYKQPGVPTRWKR

SEQ ID NO: 3573 - protein, 490 aa, Artificial Sequence
  derived and/or modified protein sequence (wt) from LASV(KAK-428;Clade n.d. (VII))__ANH09740__GPCstabilized
MGQIVTFFQEVPHVIEEVMNIVLIALSLLAILKGLYNFATCGVIGLITFLLLCGRSCSATYKGQYELQTLELNMESLNMTMPLSCTKNNSHHYIRAGNNTGLELTLTNTSIISHKFCNLSDAHKKNLYDHTLMSIITTFHLSIPNFNQYEAMSCDFNGGKISIQYNLSHSYAGDAAQHCGTVANGVLQTFMRMAWGGSYLALDSGCRGWDCIISSYQYLIIQNTTWDDHCQFSRPSPIGYLGFVSQKTRDIYISRRRRGTFTWTLSDSEGHDMPGGYCLTRWMLIEADLKCFGNTAVAKCNEKHDEEFCDMWRLFDFNKQAIQRLKAPAQMNIQLINKAVNALINDQLMMKNHLRDIMCIPYCNYSKFWYLNNTTTGRTSLPRCWLISNGSYLNETHFSDDIEQQADNMITEMLQKEYMDRQGKTPLGLVDLFVFSTSFYLITIFLHLVKIPTHRHIVGKPCPKPHRLNHMGICSCGLYKQPGVPVRWKR

SEQ ID NO: 3574 - protein, 490 aa, Artificial Sequence
  derived and/or modified protein sequence (wt) from LASV(Acar 3080;Clade I)__AAT49014__GPCstabilized
MGQIITFFQEVPHVIEEVMNIVLIALSLLAILKGLYNIATCGIIGLVAFLFLCGKSCSLTLKGGYELQTLELNMETLNMTMPLSCTKNSSHHYIRVGNETGLELTLTNTSIINHKFCNLSDAHKKNLYDHALMSIISTFHLSIPNFNQYEAMSCDFNGGKISVQYNLSHSYAGDAAEHCGTVANGVLQTFMRMAWGGRYIALDSGCGNWDCIMTSYQYLIIQNTTWEDHCQFSRPSPIGYLGLLSQRTRDIYISRRRRGTFTWTLSDSEGNETPGGYCLTRWMLIEAELKCFGNTAVAKCNEKHDEEFCDMLRLFDFNKQAIRRLKAPAQMSIQLINKAVNALINDQLIMKNHLRDIMCIPYCNYSKYWYLNHTSSGRTSLPKCWLISNGSYLNETQFSDDIEQQADHMITEMLQKEYIERQGKTPLGLVDIFIFSTSFYLISIFLHLIKIPTHRHIVGKPCPKPHRLNHMGVCSCGLYKHPGVPTKWKR

SEQ ID NO: 3575 - protein, 490 aa, Artificial Sequence; identical to SEQ ID NO: 3568
  derived and/or modified protein sequence (wt) from LASV(Pinneo-NIG-1969;Clade I)__AIT17836__GPCstabilized

SEQ ID NO: 3576 - protein, 490 aa, Artificial Sequence
  derived and/or modified protein sequence (wt) from LASV(ISTH0009-NIG-2011;Clade II)__AIT17404__GPCstabilized
MGQIITFFQEVPHVIEEVMNIVLIALSLLAILKGIYNVATCGLFGLVSFLLLCGRSCSTTYKGVYELQTLELDMASLNMTMPLSCTKNNSHHYIMVGNETGLELTLTNTSIINHKFCNLSDAHKKNLYDHALMSIISTFHLSIPNFNQYEAMSCDFNGGKISVQYNLSHAYAVDAANHCGTIANGVLQTFMRMAWGGSYIALDSGCGSWDCIMTSYQYLIIQNTTWEDHCQFSRPSPIGYLGLLSQRTRDIYISRRRRGTFTWTLSDSEGNETPGGYCLTRWMLIEAELKCFGNTAVAKCNEKHDEEFCDMLRLFDFNKQAIRRLKTPAQMSIQLINKAVNALINDQLIMKNHLRDIMCIPYCNYSKYWYLNHTVTGKTSLPRCWLVSNGSYLNETHFSDDIEQQADNMITELLQKEYMDRQGKTPLGLVDLFVFSTSFYLISIFLHLIKIPTHRHITGKPCPKPHRLNHMGICSCGLYKHPGVPVKWKR

SEQ ID NO: 3577 - protein, 490 aa, Artificial Sequence
  derived and/or modified protein sequence (wt) from LASV(ISTH0012-NIG-2011;Clade II)__AIT17408__GPCstabilized
MGQIITFFQEVPHVIEEVMNIVLIALSLLAILKGIYNVATCGLFGLVSFLLLCGRSCSTTYKGVYELQTLELDMASLNMTMPLSCTKNNSHHYIMVGNETGLELTLTNTSIINHKFCNLSDAHKKNLYDHALMSIISTFHLSIPNFNQYEAMSCDFNGGKISVQYNLSHTYAVDAANHCGTVANGVLQTFMRMAWGGSYIALDSGCGSWDCIMTSYQYLIIQNTTWEDHCQFSRPSPIGYLGLLSQRTRDIYISRRRRGTFTWTLSDSEGNETPGGYCLTRWMLIEAELKCFGNTAVAKCNEKHDEEFCDMLRLFDFNKQAIRRLKTPAQMSIQLINKAVNALINDQLIMKNHLRDIMCIPYCNYSKYWYLNHTVTGKTSLPRCWLVSNGSYLNETHFSDDIEQQADNMITELLQKEYMDRQGKTPLGLVDLFVFSTSFYLISIFLHLVKIPTHRHVIGKPCPKPHRLNHMGICSCGLYKHPGVPVKWKR

SEQ ID NO: 3578 - protein, 490 aa, Artificial Sequence
  derived and/or modified protein sequence (wt) from LASV(ISTH0047-NIG-2011;Clade II)__AIT17412__GPCstabilized
MGQIITFFQEVPHVIEEVMNIVLIALSLLAILKGIYNVATCGLFGLVSFLLLCGRSCSTTYKGVYELQTLELDMASLNMTMPLSCTKNNSHHYIMVGNETGLELTLTNTSIINHKFCNLSDAHKKNLYDHALMSIISTFHLSIPNFNQYEAMSCDFNGGKISVQYNLSHAYAVDAANHCGTIANGVLQTFMRMAWGGSYIALDSGCGSWDCIMTSYQYLIIQNTSWEDHCQFSRPSPIGYLGLLSQRTRDIYISRRRRGTFTWTLSDSEGNETPGGYCLTRWMLIEAELKCFGNTAVAKCNEKHDEEFCDMLRLFDFNKQAIRRLKTPAQMSIQLINKAVNALINDQLIMKNHLRDIMCIPYCNYSKYWYLNHTVTGKTSLPRCWLVSNGSYLNETHFSDDIEQQADNMITELLQKEYIDRQGKTPLGLVDLFVFSTSFYLISIFLHLVKIPTHRHVIGKPCPKPHRLNHMGICSCGLYKHPGVPVKWKR

SEQ ID NO: 3579 - protein, 490 aa, Artificial Sequence
  derived and/or modified protein sequence (wt) from LASV(ISTH0073-NIG-2011;Clade II)__AIT17416__GPCstabilized
MGQIITFFQEVPHVIEEVMNIVLIALSLLAILKGIYNVATCGLFGLVSFLLLCGRSCSTTYKGVYELQTLELDMASLNMTMPLSCTKNNSHHYIMVGNETGLELTLTNTSIINHKFCNLSDAHRKNLYDHALMSIISTFHLSIPNFNQYEAMSCDFNGGKISVQYNLSHAYAVDAANHCGTIANGVLQTFMRMAWGGSYIALDSGCGSWDCIMTSYQYLIIQNTSWEDHCQFSRPSPIGYLGLLSQRTRDIYISRRRRGTFTWTLSDSEGNETPGGYCLTRWMLIEAELKCFGNTAVAKCNEKHDEEFCDMLRLFDFNKQAIRRLKTPAQMSIQLINKAVNALINDQLIMKNHLRDIMCIPYCNYSKYWYLNHTVTGKTSLPRCWLVSNGSYLNETHFSDDIEQQADNMITELLQKEYIDRQGKTPLGLVDLFVFSTSFYLISIFLHLVKIPTHRHVIGKPCPKPHRLNHMGICSCGLYKHPGVPVKWKR

SEQ ID NO: 3580 - protein, 490 aa, Artificial Sequence
  derived and/or modified protein sequence (wt) from LASV(ISTH0230-NIG-2011;Clade II)__AIT17420__GPCstabilized
MGQIITFFQEVPHVIEEVMNIVLIALSLLAILKGIYNVATCGLFGLVSFLLLCGRSCSTTYKGVYELQTLELDMASLNMTMPLSCTKNNSHHYIMVGNETGLELTLTNTSIINHKFCNLSDAHKKNLYDHALMSIISTFHLSIPNFNQYEAMSCDFNGGKISVQYNLSHTYAVDAANHCGTIANGVLQTFMRMAWGGSYIALDSGCGSWDCIMTSYQYLIIQNTTWEDHCQFSRPSPIGYLGLLSQRTRDIYISRRRRGTFTWTLSDSEGNETPGGYCLTRWMLIEAELKCFGNTAVAKCNEKHDEEFCDMLRLFDFNKQAIRRLKTPAQMSIQLINKAVNALINDQLIMKNHLRDIMCIPYCNYSKYWYLNHTVTGKTSLPRCWLVSNGSYLNETHFSDDIEQQADNMITELLQKEYMDRQGKTPLGLVDLFVFSTSFYLISIFLHLIKIPTHRHITGKPCPKPHRLNHMGICSCGLYKHPGVPVKWKR

SEQ ID NO: 3581 - protein, 490 aa, Artificial Sequence
  derived and/or modified protein sequence (wt) from LASV(ISTH0531-NIG-2011;Clade II)__AIT17424__GPCstabilized
MGQIITFFQEVPHVIEEVMNIVLIALSLLAILKGIYNVATCGLFGLVSFLLLCGRSCSTTYKGVYELQTLELDMTNLNMTMPLSCTKNNSHHYIMVGNETGLELTLTNTSIINHKFCNLSDAHKKNLYNHALMSIISTFHLSIPNFNQYEAMSCDFNGGKISVQYNLSHAYAVDAANHCGTIANGVLQTFMRMAWGGSYIALDSGCGSWDCIMTSYQYLIIQNTTWEDHCQFSRPSPIGYLGLLSQRTRDIYISRRRRGTFTWTLSDSEGNETPGGYCLTRWMLIEAELKCFGNTAVAKCNEKHDEEFCDMLRLFDFNKQAIRRLKTPAQTNIQLINKAVNALINDQLIMKNHLRDIMCIPYCNYSKYWYLNHTVTGKTSLPRCWLVSNGSYLNETHFSDDIEQQADNMITELLQKEYMDRQGKTPLGLVDLFVFSTSFYLISIFLHLVKIPTHRHIIGKPCPKPHRLNHMGICSCGLYKHPGVPVKWKR

SEQ ID NO: 3582 - protein, 490 aa, Artificial Sequence
  derived and/or modified protein sequence (wt) from LASV(ISTH0595-NIG-2011;Clade II)__AIT17428__GPCstabilized
MGQIITFFQEVPHVIEEVMNIVLIALSLLAILKGIYNVATCGLFGLVSFLLLCGRSCSTTYKGVYELQTLELDMASLNMTMPLSCTKNNSHHYIMVGNETGLELTLTNTSIINHKFCNLSDAHKKNLYDHALMSIISTFHLSIPNFNQYEAMSCDFNGGKISVQYNLSHTYAVDAANHCGTIANGVLQTFMRMAWGGSYIALDSGCGSWDCIMTSYQYLIIQNTTWEDHCQFSRPSPIGYLGLLSQRTRDIYISRRRRGTFTWTLSDSEGNETPGGYCLTRWMLIAADLKCFGNTAVAKCNEKHDEEFCDMLRLFDFNKQAIERLKTPAQMSIQLINKAVNALINDQLIMKNHLRDIMCIPYCNYSKYWYLNHTVTGRTSLPRCWLVSNGSYLNETHFSDDIEQQADNMITELLQKEYMDRQGKTPLGLVDLFVFSTSFYLISIFLHLVRIPTHRHVIGKPCPKPHRLNHMGICSCGLYKHPGVPVKWKR

SEQ ID NO: 3583 - protein, 490 aa, Artificial Sequence
  derived and/or modified protein sequence (wt) from LASV(ISTH0964-NIG-2011;Clade II)__AIT17430__GPCstabilized
MGQIITFFQEVPHVIEEVMNIVLIALSLLAILKGIYNVATCGLFGLVSFLLLCGRSCSTTYKGVYELQTLELDMASLNMTMPLSCTKNNSHHYIMVGNETGLELTLTNTSIINHKFCNLSDAHKKNLYDHALMSIISTFHLSIPNFNQYEAMSCDFNGGRISVQYNLSHTYAVDAAKHCGTIANGVLQTFMRMAWGGSYIALDSGCGSWDCIMTSYQYLIIQNTTWEDHCQFSRPSPIGYLGLLSQRTRDIYISRRRRGTFTWTLSDSEGNETPGGYCLTRWMLIEAELKCFGNTAVAKCNEKHDEEFCDMLRLFDFNKQAIRRLKTPAQMSIQLINKAVNALINDQLIMKNHLRDIMCIPYCNYSKYWYLNHTVTGKTSLPRCWLVSNGSYLNETHFSDDIEQQADNMITELLQKEYIDRQGKTPLGLVDLFVFSTSFYLISIFLHLVKIPTHRHVIGKPCPKPHRLNHMGICSCGLYKHPGVPVKWKR

SEQ ID NO: 3584 - protein, 490 aa, Artificial Sequence
  derived and/or modified protein sequence (wt) from LASV(ISTH1038-NIG-2011;Clade II)__AIT17438__GPCstabilized
MGQIITFFQEVPHVIEEVMNIVLIALSLLAILKGIYNVATCGLFGLVSFLLLCGRSCSTTYKGVYELQTLELDMANLNMTMPLSCTKNNSHHYIRVGNETGLELTLTNTSIISHKFCNLSDAHKKNLYDHALMSIISTFHLSIPNFNQYEAMSCDFNGGKISVQYNLSHTYAVDAANHCGTIANGVLQTFMRMAWGGSYIALDSGCGSWDCIMTSYQYLIIQNTTWEDHCQFSRPSPIGYLGLLSQRTRDIYISRRRRGTFTWTLSDSEGKETPGGYCLTRWMLIEAELKCFGNTAVAKCNEKHDEEFCDMLRLFDFNKQAIRRLKTPAQMNIQLINKAVNALINDQLIMKNHLRDIMCIPYCNYSKYWYLNHTVTGKTSLPRCWLVSNGSYLNETHFSDDIEQQADNMITELLQKEYIDRQGKTPLGLVDLFVFSTSFYLISIFLHLVKIPTHRHVIGKPCPKPHRLNQMGICSCGLYKQPGVPVKWKR

SEQ ID NO: 3585 - protein, 490 aa, Artificial Sequence
  derived and/or modified protein sequence (wt) from LASV(ISTH1048-NIG-2011;Clade II)__AIT17442__GPCstabilized
MGQIITFFQEVPHVIEEVMNIVLIALSLLAILKGIYNVATCGLFGLVSFLLLCGRSCSTTYKGVYELQTLELDMASLNMTMPLSCTKNNSHHYIMVGNETGLELTLTNTSIINHKFCNLSDAHRKNLYDHALMSIISTFHLSIPNFNQYEAMSCDFNGGKISVQYNLSHAYAVDAANHCGTIANGVLQTFMRMAWGGSYIALDSGCGSWDCIMTSYQYLIIQNTSWEDHCQFSRPSPIGYLGLLSQRTRDIYISRRRRGTFTWTLSDSEGNETPGGYCLTRWMLIEAELKCFGNTAVAKCNEKHDEEFCDMLRLFDFNKQAIRRLKTPAQMSIQLINKAVNALINDQLIMKNHLRDIMCIPYCNYSKYWYLNHTVTGKTSLPRCWLVSNGSYLNETHFSDDIEQQADNMITELLQKEYIDRQGKTPLGLVDLFVFSTSFYLISIFLHLVKIPTHRHVIGKPCPKPHRINHMGICSCGLYKHPGVPVKWKR

SEQ ID NO: 3586 - protein, 490 aa, Artificial Sequence
  derived and/or modified protein sequence (wt) from LASV(ISTH1058-NIG-2011;Clade II)__AIT17446__GPCstabilized
MGQIITFFQEVPHVIEEVMNIVLIALSLLAILKGIYNVATCGLFGLVSFLLLCGRSCSTTYKGVYELQTLELDMASLNMTMPLSCTKNNSHHYIMVGNETGLELTLTNTSIINHKFCNLSDAHKKNLYDHALMSIISTFHLSIPNFNQYEAMSCDFNGGKISVQYNLSHTYAVDAASHCGTVANGVLQTFMRMAWGGSYIALDSGCGSWDCIMTSYQYLIIQNTTWEDHCQFSRPSPIGYLGLLSQRTRDIYISRRRRGTFTWTLSDSEGNETPGGYCLTRWMLIEAELKCFGNTAVAKCNEKHDEEFCDMLRLFDFNKQAIRRLKTPAQMSIQLINKAVNALINDQLIMKNHLRDIMCIPYCNYSKYWYLNHTVTGKTSLPRCWLVSNGSYLNETHFSDDIEQQADNMITELLQKEYMDRQGKTPLGLVDLFVFSTSFYLISIFLHLVKIPTHRHVIGKPCPKPHRLNHMGICSCGLYKHPGVPVKWKR

SEQ ID NO: 3587 - protein, 490 aa, Artificial Sequence
  derived and/or modified protein sequence (wt) from LASV(ISTH1064-NIG-2011;Clade II)__AIT17450__GPCstabilized
MGQIITFFQEVPHVIEEVMNIVLIALSLLAILKGIYNVATCGLFGLVSFLLLCGRSCSTTYKGVYELQTLELDMASLNMTMPLSCTKNNSHHYIMVGNETGLELTLTNTSIINHKFCNLSDAHKKNLYDHALMSIISTFHLSIPNFNQYEAMSCDFNGGKISVQYNLSHTYAVDAANHCGTIANGVLQTFMRMAWGGSYIALDSGCGSWDCIMTSYQYLIIQNTTWEDHCQFSRPSPIGYLGLLSQRTRDIYISRRRRGTFTWTLSDSEGNETPGGYCLTRWMLIEAELKCFGNTAVAKCNEKHDEEFCDMLRLFDFNKQAIRRLKTPAQMSIQLINKAVNALINDQLIMKNHLRDIMCIPYCNYSKYWYLNHTVTGKTSLPRCWLVSNGSYLNETHFSDDIEQQADNMITELLQKEYIDRQGKTPLGLVDLFVFSTSFYLISIFLHLVKIPTHRHIIGKPCPKPHRLNHMGICSCGLYKHPGVPVKWKR

SEQ ID NO: 3588 - protein, 490 aa, Artificial Sequence
  derived and/or modified protein sequence (wt) from LASV(ISTH1069-NIG-2011;Clade II)__AIT17454__GPCstabilized
MGQIITFFQEVPHVIEEVMNIVLIAFSLLAILKGIYNVATCGLFGLVSFLLLCGRSCSTTYKGVYELQTLELDMASLNMTMPLSCTKNNSHHYIMVGNETGLELTLTNTSIINHKFCNLSDAHKRNLYDHALMSIISTFHLSIPNFNQYEAMSCDFNGGKISVQYNLSHTYAVDAAGHCGTIANGVLQTFMRMAWGGSYIALDSGCGSWDCIMTSYQYLIIQNTTWEDHCQFSRPSPIGYLGLLSQRTRDIYISRRRRGTFTWTLSDSEGNETPGGYCLTRWMLIEAELKCFGNTAVAKCNEKHDEEFCDMLRLFDFNKQAIRRLKTPAQMSIQLINKAVNALINDQLIMKNHLRDIMCIPYCNYSKYWYLNHTITGKTSLPRCWLVSNGSYLNETHFSDDIEQQADNMITELLQKEYMDRQGKTPLGLVDLFVFSTSFYLISIFLHLVKIPTHRHIIGKPCPKPHRLNHMGICSCGLYKHPGVPVRWKR

SEQ ID NO: 3589 - protein, 490 aa, Artificial Sequence
  derived and/or modified protein sequence (wt) from LASV(ISTH1096-NIG-2012;Clade II)__AIT17458__GPCstabilized
MGQIITFFQEVPHVIEEVMNIVLIALSLLAILKGIYNVATCGLFGLVSFLLLCGRSCSTTYKGVYELQTLELDMASLNMTMPLSCTKNNSHHYIMVGNETGLELTLTNTSIINHKFCNLSDAHKKNLYDHALMSIISTFHLSIPNFNQYEAMSCDFNGGKISVQYNLSHTYAIDAANHCGTIANGVLQTFMRMAWGGSYIALDSGCGSWDCIMTTYQYLIIQNTTWEDHCQFSRPSPIGYLGLLSQRTRDIYISRRRRGTFTWTLSDSEGNETPGGYCLTRWMLIEAELKCFGNTAVAKCNEKHDEEFCDMLRLFDFNKQAIRRLKTPAQMSIQLINKAVNALINDQLIMKNHLRDIMCIPYCNYSKYWYLNHTVTGKTSLPRCWLVSNGSYLNETHFSDDIEQQADNMITELLQKEYMDRQGKTPLGLVDLFVFSTSFYLISIFLHLVKIPTHRHVIGKPCPKPHRLNHMGICSCGLYKHPGVPVKWKR

SEQ ID NO: 3590 - protein, 490 aa, Artificial Sequence
  derived and/or modified protein sequence (wt) from LASV(ISTH1107-NIG-2012;Clade II)__AIT17462__GPCstabilized
MGQIITFFQEVPHVIEEVMNIVLIALSLLAILKGIYNVATCGLFGLVSFLLLCGRSCSTTYKGVYELQTLELDMASLNMTMPLSCTKNNSHHYIMVGNETGLELTLTNTSIINHKFCNLSDAHKKNLYDHALMSIISTFHLSIPNFNQYEAMSCDFNGGKISVQYNLSHAYAVDAANHCGTIANGVLQTFMRMAWGGSYIALDSGCGSWDCIMTSYQYLIIQNTTWEDHCQFSRPSPIGYLGLLSQRTRDIYISRRRRGTFTWTLSDSEGNETPGGYCLTRWMLIEAELKCFGNTAVAKCNEKHDEEFCDMLRLFDFNKQAIRRLKTPAQMSIQLINKAVNALINDQLIMKNHLRDIMCIPYCNYSKYWYLNHTVTGKTSLPKCWLVSNGSYLNETHFSDDIEQQADNMITELLQKEYIDRQGKTPLGLVDLFVFSTSFYLISIFLHLVKIPTHRHVIGKPCPKPHRLNHMGICSCGLYKHPGVPVKWKR

SEQ ID NO: 3591 - protein, 490 aa, Artificial Sequence
  derived and/or modified protein sequence (wt) from LASV(ISTH1111-NIG-2011;Clade II)__AIT17466__GPCstabilized
MGQIITFFQEVPQVIEEVMNIVLIALSLLAILKGIYNVATCGLFGLVSFLLLCGRSCSTTYKGVYELQTLELDMASLNMTMPLSCTKNNSHHYIMVGNETGLELTLTNQSIINHKFCNLSDAHKKNLYDHALMSIISTFHLSIPNFNQYEAMSCDFNGGKISVQYNLSHTFAVDAANHCGTIANGVLQTFMRMAWGGSYIALDSGCGSWDCIMTSYQYLIIQNTTWEDHCQFSRPSPIGYLGLLSQRTRDIYISRRRRGTFTWTLSDSEGNETPGGYCLTRWMLIEAELKCFGNTAVAKCNEKHDEEFCDMLRLFDFNKQAIRRLKTPAQMSIQLINKAVNALINDQLIMKNHLRDIMCIPYCNYSKYWYLNHTITGKTSLPRCWLVSNGSYLNETHFSDDIEQQADNMITELLQKEYMDRQGKTPLGLVDLFVFSTSFYLISIFLHLVKIPTHRHVIGKPCPKPHRLNHMGICSCGLYKHPGVPVKWKR

SEQ ID NO: 3592 - protein, 490 aa, Artificial Sequence
  derived and/or modified protein sequence (wt) from LASV(ISTH1121-NIG-2012;Clade II)__AIT17470__GPCstabilized
MGQIITFFQEVPHVIEEVMNIVLIALSLLAILKGIYNVATCGLFGLVSFLLLCGRSCSTTYKGVYELQTLELDMASLNMTMPLSCTKNNSHHYIMVGNETGLELTLTNTSIINHKFCNLSDAHRKNLYDHALMSIISTFHLSIPNFNQYEAMSCDFNGGKISVQYNLSHTYAVDAANHCGTIANGVLQTFMRMAWGGSYIALDSGCGSWDCIMTSYQYLIIQNTTWEDHCQFSRPSPIGYLGLLSQRTRDIYISRRRRGTFTWTLSDSEGNETPGGYCLTRWMLIEAELKCFGNTAVAKCNEKHDEEFCDMLRLFDFNKQAIRRLKTPAQMSIQLINKAVNALINDQLIMKNHLRDIMCIPYCNYSKYWYLNHTVTGKTSLPRCWLVSNGSYLNETHFSDDIEQQADNMITELLQKEYIDRQGKTPLGLVDLFVFSTSFYLISIFLHLVKIPTHRHVIGKPCPKPHRLNHMGICSCGLYKHPGVPVKWKR

SEQ ID NO: 3593 - protein, 490 aa, Artificial Sequence
  derived and/or modified protein sequence (wt) from LASV(ISTH1129-NIG-2012;Clade II)__AIT17474__GPCstabilized
MGQIITFFQEVPHVIEEVMNIVLIALSLLAILKGIYNVATCGLFGLVSFLLLCGRSCSTTYKGVYELQTLELDMASLNMTMPLSCTKNNSHHYIMVGNETGLELTLTNTSIINHKFCNLSDAHKKNLYDHALMSIISTFHLSIPNFNQYEAMSCDFNGGKISIQYNLSHTYAVDAANHCGTIANGVLQTFMRMAWGGSYIALDSGCGSWDCIMTSYQYLIIQNTTWEDHCQFSRPSPIGYLGLLSQRTRDIYISRRRRGTFTWTLSDSEGNETPGGYCLTRWMLIEAELKCFGNTAVAKCNEKHDEEFCDMLRLFDFNKQAIRRLKTPAQMSIQLINKAVNALINDQLIMKNHLRDIMCIPYCNYSKYWYLNHTITGKTSLPRCWLVSNGSYLNETHFSDDIEQQADNMITELLQKEYIDRQGKTPLGLVDLFVFSTSFYLISIFLHLVKIPTHRHITGKPCPKPHRLNHMGICSCGLYKHPGVPVRWKR

SEQ ID NO: 3594 - protein, 490 aa, Artificial Sequence
  derived and/or modified protein sequence (wt) from LASV(ISTH1137-NIG-2011;Clade II)__AIT17478__GPCstabilized
MGQIITFFQEVPHVIEEVMNIVLIALSLLAILKGIYNVATCGLFGLVSFLLLCGRSCSTTYKGVYELQTLELDMASLNMTMPLSCTKNNSHHYIMVGNETGLELTLTNTSIINHKFCNLSDAHKKNLYDHALMSIISTFHLSIPNFNQYEAMSCDFNGGKISVQYNLSHTYAVDAADHCGTIANGVLQTFMRMAWGGSYIALDSGCGSWDCIMTSYQYLIIQNTTWEDHCQFSRPSPIGYLGLLSQRTRDIYISRRRRGTFTWTLSDSEGNETPGGYCLTRWMLIEAELKCFGNTAVAKCNEKHDEEFCDMLRLFDFNKQAISRLKTPAQMSIQLINKAVNALINDQLIMKNHLRDIMCIPYCNYSKYWYLNHTVTGKTSLPRCWLVSNGSYLNETHFSDDIEQQADNMITEMLQKEYIDRQGKTPLGLVDLFVFSTSFYLISIFLHLVKIPTHRHVIGKPCPKPHRLNHMGICSCGLYKHPGVPVKWKR

SEQ ID NO: 3595 - protein, 490 aa, Artificial Sequence
  derived and/or modified protein sequence (wt) from LASV(ISTH2010-NIG-2012;Clade II)__AIT17482__GPCstabilized
MGQIITFFQEVPHVIEEVMNIVLIALSLLAILKGIYNVATCGLFGLVSFLLLCGRSCSTTYKGVYELQTLELDMASLNMTMPLSCTKNNSHHYIMVGNETGLELTLTNTSIINHKFCNLSDAHKKNLYDHALMSIISTFHLSIPNFNQYEAMSCDFNGGKISVQYNLSHAYAVDAANHCGTIANGVLQTFMRMAWGGSYIALDSGCGSWDCIMTSYQYLIIQNITWEDHCQFSRPSPIGYLGLLSQRTRDIYISRRRRGTFTWTLSDSEGNETPGGYCLTRWMLIEAELKCFGNTAVAKCNEKHDEEFCDMLRLFDFNKQAIRRLKTPAQMSIQLINKAVNALINDQLIMKNHLRDIMCIPYCNYSKYWYLNHTVTGKTSLPRCWLVSNGSYLNETHFSDDIEQQADNMITELLQKEYIDRQGKTPLGLVDLFVFSTSFYLISIFLHLVKIPTHRHVVGKPCPKPHRLNHMGICSCGLYKHPGVPVKWKR

SEQ ID NO: 3596 - protein, 490 aa, Artificial Sequence
  derived and/or modified protein sequence (wt) from LASV(ISTH2016-NIG-2012;Clade II)__AIT17486__GPCstabilized
MGQIITFFQEVPHVIEEVMNIVLIALSLLAILKGIYNVATCGLFGLVSFLLLCGRSCSTTYKGVYELQTLELDMASLNMTMPLSCTKNNSHHYIMVGNETGLELTLTNTSIINHKFCNLSDAHKKNLYDHALMSIISTFHLSIPNFNQYEAMSCDFNGGKISVQYNLSHTYAVDAANHCGTIANGVLQTFMRMAWGGSYIALDSGCGSWDCIMTSYQYLIIQNTTWEDHCQFSRPSPVGYLGLLSQRTRDIYISRRRRGTFTWTLSDSEGNETPGGYCLTRWMLIEAELKCFGNTAVAKCNEKHDEEFCDMLRLFDFNKQAIRRLKTPAQMSIQLINKAVNALINDQLIMKNHLRDIMCIPYCNYSKYWYLNHTVTGKTSLPRCWLVSNGSYLNETHFSDDIEQQADNMITELLQKEYIDRQGKTPLGLVDLFVFSTSFYLISIFLHLVKIPTHRHVIGKPCPKPHRLNHMGICSCGLYKHPGVPVKWKR

SEQ ID NO: 3597 - protein, 490 aa, Artificial Sequence
  derived and/or modified protein sequence (wt) from LASV(ISTH2020-NIG-2012;Clade II)__AIT17490__GPCstabilized
MGQIITFFQEVPHVIEEVMNIVLITLSLLAILKGIYNVATCGLFGLVSFLLLCGRSCSTTYKGVYELQTLELDMANLNMTMPLSCTKNNSHHYIMVGNETGLELTLTNTSIINHKFCNLSDAHKKNLYDHALMSIISTFHLSIPNFNQYEAMSCDFNGGKISVQYNLSHTFAVDAANHCGTIANGVLQTFMRMAWGGSYIALDSGCGSWDCIMTSYQYLIIQNTTWEDHCQFSRPSPIGYLGLLSQRTRDIYISRRRRGTFTWTLSDSEGNETPGGYCLTRWMLIEAELKCFGNTAVAKCNEKHDEEFCDMLRLFDFNKQAIRRLKTPAQMSIQLINKAVNALINDQLIMKNHLRDIMCIPYCNYSKYWYLNHTVTGKTSLPRCWLVSNGSYLNETHFSDDIEQQADNMITELLQKEYMDRQGKTPLGLVDLFVFSTSFYLISIFLHLVKIPTHRHIIGKPCPKPHRLNHMGICSCGLYKHPGVPVKWKR

SEQ ID NO: 3598 - protein, 490 aa, Artificial Sequence
  derived and/or modified protein sequence (wt) from LASV(ISTH2025-NIG-2012;Clade II)__AIT17494__GPCstabilized
MGQIITFFQEVPHVIEEVMNIVLIALSLLAILKGVYNVATCGLFGLVSFLLLCGRSCSTIYKGVYELQTLELDMASLNMTMPLSCTKNNSHHYIMVGNETGLELTLTNTSIINHKFCNLSDAHKKNLYDHALMSIISTFHLSIPNFNQYEAMSCDFNGGKISVQYNLSHTYAVDAANHCGTIANGVLQTFMRMAWGGSYIALDSGCGSWDCIMTSYQYLIIQNTSWEDHCQFSRPSPIGYLGLLSQRTRDIYISRRRRGTFTWTLSDSEGNETPGGYCLTRWMLIEAELKCFGNTAVAKCNEKHDEEFCDMLRLFDFNKQAIRRLKTPAQMSIQLINKAVNALINDQLIMKNHLRDIMCIPYCNYSKYWYLNHTVTGKTSLPRCWLVSNGSYLNETHFSDDIEQQADNMITELLQKEYIDRQGKTPLGLVDLFVFSTSFYLISIFLHLVKIPTHRHVIGKPCPKPHRLNHMGICSCGLYKHPGVPVKWKR

SEQ ID NO: 3599 - protein, 490 aa, Artificial Sequence
  derived and/or modified protein sequence (wt) from LASV(ISTH2031-NIG-2012;Clade II)__AIT17498__GPCstabilized
MGQIITFFQEVPHVIEEVMNIVLIALSLLAILKGIYNVATCGLFGLVSFLLLCGRSCSTTYKGVYELQTLELDMASLNMTMPLSCTKNNSHHYIMVGNETGLELTLTNTSIINHKFCNLSDAHKKNLYDHALMSIISTFHLSIPNFNQYEAMSCDFNGGKISVQYNLSHTYAVDAANHCGTIANGVLQTFMRMAWGGSYIALDSGCGNWDCIMTSYQYLIIQNTTWEDHCQFSRPSPIGYLGLLSQRTRDIYISRRRRGTFTWTLSDSEGNETPGGYCLTRWMLIETELKCFGNTAVAKCNEKHDEEFCDMLRLFDFNKQAISRLRSPAQMSIQLINKAVNALINDQLIMKNHLRDIMCIPYCNYSKYWYLNHTVTGKTSLPKCWLVSNGSYLNETHFSDDIEQQADNMITEMLQKEYIDRQGKTPLGLVDLFVFSTSFYLISIFLHLVKIPTHRHITGKPCPKPHRLNHMGICSCGLYKHPGVPVKWKR

SEQ ID NO: 3600 - protein, 490 aa, Artificial Sequence
  derived and/or modified protein sequence (wt) from LASV(ISTH2037-NIG-2012;Clade II)__AIT17502__GPCstabilized
MGQIITFFQEIPHVIEEVMNIVLITLSLLAILKGIYNVATCGLFGLVSFLLLCGKSCSTTYKGVYELQTLELDMASLNMTMPLSCTKNNSHHYIMVGNETGLELTLTNTSIINHKFCNLSDAHRKNLYDHTLMSIISTFHLSIPNFNQYEAMSCDFNGGKISVQYNLSHAYAIDAATHCGTIANGVLQTFMRMAWGGSYIALDSGCGGWDCIMTSYQYLIIQNTTWEDHCQFSRPSPIGYLGLLSQRTRDIYISRRRRGTFTWTLSDSEGNETPGGYCLTRWMLIEAELKCFGNTAVAKCNEKHDEEFCDMLRLFDFNKQAIRRLKTPAQMSIQLINKAVNALINDQLIMRNHLRDIMCIPYCNYSKYWYLNHTVTGKTSLPKCWLVSNGSYLNETHFSDDIEQQADNMITELLQKEYMDRQGKTPLGLVDLFVFSTSFYLISIFLHLVKIPTHRHVIGKPCPKPHRLNHMGVCSCGLYKHPGVPVKWKR

SEQ ID NO: 3601 - protein, 490 aa, Artificial Sequence
  derived and/or modified protein sequence (wt) from LASV(ISTH2042-NIG-2012;Clade II)__AIT17506__GPCstabilized
MGQIITFFQEVPHVIEEVMNIVLIALSLLAILKGIYNVATCGLFGLVSFLLLCGRSCSTTYKGVYELQTLELDMASLNMTMPLSCTKNNSHHYIMVGNETGLELTLTNTSIINHKFCNLSDAHKKNLYDHALMSIISTFHLSIPNFNQYEAMSCDFNGGKISVQYNLSHAYAVDAAEHCGTIANGVLQTFMRMAWGGSYIALDSGCGSWDCVMTSYQYLIIQNTTWEDHCQFSRPSPIGYLGLLSQRTRDIYISRRRRGTFTWTLSDSEGNETPGGYCLTRWMLIEAELKCFGNTAVAKCNEKHDEEFCDMLRLFDFNKQAIERLKTPAQMSIQLINKAVNALINDQLIMKNHLRDIMCIPYCNYSKYWYLNHTVTGKTSLPRCWLVSNGSYLNETHFSDDIEQQADNMITEMLQKEYIDRQGKTPLGLVDLFVFSTSFYLISIFLHLVKIPTHRHVIGKPCPKPHRLNHMGICSCGLYKHPGVPVKWKR

SEQ ID NO: 3602 - protein, 490 aa, Artificial Sequence
  derived and/or modified protein sequence (wt) from LASV(ISTH2046-NIG-2012;Clade II)__AIT17510__GPCstabilized
MGQIITFFQEVPHVIEEVMNIVLIALSLLAILKGIYNVATCGLFGLVSFLLLCGRSCSTTYKGVYELQTLELDMASLNMTMPLSCTKNNSHHYIMVGNETGLELTLTNTSIINHKFCNLSDAHKKNLYDHALMSIISTFHLSIPNFNQYEAMSCDFNGGKISVQYNLSHTYAVDAANHCGTIANGVLQTFMRMAWGGSYIALDSGCGSWDCIMTSYQYLIIQNTTWEDHCQFSRPSPIGYLGLLSQRTKDIYISRRRRGTFTWTLSDSEGNETPGGYCLTRWMLIEAELKCFGNTAVAKCNEKHDEEFCDMLRLFDFNKQAIRRLKTPAQMSIQLINKAVNALINDQLIMKNHLRDIMCIPYCNYSKYWYLNHTVTGKTSLPRCWLVSNGSYLNETHFSDDIEQQADNMITELLQKEYIDRQGKTPLGLVDLFVFSTSFYLISIFLHLVKIPTHRHVIGKPCPKPHRLNHMGICSCGLYKHPGVPVKWKR

SEQ ID NO: 3603 - protein, 490 aa, Artificial Sequence
  derived and/or modified protein sequence (wt) from LASV(ISTH2050-NIG-2012;Clade II)__AIT17514__GPCstabilized
MGQIITFFQEVPHVIEEVMNIVLIALSLLAVLKGIYNVATCGLFGLVSFLLLCGRSCSTTYKGVYELQTLELDMASLNMTMPLSCTKNNSHHYIMVGNETGLELTLTNTSIINHKFCNLSDAHKKNLYDHALMSIISTFHLSIPNFNQYEAMSCDFNGGKISVQYNLSHTYAVDAANHCGTIANGVLQTFMRMAWGGSYIALDSGCGSWDCIMTSYQYLIIQNTTWEDHCQFSRPSPIGYLGLLSQRTRDIYISRRRRGTFTWTLSDSEGNETPGGYCLTRWMLIEAELKCFGNTAVAKCNEKHDEEFCDMLRLFDFNKQAIRRLKTPAQMSIQLINKAVNALINDQLIMKNHLRDIMCIPYCNYSKYWYLNHTVTGKTSLPRCWLVSNGSYLNETHFSDDIEQQADNMITELLQKEYIDRQGKTPLGLVDLFVFSTSFYLISIFLHLVKIPTHRHVIGKPCPKPHRLNHMGICSCGLYRHPGVPVKWKR

SEQ ID NO: 3604 - protein, 490 aa, Artificial Sequence
  derived and/or modified protein sequence (wt) from LASV(ISTH2057-NIG-2012;Clade II)__AIT17518__GPCstabilized
MGQIITFFQEVPHVIEEVMNIVLIALSLLAILKGIYNVATCGLFGLVSFLLLCGRSCSTTYKGVYELQTLELDMASLNMTMPLSCTKNNSHHYIMVGNETGLELTLTNTSIINHKFCNLSDAHKKNLYDHALMSIISTFHLSIPNFNQYEAMSCDFNGGKISVQYNLSHAYAVDAANHCGTIANGVLQTFMRMAWGGSYIALDSGCGSWDCIMTSYQYLIIQNTTWEDHCQFSRPSPIGYLGLLSQRTRDIYISRRRRGTFTWTLSDSEGNETPGGYCLTRWMLIEAELKCFGNTAVAKCNEKHDEEFCDMLRLFDFNKQAIRRLKTPAQMSIQLINKAVNALINDQLIMKNHLRDIMCIPYCNYSKYWYLNHTVTGKTSLPRCWLVSNGSYLNETHFSDDIEQQADNMITELLQKEYMDRQGKTPLGLVDLFVFSTSFYLISIFLHLVKIPTHRHVIGKPCPKPHRLNHMGICSCGLYKHPGVPVKWKR

SEQ ID NO: 3605 - protein, 490 aa, Artificial Sequence
  derived and/or modified protein sequence (wt) from LASV(ISTH2064-NIG-2012;Clade II)__AIT17524__GPCstabilized
MGQIITFFQEVPHVIEEVMNIVLIALSLLAILKGIYNVATCGLFGLVSFLLLCGRSCSTTYKGVYELQTLELDMASLNMTMPLSCTKNNSHHYIMVGNETGLELTLTNTSIINHKFCNLSDAHKKNLYDHALMSIISTFHLSIPNFNQYEAMSCDFNGGKISVQYNLSHTYAIDAANHCGTIANGVLQTFMRMAWGGSYIALDSGCGSWDCIMTSYQYLIIQNTTWEDHCQFSRPSPIGYLGLLSQRTRDIYISRRRRGTFTWTLSDSEGNETPGGYCLTRWMLIEAELKCFGNTAVAKCNEKHDEEFCDMLRLFDFNKQAIRRLKTPAQMSIQLINKAVNALINDQLIMKNHLRDIMCIPYCNYSKYWYLNHTVTGKTSLPRCWLVSNGSYLNETHFSDDIEQQADNMITEMLQKEYMDRQGKTPLGLVDLFVFSTSFYLISIFLHLVKIPTHRHVIGKPCPKPHRLNHMGICSCGLYKHPGVPVKWKR

SEQ ID NO: 3606 - protein, 490 aa, Artificial Sequence
  derived and/or modified protein sequence (wt) from LASV(ISTH2065-NIG-2012;Clade II)__AIT17528__GPCstabilized
MGQIITFFQEVPHVIEEVMNIVLIALSLLAMLKGIYNIATCGLFGLISFLLLCGRSCSTTYKGVYELQALELDMANLNMTMPLSCTKNNSHHYIMVGNETGLELTLTNTSIINHKFCNLSDAHKKNLYDHALMSIISTFHLSIPNFNQYEAMSCDFNGGKISVQYNLSHTYAGDAAKHCGTIANGVLQTFMRMAWGGSYIALDSGCGNWDCIMTSYQYLIIQNTTWEDHCQFSRPSPIGYLGLLSQRTRDIYISRRRRGTFTWTLSDSEGNETPGGYCLTRWMLIEAELKCFGNTAVAKCNEKHDEEFCDMLRLFDFNKQAIRRLKTPAQMSIQLINKAVNALINDQLIMKNHLRDIMCIPYCNYSKYWYLNHSVTGRTSLPRCWLVSNGSYLNETQFSDDIEQQADNMITEMLQKEYIDRQGKTPLGLVDLFVFSTSFYLISIFLHLIKIPTHRHIVGKPCPKPHRLNHMGICSCGLYKHPGIPVKWKR

SEQ ID NO: 3607 - protein, 490 aa, Artificial Sequence
  derived and/or modified protein sequence (wt) from LASV(ISTH2094-NIG-2012;Clade II)__AIT17538__GPCstabilized
MGQIITFFQEVPHVIEEVMNIVLIALSLLAILKGIYNIATCGLFGLISFLLLCGRSCSTTYKGVYELQTLELDMANLNMTMPLSCTKNNSHHYIMVGNETGLELTLTNTSIINHKFCNLSDAHKKNLYDHALMSIISTFHLSIPNFNQYEAMSCDFNEGKISVQYNLSHSYAIDAAGHCGTIANGVLQTFMRMAWGGSYIALDSGCGNWDCIMTSYQYLIIQNTTWEDHCQFSRPSPIGYLGLLSQRTRDIYISRRRRGTFTWTLSDSEGNEAPGGYCLTRWMLIEAELKCFGNTAIAKCNEKHDEEFCDMLRLFDFNKQAIKRLKAPAQMSIHLINKAVNALINDQLIMKNHLRDIMCIPYCNYSKYWYLNHTVTGKTSLPKCWLVSNGSYLNETHFSDDIEQQADNMITELLQKEYMDRQGKTPLGLVDLFVFSTSFYLISIFLHLVKIPTHRHIVGRPCPKPHRLNHMGICSCGLYKHPGVPVKWKR

SEQ ID NO: 3608 - protein, 490 aa, Artificial Sequence
  derived and/or modified protein sequence (wt) from LASV(ISTH2129-NIG-2012;Clade II)__AIT17544__GPCstabilized
MGQIITFFQEVPHVIEEVMNIVLIALSLLAILKGIYNVATCGLFGLVSFLLLCGRSCSTTYKGVYELQTLELDMGSLNMTMPLSCTKNNSHHYIMVGNETGLELTLTNTSIINHKFCNLSDAHKKNLYDHALMSIISTFHLSIPNFNQYEAMSCDFNGGKISVQYNLSHSYAVDAANHCGTIANGVLQTFMRMAWGGSYIALDSGCGSWDCIMTSYQYLIIQNTTWEDHCQFSRPSPIGYLGLLSQRTRDIYISRRRRGTFTWTLSDSEGNETPGGYCLTRWMLIEAELKCFGNTAVAKCNEKHDEEFCDMLRLFDFNKQAIRRLKTPAQMSIQLINKAVNALINDQLIMKNHLRDIMCIPYCNYSKYWYLNHTVTGKTSLPRCWLVSNGSYLNETHFSDDIEQQADNMITELLQKEYMDRQGKTPLGLVDLFVFSTSFYLISIFLHLVKIPTHRHIIGKPCPKPHRLNHMGICSCGLYKHPGVPVKWKR

SEQ ID NO: 3609 - protein, 490 aa, Artificial Sequence
  derived and/or modified protein sequence (wt) from LASV(ISTH2217-NIG-2012;Clade II)__AIT17548__GPCstabilized
MGQIITFFQEVPHVIEEVMNIVLIALSLLAILKGIYNVATCGLFGLVSFLFLCGRSCSTTYKGVYELQTLELDMASLNMTMPLSCTKNNSHHYIMVGNETGLELTLTNTSIINHKFCNLSDAHKRNLYDHALMSIISTFHLSIPNFNQYEAMSCDFNGGKISVQYNLSHAYAGDAAKHCGTIANGVLQTFMRMAWGGSYIALDSGCGSWDCIMTSYQYLIIQNTTWEDHCQFSRPSPIGYLGLLSQRTRDIYISRRRRGTFTWTLSDSEGNETPGGYCLTRWMLIEAELKCFGNTAVAKCNEKHDEEFCDMLRLFDFNKQAIRRLRTPAQMSIQLINKAVNALINDQLIMKNHLRDIMCIPYCNYSKYWYLNHTVTGKTSLPKCWLVSNGSYLNETHFSDDIEQQADNMITEMLQKEYIDRQGKTPLGLVDLFVFSTSFYLISIFLHLVKIPTHRHVIGKPCPKPHRLNHMGICSCGLYKHPGVPVKWKR

SEQ ID NO: 3610 - protein, 490 aa, Artificial Sequence
  derived and/or modified protein sequence (wt) from LASV(ISTH2271-NIG-2012;Clade II)__AIT17552__GPCstabilized
MGQIITFFQEVPHVIEEVMNIVLIALSLLAILKGIYNVATCGLFGLVSFLLLCGRSCSTTYKGVYELQTLELDMASLNMTMPLSCTKNNSHHYIMVGNETGLELTLTNTSIINHKFCNLSDAHKKNLYDHALMSIISTFHLSIPNFNQYEAMSCDFNGGKISVQYNLSHAYAVNAANHCGTIANGVLQTFMRMAWGGSYIALDSGCGSWDCIMTSYQYLIIQNTTWEDHCQFSRPSPIGYLGLLSQRTRDIYISRRRRGTFTWTLSDSEGNETPGGYCLTRWMLIEAELKCFGNTAVAKCNEKHDEEFCDMLRLFDFNKQAIRRLKTPAQMSIQLINKAVNALINDQLIMKNHLRDIMCIPYCNYSKYWYLNHTVTGKTSLPRCWLVSNGSYLNETHFSDDIEQQADNMITELLQKEYMDRQGKTPLGLVDLFVFSTSFYLISIFLHLVKIPTHRHVIGKPCPKPHRLNHMGICSCGLYKHPGVPVKWKK

SEQ ID NO: 3611 - protein, 490 aa, Artificial Sequence
  derived and/or modified protein sequence (wt) from LASV(ISTH2304-NIG-2012;Clade II)__AIT17556__GPCstabilized
MGQIITFFQEVPHVIEEVMNIVLIALSLLAILKGIYNVATCGLFGLVSFLLLCGRSCSTTYKGVYELQTLELDMASLNMTMPLSCTKNNSHHYIMVGNETGLELTLTNTSIINHKFCNLSDAHKKNLYDHALMSIISTFHLSIPNFNQYEAMSCDFNGGKISVQYNLSHTYAVDAANHCGTIANGVLQTFMRMAWGGSYIALDSGCGSWDCIMTSYQYLIIQNTTWEDHCQFSRPSPIGYLGLLSQRTRDIYISRRRRGTFTWTLSDSEGNETPGGYCLTRWMLIEAELKCFGNTAVAKCNEKHDEEFCDMLRLFDFNKQAIRRLKTPAQMSIQLINKAVNALINDQLIMKNHLRDIMCIPYCNYSKYWYLNHTITGKTSLPRCWLVSNGSYLNETHFSDDIEQQADNMITELLQKEYIDRQGKTPLGLVDLFVFSTSFYLISIFLHLVKIPTHRHITGKPCPKPHRLNHMGICSCGLYKHPGVPVRWKR

SEQ ID NO: 3612 - protein, 490 aa, Artificial Sequence
  derived and/or modified protein sequence (wt) from LASV(ISTH2312-NIG-2012;Clade II)__AIT17560__GPCstabilized
MGQIITFFQEVPHVIEEVMNIVLIALSLLAVLKGIYNVATCGLFGLVSFLLLCGRSCSTTYKGVYELQTLELDMASLNMTMPLSCTTNNSHHYIMVGNETGLELTLTNTSIINHKFCNLSDAHKKNLYDHALMSIISTFHLSIPNFNQYEAMSCDFNGGKISVQYNLSHAYAGEAANHCGTIANGVLQTFMRMAWGGSYIALDSGCGSWDCIMTSYKYLIIQNTTWGDHCQFSRPSPIGYLGLLSQRTRDIYISRRRRGTFTWTLSDSEGNETPGGYCLTRWMLIEAELKCFGNTAVAKCNEKHDEEFCDMLRLFDFNKQAIRKLKTPAQMSIQLINKAVNALINDQLIMKNHLRDIMCIPYCNYSRYWYLNHTVTGRTSLPRCWLVSNGSYLNETHFSDDIEQQADNMITELLQKEYIDRQGKTPLGLVDLFVFSTSFYLISIFLHLVKIPTHRHIIGKPCPKPHRLNHMGICSCGLYKHPGVPVKWKR

SEQ ID NO: 3613 - protein, 490 aa, Artificial Sequence
  derived and/or modified protein sequence (wt) from LASV(ISTH2316-NIG-2012;Clade II)__AIT17564__GPCstabilized
MGQIITFFQEVPHVIEEVMNIVLIALSLLAILKGIYNVATCGLFGLLSFLLLCGRSCSTTYKGVYELQTLELDMASLNMTMPLSCTKNNSHHYIMVGNETGLELTLTNTSIINHKFCNLSDAHKKDLYDHALMSIISTFHLSIPNFNQYEAMSCDFNGGKISVQYNLSHAYAVDAAKHCGTIANGVLQTFMRMAWGGSYIALDSGCGSWDCIMTSYQYLIIQNTSWEDHCQFSRPSPIGYLGLLSQRTRDIYISRRRRGTFTWTLSDSEGNETPGGYCLTRWMLIEAELKCFGNTAVAKCNEKHDEEFCDMLRLFDFNKQAIKRLKTPAQMSIQLINKAVNALINDQLIMKNHLRDIMCIPYCNYSKYWYLNHTVTGKTSLPRCWLVSNGSYLNETHFSDDIEQQADNMITELLQKEYIDRQGKTPLGLVDLFVFSTSFYLISIFLHLVKIPTHRHVIGKPCPKPHRLNHMGICSCGLYKHPGVPVKWKR

SEQ ID NO: 3614 - protein, 490 aa, Artificial Sequence
  derived and/or modified protein sequence (wt) from LASV(ISTH2358-NIG-2012;Clade II)__AIT17572__GPCstabilized
MGQIITFFQEVPHVIEEVMNIVLIALSLLAILKGIYNVATCGLFGLVSFLLLCGRSCSTTYKGVYELQTLELDMANLNMTMPLSCTKNNSHHYIMVGNETGLELTLTNTSIINHKFCNLSDAHKKNLYDHALMSIISTFHLSIPNFNQYEAMSCDFNGGKISVQYNLSHNYAVDAANHCGTIANGVLQTFMRMAWGGSYIALDSGCGNWDCIMTSYQYLIIQNTTWEDHCQFSRPSPIGYLGLLSQRTRDIYISRRRRGTFTWTLSDSEGNDMPGGYCLTRWMLIEAELKCFGNTAVAKCNEKHDEEFCDMLRLFDFNKQAIRRLKTPAQMNIQLINKAVNALINDQLIMKNHLRDIMCIPYCNYSKYWYLNHTVTGKTSLPRCWLVSNGSYLNETHFSDDIEQQADNMITELLQKEYMDRQGKTPLGLVDLFVFSTSFYLISIFLHLVKIPTHRHIIGKPCPKPHRLNHMGICSCGLYKHPGVPVKWKR

SEQ ID NO: 3615 - protein, 490 aa, Artificial Sequence
  derived and/or modified protein sequence (wt) from LASV(ISTH2376-NIG-2012;Clade II)__AIT17576__GPCstabilized
MGQIITFFQEVPHVIEEVMNIVLIALSLLAILKGIYNVATCGLFGLVSFLLLCGRSCSTTYKGVYELQTLELDMASLNMTMPLSCTKNNSHHYIMVGNETGLELTLTNTSIINHKFCNLSDAHKKNLYDHALMSIISTFHLSIPNFNQYEAMSCDFNGGKISVQYNLSHTYAVDAANHCGTIANGVLQTFMRMAWGGSYIALDSGCGNWDCIMTSYQYLIIQNTTWEDHCQFSRPSPIGYLGLLSQRTRDIYISRRRRGTFTWTLSDSEGNETPGGYCLTRWMLIEAELKCFGNTAVAKCNEKHDEEFCDMLRLFDFNKQAISRLKTPAQMSIQLINKAVNALINDQLIMKNHLRDIMCIPYCNYSKYWYLNHTVTGKTSLPRCWLVSNGSYLNETHFSDDIEQQADNMITEMLQKEYIDRQGKTPLGLVDLFVFSTSFYLISIFLHLVKIPTHRHITGKPCPKPHRLNHMGICSCGLYKHPGVPVKWKR

SEQ ID NO: 3616 - protein, 490 aa, Artificial Sequence
  derived and/or modified protein sequence (wt) from LASV(Lassa virus/H.sapiens-wt/NGA/2015/ISTH_0543;Clade II)__AVO03639__GPCstabilized
MGQIITFFQEVPHVIEEVMNIVLIALSLLAILKGIYNVATCGLFGLVSFLLLCGRSCSTTYKGVYELQTLELDMANLNMTMPLSCTKNNSHHYIMVGNETGLELTLTNTSIINHKFCNLSDAHKKNLYDHALMSIISTFHLSIPNFNQYEAMSCDFNGGKISVQYNLSHTYAVDAANHCGTIANGVLQTFMRMAWGGSYIALDSGCGSWDCIMTSYQYLVIQNTTWEDHCQFSRPSPIGYLGLLSQRTRDIYISRRRRGTFTWTLSDSEGNETPGGYCLTRWMLIEAELKCFGNTAVAKCNEKHDEEFCDMLRLFDFNKQAIRRLKTPAQMSIQLINKAVNALINDQLIMKNHLRDIMCIPYCNYSKYWYLNHTVTGKTSLPRCWLVSNGSYLNETHFSDDIEQQADNMITELLQKEYIDRQGKTPLGLVDLFVFSTSFYLISIFLHLVKIPTHRHITGKPCPKPHRLNHMGICSCGLYKHPGVPVKWKR

SEQ ID NO: 3617 - protein, 490 aa, Artificial Sequence
  derived and/or modified protein sequence (wt) from LASV(Lassa virus/H.sapiens-wt/NGA/2015/ISTH_0547;Clade II)__AVO03583__GPCstabilized
MGQIITFFQEVPHVIEEVMNIVLIALSLLAILKGIYNVATCGLFGLVSFLLLCGRSCSTTYKGVYELQTLELDMASLNMTMPLSCTKNNSHHYIMVGNETGLELTLTNTSIINHKFCNLSDAHKKNLYDHALMSIISTFHLSIPNFNQYEAMSCDFNGGKISVQYNLSHTYAVDAANHCGTIANGVLQTFMRMAWGGSYIALDSGCGSWDCIMTSYQYLIIQNTTWEDHCQFSRPSPIGYLGLLSQRTRDIYISRRRRGTFTWTLSDSEGNETPGGYCLTRWMLIEAELKCFGNTAVAKCNEKHDEEFCDMLRLFDFNKQAIRRLKTPAQMSIQLINKAVNALINDQLIMKNHLRDIMCIPYCNYSKYWYLNHTVTGKTSLPRCWLVSNGSYLNETHFSDDIEQQADNMITELLQKEYIERQGKTPLGLVDLFVFSTSFYLISIFLHLVKIPTHRHITGKPCPKPHRLNHMGICSCGLYKHPGVPVKWKR

SEQ ID NO: 3618 - protein, 490 aa, Artificial Sequence
  derived and/or modified protein sequence (wt) from LASV(Lassa virus/H.sapiens-wt/NGA/2015/ISTH_0574;Clade II)__AVO03657__GPCstabilized
MGQIITFFQEVPHVIEEVMNIVLIALSLLAILKGIYNVATCGLFGLVAFLLLCGRSCSTTYKGVYELQTLELDMASLNMTMPLSCTKNNSHHYIMVGNETGLELTLTNTSIINHKFCNLSDAHKKNLYDHALMSIISTFHLSIPNFNQYEAMSCDFNGGKISVQYNLSHTYAVDAANHCGTITNGVLQTFMRMAWGGSYIALDSGCGSWDCIMTSYQYLIIQNTTWEDHCQFSRPSPIGYLGLLSQRTRDIYISRRRRGTFTWTLSDSEGNETPGGYCLTRWMLIEAELKCFGNTAVAKCNEKHDEEFCDMLRLFDFNKQAIRRLKTPAQMSIQLINKAVNALINDQLIMKNHLRDIMCIPYCNYSKYWYLNHTVTGRTSLPRCWLVSNGSYLNETHFSDDIEQQADNMITELLQKEYMDRQGKTPLGLVDLFVFSTSFYLISIFLHLIKIPTHRHVIGKPCPKPHRLNHMGICSCGLYKHPGVPVKWKR

SEQ ID NO: 3619 - protein, 490 aa, Artificial Sequence
  derived and/or modified protein sequence (wt) from LASV(Lassa virus/H.sapiens-wt/NGA/2015/ISTH_0681;Clade II)__AVO03617__GPCstabilized
MGQIITFFQEVPHVIEEVMNIVLIALSLLAILKGIYNVATCGLFGLVSFLLLCGRSCSTTYKGVYELQTLELDMASLNMTMPLSCTKNNSHHYIMVGNETGLELTLTNTSIINHKFCNLSDAHKKNLYDHALMSIISTFHLSIPNFNQYEAMSCDFNGGKISVQYNLSHTYAEGAANHCGTIANGVLQTFMRMAWGGSYIALDSGCGSWDCIMTSYQYLIIQNTTWEDHCQFSRPSPIGYLGLLSQRTRDIYISRRRRGTFTWTLSDSEGNETPGGYCLTRWMLIEAELKCFGNTAVAKCNEKHDEEFCDMLRLFDFNKQAIMRLKTPAQMSIQLINKAVNALINDQLIMKNHLRDIMCIPYCNYSKYWYLNHTVTGKTSLPRCWLVSNGSYLNETHFSDDIEQQADNMITEMLQKEYMDRQGKTPLGLVDLFVFSTSFYLISIFLHLVKIPTHRHVIGKPCPKPHRLNHMGICSCGLYKHPGVPVKWKR

SEQ ID NO: 3620 - protein, 490 aa, Artificial Sequence
  derived and/or modified protein sequence (wt) from LASV(Lassa virus/H.sapiens-wt/NGA/2015/ISTH_0682;Clade II)__AVO03625__GPCstabilized
MGQIITFFQEVPHVIEEVMNIVLIALSLLAILKGIYNVATCGLFGLVSFLLLCGRSCSTTYKGVYELQTLELDMASLNMTMPLSCTKNNSHHYIMVGNETGLELTLTNTSIINHKFCNLSDAHKKNLYDHALMSIISTFHLSIPNFNQYEAMSCDFNGGKISVQYNLSHAYAVDAANHCGTIANGVLQTFMRMAWGGSYIALDSGCGSWDCIMTSYHYLIIQNTTWEDHCQFSRPSPIGYLGLLSQRTRDIYISRRRRGTFTWTLSDSEGNETPGGYCLTRWMLIEAELKCFGNTAVAKCNEKHDEEFCDMLRLFDFNKQAIRRLKTPAQMSIQLINKAVNALINDQLIMKNHLRDIMCIPYCNYSKYWYLNHTVTGKTSLPRCWLVSNGSYLNETHFSDDIEQQADNMITELLQKEYIDRQGKTPLGLVDLFVFSTSFYLISIFLHLVKIPTHRHVIGKPCPKPHRLNHMGICSCGLYKHPGVPVKWKR

SEQ ID NO: 3621 - protein, 490 aa, Artificial Sequence
  derived and/or modified protein sequence (wt) from LASV(Lassa virus/H.sapiens-wt/NGA/2015/ISTH_0687;Clade II)__AVO03581__GPCstabilized
MGQIITFFQEVPHVIEEVMNIVLIALSLLAILKGIYNVATCGLFGLVSFLLLCGRSCSTTYKGVYELQTLELDMTNLNMTMPLSCTKNNSHHYIMVGNETGLELTLTNTSIINHKFCNLSDAHKKNLYNHALMSIISTFHLSIPNFNQYEAMSCDFNGGKISVQYNLSHTYAVDAANHCGTVANGVLQTFMRMAWGGSYIALDSGCGGWDCIMTSYQYLIIQNTTWEDHCQFSRPSPIGYLGLLSQRTRDIYISRRRRGTFTWTLSDSEGNETPGGYCLTRWMLIEAELKCFGNTAVAKCNEKHDEEFCDMLRLFDFNKQAIRKLKAPAQMSIQLINKAVNALINDQLIMKNHLRDIMCIPYCNYSKYWYLNHTVTGKTSLPKCWLVSNGSYLNETHFSDDIEQQADNMITELLQKEYMDRQGKTPLGLVDLFVFSTSFYLISIFLHLVKIPTHRHIIGKPCPKPHRLNHMGICSCGLYKHPGVPVKWKR

SEQ ID NO: 3622 - protein, 490 aa, Artificial Sequence
  derived and/or modified protein sequence (wt) from LASV(Lassa virus/H.sapiens-wt/NGA/2015/ISTH_0736;Clade II)__AVO03573__GPCstabilized
MGQIITFFQEVPHVIEEVMNIVLIALSLLAVLKGIYNVATCGLFGLVSFLLLCGRSCSTTYKGVYELQTLELDMASLNMTMPLSCTKNNSHHYIMVGNETGLELTLTNTSIINHKFCNLSDAHKKNLYDHALMSIISTFHLSIPNFNQYEAMSCDFNGGKISVQYNLSHTHAVDAANHCGTIANGVLQTFMRMAWGGSYIALDSGCGSWDCIMTSYQYLIIQNTTWEDHCQFSRPSPIGYLGLLSQRTRDIYISRRRRGTFTWTLSDSEGNETPGGYCLTRWMLIEAELKCFGNTAVAKCNEKHDEEFCDMLRLFDFNKQAIRRLKTPAQMSIQLINKAVNALINDQLIMKNHLRDIMCIPYCNYSRYWYLNHTVTGKTSLPRCWLVSNGSYLNETHFSDDIEQQADNMITELLQKEYIDRQGRTPLGLVDLFVFSTSFYLISIFLHLVKIPTHRHVIGKPCPKPHRLNHMGICSCGLYKHPGVPVKWKR

SEQ ID NO: 3623 - protein, 490 aa, Artificial Sequence
  derived and/or modified protein sequence (wt) from LASV(Lassa virus/H.sapiens-wt/NGA/2015/ISTH_0789;Clade II)__AVO03551__GPCstabilized
MGQIVTFFQEVPHVIEEIMNIVLITLSLLAILKGVYNLATCGLIGLITFLFLCGRSCSTIYKGSYQFQTLELNMETLNMTMPLSCTKNSSHHYIRVSNETGLELTLTNTSIINHKFCNLSDAHKKNLYDHTLMSIISTFHLSIPNFNQYEAMSCDFNGGKISVQYNLSHSYAVDAANHCGTVANGVLQTFMRMAWGGSYIALDSGCGNWDCIMTSYQYLIIQNTTWEDHCQFSRPSPIGYLGLLSQRTRDIYISRRRRGTFTWTLSDSEGKETPGGYCLTRWMLIEAELKCFGNTAVAKCNEKHDEEFCDMLRLFDFNKQAIQRLKAPAQMSIQLINKAVNALINDQLIMKNHLRDIMCIPYCNYSKYWYLNHTSTGRTSLPKCWLVSNGSYLNETHFSDDIEQQADNMITEMLQKEYIDRQGKTPLGLVDLFVFSTSFYLISIFLHLVKIPTHRHIVGKSCPKPHRLNHMGICSCGLYKRPGVPVKWKR

SEQ ID NO: 3624 - protein, 490 aa, Artificial Sequence
  derived and/or modified protein sequence (wt) from LASV(Lassa virus/H.sapiens-wt/NGA/2015/ISTH_0821;Clade II)__AVO03641__GPCstabilized
MGQIITFFQEVPHVIEEVMNIVLIALSLLAILKGIYNVATCGLFGLVSFLLLCGRSCSTTYKGVYELQTLELDMASLNMTMPLSCTKNNSHHYIMVGNETGLELTLTNTSIINHKFCNLSDAHKKNLYDHTLMSIISTFHLSIPNFNQYEAMSCDFNGGKISVQYNLSHTYAVDAANHCGTIANGVLQTFMRMAWGGSYIALDSGCGNWDCIMTSYQYLIIQNTTWEDHCQFSRPSPIGYLGLLSQRTRDIYISRRRRGTFTWTLSDSEGNETPGGYCLTRWMLIEAELKCFGNTAVAKCNEKHDEEFCDMLRLFDFNKQAISRLKTPAQMSIQLINKAVNALINDQLIMKNHLRDIMCIPYCNYSKYWYLNHTVTGKTSLPRCWLVSNGSYLNETHFSDDIEQQADNMITEMLQKEYIDRQGKTPLGLVDLFVFSTSFYLISIFLHLVKIPTHRHVIGKPCPKPHRLNHMGICSCGLYKHPGVPVKWKR

SEQ ID NO: 3625 - protein, 490 aa, Artificial Sequence
  derived and/or modified protein sequence (wt) from LASV(Lassa virus/H.sapiens-wt/NGA/2015/ISTH_0831;Clade II)__AVO03545__GPCstabilized
MGQIVTFFQEVPHVIEEIMNIVLITLSLLAILKGVYNLATCGLIGLITFLFLCGRSCSMTYKGSYQLETLELNMETLNMTMPLSCTKNTSHHYIRVGNETGLELTLTNTSIINHKFCNLSDAHKKNLYDHSLMSIVSTFHLSIPNFNQYEAMSCDFNGGKISIQYNLSHAYAGDAAKHCGTLANGVLQTFMRMAWGGSYIALDSGCGNWDCIMTSYQYLIIQNTTWDDHCQFSRPSPIGYLGLLSQRTREIYISRRRRGTFTWTLSDSEGNEAPGGYCLTRWMLIEAELKCFGNTAVAKCNEKHDEEFCDMLRLFDFNKQAIQRLKTPAQMSIQLINKAVNALINDQLIMKNHLRDIMCIPYCNYSKYWYLNHTTTGRTSLPRCWLVSNGSYLNETHFSDDIEQQADNMITEMLQKEYIDRQGKTPLGLVDLFVFSTSFYLISIFLHLVKIPTHRHIVGKSCPKPHRLNHMGICSCGLYKQPGVPVRWKR

SEQ ID NO: 3626 - protein, 490 aa, Artificial Sequence
  derived and/or modified protein sequence (wt) from LASV(Lassa virus/H.sapiens-wt/NGA/2016/ISTH_0009;Clade II)__AVO03571__GPCstabilized
MGQIITFFQEVPHVIEEVMNIVLIALSLLAILKGIYNVATCGLLGLVSFLLLCGRSCSTTYKGVYELQTLELDMASLNMTMPLSCTKNNSHHYIMVGNETGLELTLTNTSIINHKFCNLSDAHKKNLYDHALMSIISTFHLSIPNFNQYEAMSCDFNGGRISVQYNLSHSYAVDAANHCGTIANGVLQTFMRMAWGGSYIALDSGCGSWDCIMTSYQYLIIQNTTWEDHCQFSRPSPIGYLGLLSQRTRDIYISRRRRGTFTWTLSDSEGNETPGGYCLTRWMLIEAELKCFGNTAVAKCNEKHDEEFCDMLRLFDFNKQAIRRLKTPAQMSIQLINKAVNALINDQLIMKNHLRDIMCIPYCNYSKYWYLNHTVTGKTSLPRCWLVSNGSYLNETHFSDDIEQQADNMITELLQKEYIDRQGKTPLGLVDLFVFSTSFYLISIFLHLVKIPTHRHITGKPCPKPHRLNHMGICSCGLYNHPGVPVKWKR

SEQ ID NO: 3627 - protein, 490 aa, Artificial Sequence
  derived and/or modified protein sequence (wt) from LASV(Lassa virus/H.sapiens-wt/NGA/2016/ISTH_0017;Clade II)__AVO03567__GPCstabilized
MGQIITFFQEVPHVIEEVMNIVLIALSLLAILKGIYNVATCGLFGLVSFLLLCGRSCSTTYKGVYELQTLELDMASLNMTMPLSCTKNNSHHYIMVGNETGLELTLTNTSIINHKFCNLSDAHKKNLYDHALMSIISTFHLSIPNFNQYEAMSCDFNGGKISVQYNLSHTYAIDAANHCGTIANGVLQTFMRMAWGGSYIALDSGCGSWDCIMTSYQYLIIQNTTWEDHCQFSRPSPIGYLGLLSQRTRDIYISRRRRGTFTWTLSDSEGNETPGGYCLTRWMLIEAELKCFGNTAVAKCNEKHDEEFCDMLRLFDFNKQAIRRLKTPAQMSIQLINKAVNALINDQLIMKNHLRDIMCIPYCNYSKYWYLNHTVTGKTSLPRCWLVSNGSYLNETHFSDDIEQQADNMITELLQKEYMDRQGKTPLGLVDLFVFSTSFYLISIFLHLVRIPTHRHVIGKPCPKPHRLNHMGICSCGLYKHPGVPVKWKR

SEQ ID NO: 3628 - protein, 490 aa, Artificial Sequence
  derived and/or modified protein sequence (wt) from LASV(Lassa virus/H.sapiens-wt/NGA/2016/ISTH_0035;Clade II)__AVO03619__GPCstabilized
MGQIITFFQEVPHVIEEVMNIVLIALSLLAILKGIYNVATCGLFGLVSFLLLCGRSCSMTYKGVYELQTLELDMASLNMTMPLSCTKNNSHHYIMVGNETGLELTLTNTSIINHKFCNLSDAHKKNLYDHALMSIISTFHLSIPNFNQYEAMSCDFNGGKISVQYNLSHTYAVDAANHCGTIANGVLQTFMRMAWGGSYIALDSGCGSWDCIMTSYQYLIIQNTTWEDHCQFSRPSPIGYLGLLSQRTRDIYISRRRRGTFTWTLSDSEGNETPGGYCLTRWMLIEAELKCFGNTAVAKCNEKHDEEFCDMLRLFDFNKQAIRRLKTPAQMSIQLINKAVNALINDQLIMKNHLRDIMCIPYCNYSKYWYLNHTITGKTSLPRCWLVSNGSYLNETHFSDDIEQQADNMITELLQKEYMDRQGKTPLGLVDLFVFSTSFYLISIFLHLVKIPTHRHVIGKPCPKPHRLNHMGICSCGLYKHPGVPVKWKR

SEQ ID NO: 3629 - protein, 490 aa, Artificial Sequence
  derived and/or modified protein sequence (wt) from LASV(Lassa virus/H.sapiens-wt/NGA/2016/ISTH_0104;Clade II)__AVO03631__GPCstabilized
MGQVITFFQEVPHVIEEVMNIVLIALSLLAILKGIYNVATCGLFGLISFLLLCGRSCSTTYKGVYELQTLELNMQNLNMTMPLSCTKNSSHHYIMVGNETGLELTLTNTSIINHKFCNLSDAHKKNLYDHALMSIISTFHLSIPNFNQYEAMSCDFNGGKISVQYNLSHTYAIDAANHCGTVANGVLQTFMRMAWGGSYIALDSGCGNWDCIMTSYQYLIIQNTTWEDHCQFSRPSPIGYLGLLSQRTRDIYISRRRRGTFTWTLSDSEGNEAPGGYCLTRWMLIEAELKCFGNTAVAKCNEKHDEEFCDMLRLFDFNKQAIKRLKTPAQMSIQLINKAVNALINDQLIMKNHLRDIMCIPYCNYSKYWYLNHTVTGRTSLPRCWLVSNGSYLNDTQFSDDIEQQADNMITEMLQKEYMDRQGKTPLGLVDLFVFSTSFYLISIFLHLVKIPTHRHIVGRPCPKPHRLNHMGICSCGLYKHPGVPVKWKR

SEQ ID NO: 3630 - protein, 491 aa, Artificial Sequence
  derived and/or modified protein sequence (wt) from LASV(Lassa virus/H.sapiens-wt/NGA/2016/ISTH_0133;Clade II)__AVO03635__GPCstabilized
MGQIITFFQEVPHVIEEVMNIVLIALSLLAVLKAIYNVATCGVFGLISFLLLCGRSCSTTYKGVYELQTLELDMANLNMTMPLSCTKNNSHHYIMVGNETGLELTLTNTSIINHKFCNLSDAHKKNLYDHSLMSIISTFHLSIPNFNQYEAMSCDFNGGKISVQYNLSHSYAVDAAKHCGTIANGVLQTFMRMAWGGSYIALDSGKCGWDCIMTSYQYLIIQNTTWEDHCQFSRPSPIGYLGLLSQRTRDIYISRRLRRTFTWTLSDSEGNDAPGGYCLTRWMLIEAELKCFGNTAIAKCNEKHDEEFCDMLRLFDFNRQAIKRLKTEPQMSIQLINKAVNALINDQLIMKNHLRDIMGCPYCNYSKYWYLNHTITGKTSLPRCWLVSNGSYLNETHFSDDIEQQADNMITELLQKEYMDRQGKTPLGLVDLFVFSTSFYLISIFLHLVKIPTHRHIVGKPCPKPHRLNHMGICSCGLYKHPGVPVKWKRQ

SEQ ID NO: 3631 - protein, 490 aa, Artificial Sequence
  derived and/or modified protein sequence (wt) from LASV(Lassa virus/H.sapiens-wt/NGA/2016/ISTH_0141;Clade II)__AVO03649__GPCstabilized
MGQIITFFQEVPHVIEEVMNIVLITLSLLAILKGIYNVATCGLFGLVSFLLLCGRSCSTIYKGVYELQTLELDMASLNMTMPLSCTKNNSHHYIMVGNETGLELTLTNTSIINHKFCNLSDAHKKNLYDHALMSIISTFHLSIPNFNQYEAMSCDFNGGKISVQYNLSHTYAVDAAEHCGTIANGVLQTFMRMAWGGSYIALDSGCGSWDCIMTSYQYLIIQNTTWEDHCQFSRPSPIGYLGLLSQRTRDIYISRRRRGTFTWTLSDSEGNETPGGYCLTRWMLIEAELKCFGNTAVAKCNEKHDEEFCDMLRLFDFNKQAIRRLKTPAQMSIQLINKAVNALINDQLIMKNHLRDIMCIPYCNYSKYWYLNHTVTGKTSLPRCWLVSNGSYLNETRFSDDIEQQADNMITELLQKEYIDRQGKTPLGLVDLFVFSTSFYLISIFLHLVKIPTHRHIIGKPCPKPHRLNHMGICSCGLYKHPGIPVKWKR

SEQ ID NO: 3632 - protein, 490 aa, Artificial Sequence
  derived and/or modified protein sequence (wt) from LASV(Lassa virus/H.sapiens-wt/NGA/2016/ISTH_0146;Clade II)__AVO03633__GPCstabilized
MGQIITFFQEVPHVIEEVMNIVLIALSLLAILKGIYNVATCGLFGLVSFLLLCGRSCSTTYKGVYELQTLELDMASLNMTMPLSCTKNNSHHYIMVGNETGLELTLTNTSIINHKFCNLSDAHKKNLYDHALMSIISTFHLSIPNFNQYEAMSCDFNGGKISVQYNLSHTYAVDAANHCGTIANGVLQTFMRMAWGGSYIALDSGCGSWDCIMTSYQYLIIQNTTWEDHCQFSRPSPIGYLGLLSQRTRDIYISRRRRGTFTWTLSDSEGNETPGGYCLTRWMLIEAELKCFGNTAVAKCNEKHDEEFCDMLRLFDFNKQAIRRLKTPAQMSIQLINKAVNALINDQLIMKNHLRDIMCIPYCNYSKYWYLNHTVTGKTSLPRCWLVSNGSYLNETHFSDDIEQQADNMITELLQKEYMDRQGKTPLGLVDLFVFSTSFYLISIFLHLVKIPTHRHVIGKPCPKPHRLNHMGICSCGLYKHPGVPVKWKR

SEQ ID NO: 3633 - protein, 490 aa, Artificial Sequence
  derived and/or modified protein sequence (wt) from LASV(Lassa virus/H.sapiens-wt/NGA/2016/ISTH_0187;Clade II)__AVO03549__GPCstabilized
MGQIVTFFQEVPHVIEEVMNIVLIALSVLAILKGLYNFATCGLIGLVTFLLLSGRSCSMVYKGVYELQTLELNMETLNMTMPLSCTKNNSHHYIRVGNDTGLELTLTNNTLLNHKFCNLSDAHKKNLYDHALMSIISTFHLSIPNFNQYEAMSCDFNGGRITVQYNLSHSYAVDAANHCGTVANGVLQTFMRMAWGGSYIALDSRCGNWDCIMTSYQYLIIQNTTWEDHCQFSRPSPIGYLGLLSQRTRDIYISRRRRGTFTWTLSDSEGNETPGGYCLTRWMLIEAELKCFGNTAVAKCNEKHDEEFCDMLRLFDFNKQAIRRLKAPAQMSIQLINKAVNALINDQLIMKNHLRDIMCIPYCNYSKYWYLNHTSTGKTSLPRCWLVSNGSYLNETHFSDDIEQQADNMITEMLQKEYLDRQGKTPLGLVDIFVFSTSFYLISIFLHLIKIPTHRHIVGKPCPKPHRLNHMGICSCGLYKQPGVPVRWKR

SEQ ID NO: 3634 - protein, 490 aa, Artificial Sequence
  derived and/or modified protein sequence (wt) from LASV(Lassa virus/H.sapiens-wt/NGA/2016/ISTH_0199;Clade II)__AVO03653__GPCstabilized
MGQIITFFQEVPHVIEEVMNIVLIALSLLAILKGIYNVATCGLFGLVSFLLLCGRSCSTTYKGVYELQTLELDMASLNMTMPLSCTKNNSHHYIMVGNETGLELTLTNTSIINHKFCNLSDAHKKNLYDHALMSIISTFHLSIPNFNQYEAMSCDFNGGKISVQYNLSHTYAVDAANHCGTIANGVLQTFMRMAWGGSYIALDSGCGNWDCIMTSYQYLIIQNTTWEDHCQFSRPSPIGYLGLLSQRTRDIYISRRRRGTFTWTLSDSEGNETPGGYCLTRWMLIEAELKCFGNTAVAKCNEKHDEEFCDMLRLFDFNKQAISRLKTPAQMSIQLINKAVNALINDQLIMKNHLRDIMCIPYCNYSKYWYLNHTVTGKTSLPRCWLVSNGSYLNETHFSDDIEQQADNMITEMLQKEYIDRQGKTPLGLVDLFVFSTSFYLISIFLHLVKIPTHRHVIGKPCPKPHRLNHMGICSCGLYKHPGVPVKWKR

SEQ ID NO: 3635 - protein, 490 aa, Artificial Sequence
  derived and/or modified protein sequence (wt) from LASV(Lassa virus/H.sapiens-wt/NGA/2016/ISTH_0419;Clade II)__AVO03539__GPCstabilized
MGQIVTFFQEVPHVIEEVMNIVLIALSLLAILKGIYNFATCGLIGLITFLFLCGRSCSAIYKGSYQLQTIELNMETLNMTMPLSCTKNSSHHYIRVGNETGLELTLTNISIIDHKFCNLSDAHKKNLYDHALMSIISTFHLSIPNFNQYEAMSCDFNGGKISVQYNLSHTYAVDAANHCGTVANGVLQTFMRMAWGGSYIALDSGCGNWDCIMTSYQYLIIQNTTWEDHCQFSRPSPIGYLGLLSQRTRDIYISRRRRGTFTWTLSDSEGKETPGGYCLTRWMLIEAELKCFGNTAVAKCNEKHDEEFCDMLRLFDFNKQAIQRLKAPAQMSIQLINKAVNALINDQLIMKNHLRDIMCIPYCNYSKYWYLNHTSTGRTSLPRCWLVSNGSYLNETHFSDDIEQQADNMITEMLQKEYIDRQGKTPLGLVDLFVFSTSFYLISIFLHLIKIPTHRHIVGKSCPKPHRLNHMGICSCGLYKQPGVPVKWKR

SEQ ID NO: 3636 - protein, 490 aa, Artificial Sequence
  derived and/or modified protein sequence (wt) from LASV(Lassa virus/H.sapiens-wt/NGA/2016/ISTH_0447;Clade II)__AVO03559__GPCstabilized
MGQIITFFQEVPHVIEEVMNIVLIALSLLAILKGIYNIATCGLFGLVSFLLLCGRSCSTTYKGVYELQTLELDMASLNMTMPLSCTKNNSHHYIMVGNETGLELTLTNTSIINHKFCNLSDAHKKNLYDHTLMSIISTFHLSIPNFNQYEAMSCDFNGGKISVQYNLSHAYAVDAANHCGTIANGVLQTFMRMAWGGSYIALDSGCGNWDCIMTSYQYLIIQNTTWEDHCQFSRPSPIGYLGLLSQRTRDIYISRRRRGTFTWTLSDSEGNETPGGYCLTRWMLIEAELKCFGNTAVAKCNEKHDEEFCDMLRLFDFNKQAIRRLKTPAQMSIQLINKAVNALINDQLIMKNHLRDIMCIPYCNYSKYWYLNHTVTGKTSLPRCWLVSNGSYLNETHFSDDIEQQADNMITELLQKEYIDRQGKTPLGLVDLFVFSTSFYLISIFLHLVKIPTHRHVVGKPCPKPHRLNHMGICSCGLYKHPGVPVKWKR

SEQ ID NO: 3637 - protein, 490 aa, Artificial Sequence
  derived and/or modified protein sequence (wt) from LASV(Lassa virus/H.sapiens-wt/NGA/2016/ISTH_0543;Clade II)__AVO03595__GPCstabilized
MGQIITFFQEVPHVIEEVMNIVLIALSLLAILKGIYNIATCGLFGLISFLLLCGRSCSTTYKGVYELQTLELDMANLNMTMPLSCTKNNSHHYIMVGNETGLELTLTNTSIINHKFCNLSDAHKKNLYDHALMSIISTFHLSIPNFNQYEAMSCDFNGGKISVQYNLSHSYAVDAAGHCGTIANGVLQTFMRMAWGGSYIALDSGCGNWDCIMTSYQYLVIQNTTWEDHCQFSRPSPIGYLGLLSQRTRDIYISRRRRGTFTWTLSDSEGNEAPGGYCLTRWMLIEAELKCFGNTAIAKCNEKHDEEFCDMLRLFDFNKQAIRRLKAPAQMSIQLINKAVNALINDQLIMKNHLRDIMCIPYCNYSKYWYLNHTVTGKTSLPKCWLVSNGSYLNETHFSDDIEQQADNMITELLQKEYMDRQGKTPLGLVDLFVFSTSFYLISIFLHLVKIPTHRHIVGRPCPKPHRLNHMGICSCGLYKHPGVPVKWKR

SEQ ID NO: 3638 - protein, 490 aa, Artificial Sequence
  derived and/or modified protein sequence (wt) from LASV(Lassa virus/H.sapiens-wt/NGA/2016/ISTH_0565;Clade II)__AVO03637__GPCstabilized
MGQIVTFFQEVPHVIEEVMNIVLIALSLLAILKGIYNVATCGLFGLISFLLLCGRSCSTTYKGVYELQTLELDMANLNMTMPLSCTKNSSHHYIMVGNETGLELTLTNTSIINHKFCNLSDAHKKNLYDHALMSIISTFHLSIPNFNQYEAMSCDFNGGKISVQYNLSHTYAVDAANHCGTIANGVLQTFMRMAWGGSYIALDSGCGNWDCIMTSYQYLIIQNTTWEDHCQFSRPSPIGYLGLLSQRTRDIYISRRRRGTFTWTLSDSEGNEAPGGYCLTRWMLIEAELKCFGNTAIAKCNEKHDEEFCDMLRLFDFNKQAIKRLKSPAQMSIQLINKAVNALINDQLIMKNHLRDIMCIPYCNYSRYWYLNHTVTGKTSLPRCWLISNGSYLNETHFSDDIEQQADNMITELLQKEYMDRQGKTPLGLVDLFVFSTSFYLISIFLHLVKIPTHRHIVGRPCPKPHRLNHMGICSCGLYKHPGVPVKWKR

SEQ ID NO: 3639 - protein, 490 aa, Artificial Sequence
  derived and/or modified protein sequence (wt) from LASV(Lassa virus/H.sapiens-wt/NGA/2016/ISTH_0572;Clade II)__AVO03611__GPCstabilized
MGQIITFFQEVPHVIEEVMNIVLIALSLLAILKGIYNVATCGLFGLVAFLLLCGRSCSTTYKGVYELQTLELDMASLNMTMPLSCTKNNSHHYIMVGNETGLELTLTNTSIINHKFCNLSDAHKKNLYDHALMSIISTFHLSIPNFNQHEAMSCDFNGGKISVQYNLSHTYAVDAANHCGTIANGVLQTFMRMAWGGSYIALDSGCGSWDCIMTSYQYLIIQNTTWEDHCQFSRPSPIGYLGLLSQRTRDIYISRRRRGTFTWTLSDSEGNETPGGYCLTRWMLIEAELKCFGNTAVAKCNEKHDEEFCDMLRLFDFNKQAIRRLKTPAQMSIQLINKAVNALINDQLIMKNHLRDIMCIPYCNYSKYWYLNHTVTGRTSLPRCWLVSNGSYLNETHFSDDIEQQADNMITELLQKEYMDRQGKTPLGLVDLFVFSTSFYLISIFLHLIKIPTHRHVIGKPCPKPHRLNHMGICSCGLYKHPGVPVKWKR

SEQ ID NO: 3640 - protein, 490 aa, Artificial Sequence
  derived and/or modified protein sequence (wt) from LASV(Lassa virus/H.sapiens-wt/NGA/2016/ISTH_0610;Clade II)__AVO03585__GPCstabilized
MGQIITFFQEVPHVIEEVMNIVLIALSLLAILKGVYNVATCGLFGLVSFLLLCGRSCSTTYKGVYELQTLELDMASLNMTMPLSCTKNNSHHYIMVGNETGLELTLTNTSIINHKFCNLSDAHKKNLYDHALMSIISTFHLSIPNFNQYEAMSCDFNGGKISVQYNLSHTYAVDAANHCGTIANGVLQTFMRMAWGGSYIALDSGCGSWDCIMTSYQYLIIQNTTWEDHCQFSRPSPIGYLGLLSQRTRDIYISRRRRGTFTWTLSDSEGNETPGGYCLTRWMLIEAELKCFGNTAVAKCNEKHDEEFCDMLRLFDFNKQAIRRLKAPAQMSIQLINKAVNALINDQLIMKNHLRDIMCIPYCNYSKYWYLNHTVTGRTSLPRCWLVSNGSYLNETHFSDDIEQQADNMITELLQKEYIDRQGKTPLGLVDLFVFSTSFYLISIFLHLVKIPTHRHIIGKPCPKPHRLNHMGICSCGLYKHPGVPVKWKR

SEQ ID NO: 3641 - protein, 490 aa, Artificial Sequence
  derived and/or modified protein sequence (wt) from LASV(Lassa virus/H.sapiens-wt/NGA/2016/ISTH_0621;Clade II)__AVO03543__GPCstabilized
MGQIVTFFQEIPHVVEEIMNIVLITLSLLAILKGLYNFATCGLIGLITFLFLCGRSCSTIYKGSYQLQALELNMETLNMTMPLSCTKNNSHHYIRVGNETGLELTLTNTSIIDHKFCNLSDAHKRNLYDHTLMSIISTFHLSIPNFNQYEAMSCDFNGGKISVQYNLSHSYAGDAARHCGTVANGVLQTFMRMAWGGSYIALDSGCGNWDCIMTSYQYLIIQNTTWENHCQFSRPSPIGYLGLLSQRTRDIYISRRRRGTFTWTLSDSEGKETPGGYCLTRWMLIEAELKCFGNTAVAKCNEKHDEEFCDMLRLFDFNKQAIQRLKTPAQMSIQLINKAVNALINDQLIMKNHLRDIMCIPYCNYSKYWYLNHTTTGKTSLPKCWLVSNGSYLNETHFSDDIEQQADNMITEMLQKEYIDRQGKTPLGLVDLFVFSTSFYLISIFLHLIKIPTHRHIVGKSCPKPHRLNHMGICSCGLYKQPGVLVKWKR

SEQ ID NO: 3642 - protein, 490 aa, Artificial Sequence
  derived and/or modified protein sequence (wt) from LASV(Lassa virus/H.sapiens-wt/NGA/2016/ISTH_0701;Clade II)__AVO03629__GPCstabilized
MGQIITFFQEVPHVIEEVMNIVLIALSLLAILKGIYNVATCGLFGLVSFLLLCGRSCSTTYKGVYELQTLELDMASLNMTMPLSCTKNNSHHYIMVGNETGLELTLTNTSIIGHKFCNLSDAHKKNLYDHALMSIISTFHLSIPNFNQYEAMSCDFNGGKISVQYNLSHAYAVDAANHCGTIANGVLQTFMRMAWGGSYIALDSGCGSWDCIMTSYQYLIIQNTTWEDHCQFSRPSPIGYLGLLSQRTRDIYISRRRRGTFTWTLSDSEGNETPGGYCLTRWMLIEAELKCFGNTAVAKCNEKHDEEFCDMLRLFDFNKQAIRRLKTPAQMSIQLINKAVNALINDQLIMKNHLRDIMCIPYCNYSKYWYLNHTVTGKTSLPRCWLVSNGSYLNETHFSDDIEQQADNMITELLQKEYIDRQGKTPLGLVDLFVFSTSFYLISIFLHLVKIPTHRHVIGKPCPKPHRLNHMGICSCGLYKHPGVPVKWKR

SEQ ID NO: 3643 - protein, 490 aa, Artificial Sequence
  derived and/or modified protein sequence (wt) from LASV(Lassa virus/H.sapiens-wt/NGA/2016/ISTH_0702;Clade II)__AVO03557__GPCstabilized
MGQIITFFQEVPHVIEEVMNIVLIALSLLAVLKGIYNVATCGLFGLVAFLLLCGRSCSTTYKGVYELQTLELDMANLNMTMPLSCTKNNSHHYIMVGNETGLELTLTNTSIINHKFCNLSDAHKKNLYDHALMSIISTFHLSIPNFNQYEAMSCDFNGGKISVQYNLSHTYAVDAANHCGTIANGVLQTFMRMAWGGSYIALDSGCGSWDCIMTSYQYLIIQNTTWEDHCQFSRPSPIGYLGLLSQRTRDIYISRRRRGTFTWTLSDSEGNETPGGYCLTRWMLIEAELKCFGNTAVAKCNEKHDEEFCDMLRLFDFNKQAIRRLKTPAQMSIQLINKAVNALINDQLIMKNHLRDIMCIPYCNYSKYWYLNHTVTGRTSLPRCWLVSNGSYLNETHFSDDIEQQADNMITELLQKEYMDRQGKTPLGLVDLFVFSTSFYLISIFLHLIKIPTHRHVIGKPCPKPHRLNHMGICSCGLYKHPGVPVKWKR

SEQ ID NO: 3644 - protein, 490 aa, Artificial Sequence
  derived and/or modified protein sequence (wt) from LASV(Lassa virus/H.sapiens-wt/NGA/2016/ISTH_0703;Clade II)__AVO03597__GPCstabilized
MGQIITFFQEVPHVIEEVMNIVLIALSLLAILKGIYNVATCGLFGLVSFLLLCGRSCSTTYKGVYELQTLELDMASLNMTMPLSCTKNNSHHYIMVGNETGLELTLTNTSIINHKFCNLSDAHKKNLYDHALMSIISTFHLSIPNFNQYEAMSCDFNGGKISVQYNLSHTYAVDAASHCGTIANGVLQTFMRMAWGGSYIALDSGCGSWDCIMTSYQYLIIQNTTWEDHCQFSRPSPIGYLGLLSQRTRDIYISRRRRGTFTWTLSDSEGNETPGGYCLTRWMLIEAELKCFGNTAVAKCNEKHDEEFCDMLRLFDFNKQAIRRLKTPAQMSIQLINKAVNALINDQLIMKNHLRDIMCIPYCNYSKYWYLNHTVTGRTSLPRCWLVSNGSYLNETHFSDDIEQQADNMITELLQKEYIERQGKTPLGLVDLFVFSTSFYLISIFLHLIKIPTHRHVIGKPCPKPHRLNHMGICSCGLYKHPGVPVKWKR

SEQ ID NO: 3645 - protein, 490 aa, Artificial Sequence
  derived and/or modified protein sequence (wt) from LASV(Lassa virus/H.sapiens-wt/NGA/2016/ISTH_0717;Clade II)__AVO03547__GPCstabilized
MGQIVTFFQEVPHVIEEVMNIVLIALSILAILKGLYNVATCGLIGLVTFLLLSGRSCSMIYKGVYELQTLELNMETLNMTMPLSCTKNNSHHYIMVGNETGLELTLTNTSLLNHKFCNLSDAHKKNLYDHTLMSIISTFHLSIPNFNQYEAMSCDFNGGKITVQYNLSHTYAVDAVNHCGTLANGILQTFMRMAWGGSYIALDSRCGSWDCIMTSYQYLIIQNTTWEDHCQFSRPSPIGYLGLLSQRTRDIYISRRRRGTFTWTLSDSEGNETPGGYCLTRWMLIEAELKCFGNTAVAKCNEKHDEEFCDMLRLFDFNKQAIRRLKAPAQMSIQLINKAVNALINDQLIMKNHLRDIMCIPYCNYSKYWYLNHTSTGRTSLPRCWLVSNGSYLNETHFSDDIEQQADNMITEMLQKEYLDRQGKTPLGLVDLFVFSTSFYLISIFLHLIKIPTHRHIVGKPCPKPHRLNHMGICSCGLYKQPGVPVRWKR

SEQ ID NO: 3646 - protein, 490 aa, Artificial Sequence
  derived and/or modified protein sequence (wt) from LASV(Lassa virus/H.sapiens-wt/NGA/2016/ISTH_0753;Clade II)__AVO03609__GPCstabilized
MGQIITFFQEVPHVIEEVMNIVLIALSLLAILKGIYNVATCGLFGLVSFLLLCGRSCSTTYKGVYELQTLELDMASLNMTMPLSCTKNNSHHYIMVGNETGLELTLTNTSIINHKFCNLSDAHKKNLYDHALMSIISTFHLSIPNFNQYEAMSCDFNGGKISVQYNLSHTYAVDAANHCGTIANGVLQTFMRMAWGGSYIALDSGCGNWDCIMTSYQYLIIQNTTWEDHCQFSRPSPIGYLGLLSQRTRDIYISRRRRGTFTWTLSDSEGNETPGGYCLTRWMLIEAELKCFGNTAVAKCNEKHDEEFCDMLRLFDFNKQAISRLKTPAQMSIQLINKAVNALINDQLIMKNHLRDIMCIPYCNYSKYWYLNHTVTGRTSLPRCWLVSNGSYLNETHFSDDIEQQADNMITELLQKEYMDRQGKTPLGLVDLFVFSTSFYLISIFLHLVKIPTHRHVIGKPCPKPHRLNHMGICSCGLYKHPGVPVKWKR

SEQ ID NO: 3647 - protein, 490 aa, Artificial Sequence
  derived and/or modified protein sequence (wt) from LASV(Lassa virus/H.sapiens-wt/NGA/2016/ISTH_0759;Clade II)__AVO03593__GPCstabilized
MGQIITFFQEVPHVIEEVMNIVLIALSLLAILKGIYNVATCGLFGLVSFLLLCGRSCSTTYKGVYELQTLELDMASLNMTMPLSCTKNNSHHYIMVGNETGLELTLTNTSIINHKFCNLSDAHKKNLYDHTLMSIISTFHLSIPNFNQYEAMSCDFNGGKISVQYNLSHTYAVDAANHCGTIANGVLQTFMRMAWGGSYIALDSGCGSWDCIMTSYQYLIIQNTSWEDHCQFSRPSPIGYLGLLSQRTRDIYISRRRRGTFTWTLSDSEGNETPGGYCLTRWMLIEAELKCFGNTAVAKCNEKHDEEFCDMLRLFDFNKQAIRRLKTPAQMSIQLINKAVNALINDQLIMKNHLRDIMCIPYCNYSKYWYLNHTVTGKTSLPRCWLVSNGSYLNETHFSDDIEQQADNMITELLQKEYIDRQGKTPLGLVDLFVFSTSFYLISIFLHLVKIPTHRHVIGKPCPKPHRLNHMGICSCGLYKHPGVPVKWKR

SEQ ID NO: 3648 - protein, 490 aa, Artificial Sequence
  derived and/or modified protein sequence (wt) from LASV(Lassa virus/H.sapiens-wt/NGA/2016/ISTH_0777;Clade II)__AVO03615__GPCstabilized
MGQIITFFQEVPHVIEEVMNIVLIALSLLAILKGIYNVATCGLLGLISFLLLCGRSCSTTYKGVYELQTLELDMANLNMTMPLSCTKNSSHHYIMVGNETGLELTLTNTSIINHKFCNLSDAHKKNLYDHALMSIISTFHLSIPNFNQYEAMSCDFNGGKISVQYNLSHAYAVDAANHCGTIANGVLQTFMRMAWGGSYIALDSGCGNWDCIMTSYQYLIIQNTTWEDHCQFSRPSPIGYLGLLSQRTRDIYISRRRRGTFTWTLSDSEGNEAPGGYCLTRWMLIEAELKCFGNTAIAKCNEKHDEEFCDMLRLFDFNKQAIRRLKTPAQMSIQLINKAVNALINDQLIMKNHLRDIMCIPYCNYSKYWYLNHTVTGKTSLPRCWLISNGSYLNETHFSDDIEQQADNMITELLQKEYMDRQGKTPLGLVDLFVFSTSFYLISIFLHLVKIPTHRHIVGKPCPKPHRLNHMGICSCGLYKHPGVPVKWKR

SEQ ID NO: 3649 - protein, 490 aa, Artificial Sequence
  derived and/or modified protein sequence (wt) from LASV(Lassa virus/H.sapiens-wt/NGA/2016/ISTH_0779;Clade II)__AVO03655__GPCstabilized
MGQIITFFQEVPHVVEEVMNVVLIALSLLAILKGIYNIATCGLFGLISFLLLCGRSCSTTYKGVYELQTLELDMANLNMTMPLSCTKNNSHHYIMVGNETGLELTLTNTSIINHKFCNLSDAHKKNLYDHTLMSIISTFHLSIPNFNQYEAMSCDFNGGKISVQYNLSHGYAVDAANHCGTIANGVLQTFMRMAWGGSYIALDSGCGNWDCIMTSYQYLVIQNTTWEDHCQFSRPSPIGYLGLLSQRTRDIYISRRRRGTFTWTLSDSEGNDAPGGYCLTRWMLIEAELKCFGNTAIAKCNEKHDEEFCDMLRLFDFNRQAIKRLKTPAQMSIQLINKAVNALINDQLIMKNHLRDIMCIPYCNYSKYWYLNNTVTGKSSLPKCWLVSNGSYLNETHFSDDIEQQADNMITEMLQKEYIDRQGKTPLGLVDLFVFSTSFYLISIFLHLVRIPTHRHITGKPCPKPHRLNHMGICSCGLYKQPGVPVKWKR

SEQ ID NO: 3650 - protein, 490 aa, Artificial Sequence
  derived and/or modified protein sequence (wt) from LASV(Lassa virus/H.sapiens-wt/NGA/2016/ISTH_0917;Clade II)__AVO03535__GPCstabilized
MGQIVTFFQEVPHVIEEIMNIVLITLSLLAILKGVYNLATCGLIGLITFLFLCGRSCSMTYKGNYQLETLELNMEMLNMTMPLSCTKNNSHHYIRVGNETGLELTLTNTSIIQHKFCNLSDAHKRNLYDHSLMSIVSTFHLSIPNFNQYEAMSCDFNGGKISIQYNLSHTYAGDAAKHCGTLANGILQTFMRMAWGGSYIALDSGCGGWDCIMTNYQYLIIQNVTWEDHCQFSRPSPIGYLGLLSQRTREVYISRRRRGTFTWTLSDSEGNEAPGGYCLTRWMLIEAELKCFGNTAVAKCNEKHDEEFCDMLRLFDFNKQAIRRLKAPTQMSIQLINKAVNALINDQLIMKNHLRDIMCIPYCNYSKYWYLNHTITGRTSLPRCWLVSNGSYLNETHFSDDIEQQADNMITEMLQKEYIDRQGKTPLGLVDLFVFSTSFYLISIFLHLVKIPTHRHIVGKSCPKPHRLNHMGICSCGLYKRPGVSVRWKR

SEQ ID NO: 3651 - protein, 490 aa, Artificial Sequence
  derived and/or modified protein sequence (wt) from LASV(Lassa virus/H.sapiens-wt/NGA/2016/ISTH_1006;Clade II)__AVO03643__GPCstabilized
MGQIITFFQEVPHVIEEVMNIVLIALSLLAILKGIYNVATCGLFGLVAFLLLCGRSCSTTYKGVYELQTLELDMASLNMTMPLSCTKNNSHHYIMVGNETGLELTLTNTSIINHKFCNLSDAHKKNLYDHALMSIISTFHLSIPNFNQYEAMGCDFNGGKISVQYNLSHSYAVDAANHCGTIANGVLQTFMRMAWGGSYIALDSGCGSWDCIMTSYQYLIIQNTTWEDHCQFSRPSPIGYLGLLSQRTRDIYISRRRRGTFTWTLSDSEGNETPGGYCLTRWMLIEAELKCFGNTAVAKCNEKHDEEFCDMLRLFDFNKQAIRRLKTPAQMSIQLINKAVNALINDQLIMKNHLRDIMCIPYCNYSKYWYLNHTVTGRTSLPRCWLVSNGSYLNETHFSDDIEQQADNMITELLQKEYMDRQGKTPLGLVDLFVFSTSFYLISIFLHLIKIPTHRHVIGKPCPKPHRLNHMGICSCGLYKHPGVPVKWKR

SEQ ID NO: 3652 - protein, 490 aa, Artificial Sequence
  derived and/or modified protein sequence (wt) from LASV(Lassa virus/H.sapiens-wt/NGA/2016/ISTH_1026;Clade II)__AVO03589__GPCstabilized
MGQIITFFQEVPHVIEEVMNIVLIALSLLAILKGIYNVATCGLFGLVSFLLLCGRSCSTTYKGVYELQTLELDMASLNMTMPLSCTKNNSHHYIMVGNETGLELTLTNTSIINHKFCNLSDAHKKNLYDHALMSIISTFHLSIPNFNQYEAMSCDFNGGKISVQYNLSHAYAIDAASHCGTIANGVLQTFMRMAWGGSYIALDSGCGSWDCIMTSYQYLIIQNTTWEDHCQFSRPSPIGYLGLLSQRTRDIYISRRRRGTFTWTLSDSEGNETPGGYCLTRWMLIEAELKCFGNTAVAKCNEKHDEEFCDMLRLFDFNKQAIRRLKTPAQMSIQLINKAVNALINDQLIMKNHLRDIMCIPYCNYSKYWYLNHTVTGKTSLPRCWLVSNGSYLNETHFSDDIEQQADNMITELLQKEYLDRQGKTPLGLVDLFVFSTSFYLISIFLHLVKIPTHRHVIGRPCPKPHRLNHMGICSCGLYKHPGVPVKWKR

SEQ ID NO: 3653 - protein, 490 aa, Artificial Sequence
  derived and/or modified protein sequence (wt) from LASV(Lassa virus/H.sapiens-wt/NGA/2016/ISTH_1070;Clade II)__AVO03651__GPCstabilized
MGQIITFFQEVPHVIEEVMNIVLIALSLLAILKGIYNVATCGLFGLVSFLLLCGRSCSTTYKGVYELQTLELDMASLNMTMPLSCTKNNSHHYIMVGNETGLELTLTNTSIINHKFCNLSDAHKKNLYDHALMSIISTFHLSIPNFNQYEAMSCDFNGGKISVQYNLSHTFAVDAANHCGTIANGVLQTFMRMAWGGSYIALDSGCGSWDCIMTSYQYLIIQNTTWEDHCQFSRPSPIGYLGLLSQRTRDIYISRRRRGTFTWTLSDSEGNETPGGYCLTRWMLIEAELKCFGNTAVAKCNEKHDEEFCDMLRLFDFNKQAIRRLKTPAQMSIQLINKAVNALINDQLIMKNHLRDIMCIPYCNYSKYWYLNHTVTGKTSLPRCWLVSNGSYLNETHFSDDIEQQADNMITELLQKEYMDRQGKTPLGLVDLFVFSTSFYLISIFLHLVKIPTHRHIIGKPCPKPHRLNHMGICSCGLYKHPGVPVKWKR

SEQ ID NO: 3654 - protein, 490 aa, Artificial Sequence
  derived and/or modified protein sequence (wt) from LASV(Lassa virus/H.sapiens-wt/NGA/2016/ISTH_1123;Clade II)__AVO03645__GPCstabilized
MGQIITFFQEVPHVIEEVMNIVLIALSLLAILKGIYNVATCGLFGLVSFLLLCGRSCSTTYKGVYELQTLELDMGSLNMTMPLSCTKNNSHHYIMVGNETGLELTLTNTSIINHKFCNLSDAHKKNLYDHALMSIISTFHLSIPNFNQYEAMSCDFNGGKISVQYNLSHAYAVDAANHCGTIANGVLQTFMRMAWGGSYIALDSGCGSWDCIMTSYQYLIIQNTSWEDHCQFSRPSPIGYLGLLSQRTRDIYISRRRRGTFTWTLSDSEGNETPGGYCLTRWMLIEAELKCFGNTAVAKCNEKHDEEFCDMLRLFDFNKQAIRRLKTPAQMSIQLINKAVNALINDQLIMKNHLRDIMCIPYCNYSKYWYLNHTVTGKTSLPRCWLVSNGSYLNETHFSDDIEQQADNMITELLQKEYIDRQGKTPLGLVDLFVFSTSFYLISIFLHLVKIPTHRHVIGKPCPKPHRLNHMGICSCGLYKHPGVPVKWKR

SEQ ID NO: 3655 - protein, 490 aa, Artificial Sequence
  derived and/or modified protein sequence (wt) from LASV(Lassa virus/H.sapiens-wt/NGA/2016/ISTH_1150;Clade II)__AVO03627__GPCstabilized
MGQVITFFQEIPHVIEEVMNIVLITLSLLAILKGIYNVATCGLFGLISFLLLCGRSCSTTYKGVYELQTLELDMANLNMTMPLSCTKNSSHHYIMVGNETGLELTLTNTSIINHKFCNLSDAHKKNLYDHALMSIISTFHLSIPNFNQYEAMSCDFNGGKISVQYNLSHAYAVDAANHCGTIANGVLQTFMRMAWGGSYIALDSGCGNWDCIMTSYQYLIIQNTTWEDHCQFSRPSPIGYLGLLSQRTRDIYISRRRRGTFTWTLSDSEGNEAPGGYCLTRWMLIEAELKCFGNTAIAKCNEKHDEEFCDMLRLFDFNKQAIRRLKTPAQKSIQLINKAVNALINDQLIMKNHLRDIMCIPYCNYSKYWYLNHTVTGKTSLPKCWLISNGSYLNETHFSDDIEQQADNMITELLQKEYMDRQGKTPLGLVDLFVFSTSFYLISIFLHLVKIPTHRHIVGRPCPKPHRLNHMGICSCGLYKHPGVPVKWKR

SEQ ID NO: 3656 - protein, 490 aa, Artificial Sequence
  derived and/or modified protein sequence (wt) from LASV(Lassa virus/H.sapiens-wt/NGA/2016/ISTH_1174;Clade II)__AVO03555__GPCstabilized
MGQIITFFQEVPHVIEEVMNIVLIALSLLAILKGIYNVATCGFFGLVSFLLLCGRSCSTIYKGVYELQTLELDMASLNMTMPLSCTKNNSHHYIMVGNETGLELTLTNTSIINHKFCNLSDAHKKNLYDHALMSIISTFHLSIPHFNQYEAMSCDFNGGKISVQYNLSHTYAVDAANHCGTIANGVLQTFMRMAWGGSYIALDSGCGSWDCIMTSYQYLIIQNTTWEDHCQFSRPSPIGYLGLLSQRTRDIYISRRRRGTFTWTLSDSEGNETPGGYCLTRWMLIEAELKCFGNTAVAKCNEKHDEEFCDMLRLFDFNKQAIRKLKTPAQMSIQLINKAVNALINDQLIMKNHLRDIMCIPYCNYSKYWYLNHTVTGKTSLPRCWLVSNGSYLNETHFSDDIEQQADNMITELLQKEYMDRQGKTPLGLVDLFVFSTSFYLISIFLHLVKIPTHRHVIGKPCPKPHRLNHMGICSCGLYKHPGVPVKWKR

SEQ ID NO: 3657 - protein, 490 aa, Artificial Sequence
  derived and/or modified protein sequence (wt) from LASV(Lassa virus/H.sapiens-wt/NGA/2016/ISTH_1207;Clade II)__AVO03599__GPCstabilized
MGQIITFFQEVPHVIEEVMNIVLIALSLLAILKGIYNVATCGLFGLVSFLLLCGRSCSTTYKGVYELQTLELDMTSLNMTMPLSCTKNNSHHYIMVGNETGLELTLTNTSIINHKFCNLSDAHKKNLYDHALMSIISTFHLSIPNFNQYEAMSCDFNGGKISVQYNLSHTYAVDAANHCGTIANGVLQTFMRMAWGGSYIALDSGCGSWDCIMTSYQYLIIQNTTWEDHCQFSRPSPIGYLGLLSQRTRDIYISRRRRGTFTWTLSDSEGNDTPGGYCLTRWMLIEAELKCFGNTAVAKCNEKHDEEFCDMLRLFDFNKQAIRRLKTPAQMSIQLINKAVNALINDQLIMKNHLRDIMCIPYCNYSKYWYLNHTVTGKTSLPRCWLVSNGSYLNETHFSDDIEQQADNMITELLQKEYIDRQGKTPLGLVDLFVFSTSFYLISIFLHLVKIPTHRHVIGKPCPKPHRLNHMGICSCGLYKHPGVPVKWKR

SEQ ID NO: 3658 - protein, 490 aa, Artificial Sequence
  derived and/or modified protein sequence (wt) from LASV(Lassa virus/H.sapiens-wt/NGA/2016/ISTH_1306;Clade II)__AVO03623__GPCstabilized
MGQIITFFQEVPHVIEEVMNIVLIALSLLAILKGIYNVATCGLFGLVSFLLLCGRSCSTTYKGVYELQTLELDMASLNMTMPLSCTKNNSHHYIMVGNETGLELTLTNTSIINHKFCNLSDAHKKNLYDHALMSIISTFHLSIPNFNQYEAMSCDFNGGKISVQYNLSHTYAVDAANHCGTVANGVLQTFMRMAWGGSYIALDSGCGSWDCIMTSYQYLIIQNTTWEDHCQFSRPSPIGYLGLLSQRTRDIYISRRRRGTFTWTLSDSEGNETPGGYCLTRWMLIEAELKCFGNTAVAKCNEKHDEEFCDMLRLFDFNKQAIRRLKTPAQMSIQLINKAVNALINDQLIMKNHLRDIMCIPYCNYSKYWYLNHTVTGRTSLPRCWLVSNGSYLNETHFSDDIEQQADNMITELLQKEYIDRQGKTPLGLVDLFVFSTSFYLISIFLHLVKIPTHRHVIGKPCPKPHRLNHMGICSCGLYKHPGVPVKWKR

SEQ ID NO: 3659 - protein, 490 aa, Artificial Sequence
  derived and/or modified protein sequence (wt) from LASV(Lassa virus/H.sapiens-wt/NGA/2016/ISTH_1311;Clade II)__AVO03575__GPCstabilized
MGQIVTFFQEVPHVIEEVMNIVLIALSLLAILKGIYNVATCGLFGLISFLLLCGRSCSTTYKGVYELQTLELDMANLNMTMPLSCTKNNSHHYIMVGNETGLELTLTNTSIINHKFCNLSDAHKKNLYDHALMSIISTFHLSIPNFNQYEAMSCDFNGGKISVQYNLSHAYAGDAASHCGTIANGVLQTFMRMAWGGSYIALDSGCGNWDCIMTSYQYLIIQNTTWEDHCQFSRPSPIGYLGLLSQRTRDIYISRRRRGTFTWTLSDSEGNDAPGGYCLTRWMLIEAELKCFGNTAIAKCNEKHDEEFCDMLRLFDFNKQAIKRLKTPAQMSIQLINKAVNALINDQLIMKNHLRDIMCIPYCNYSKYWYLNHTTTGKTSLPKCWLISNGSYLNETHFSDDIEQQADNMITELLQKEYLDRQGKTPLGLVDLFVFSTSFYLISIFLHLIKIPTHRHIVGRPCPKPHRLNHMGICSCGLYKHPGVPVKWKR

SEQ ID NO: 3660 - protein, 490 aa, Artificial Sequence
  derived and/or modified protein sequence (wt) from LASV(Lassa virus/H.sapiens-wt/NGA/2016/ISTH_1423;Clade II)__AVO03577__GPCstabilized
MGQIVTFFQEVPHVIEEVMNIVLIALSLLAILKGIYNVATCGLFGLVSFLLLCGRSCSTTYKGVYELQTLELDMANLNMTMPLSCTKNNSHHYIMVGNETGLELTLTNTSIINHKFCNLSDAHKKNLYDHALMSIISTFHLSIPNFNQYEAMSCDFNGGKISVQYNLSHSYAVDAANHCGTVANGVLQTFMRMAWGGSYIALDSGCGSWDCIMTSYQYLIIQNITWEDHCQFSRPSPIGYLGLLSQRTRDIYISRRRRGTFTWTLSDSEGKETPGGYCLTRWMLIEAELKCFGNTAVAKCNEKHDEEFCDMLRLFDFNKQAIRRLKTPAQMSIQLINKAVNALINDQLIMKNHLRDIMCIPYCNYSKYWYLNHTVTGKTSLPRCWLVSNGSYLNETHFSDDIEQQADNMITELLQKEYIDRQGKTPLGLVDLFVFSTSFYLISIFLHLVKIPTHRHILGKPCPKPHRLNHMGICSCGLYKHPGVPVKWKR

SEQ ID NO: 3661 - protein, 490 aa, Artificial Sequence
  derived and/or modified protein sequence (wt) from LASV(Lassa virus/H.sapiens-wt/NGA/2016/ISTH_1462;Clade II)__AVO03587__GPCstabilized
MGQIITFFQEVPHVIEEVMNIVLIALSLLAILKGIYNVATCGLFGLVSFLLLCGRSCSTTYKGVYELQTLELDMASLNMTMPLSCTKNNSHHYIMVGNETGLELTLTNTSIINHKFCNLSDAHKKNLYDHALMSIISTFHLSIPNFNQYEAMSCDFNGGKISVQYNLSHTYAVDAANHCGTIANGVLQTFMRMAWGGSYIALDSGCGSWDCIMTSYQYLIIQNTTWEDHCQFSRPSPIGYLGLLSQRTRDIYISRRRRGTFTWTLSDSEGNETPGGYCLTRWMLIEAELKCFGNTAVAKCNEKHDEEFCDMLRLFDFNKQAIRRLKTPAQMSIQLINKAVNALINDQLIMKNHLRDIMCIPYCNYSKYWYLNHTVTGRTSLPRCWLVSNGSYLNETHFSDDIEQQADNMITELLQKEYIERQGKTPLGLVDLFVFSTSFYLISIFLHLIKIPTHRHVIGKPCPKPHRLNHMGICSCGLYKHPGVPVKWKR

SEQ ID NO: 3662 - protein, 490 aa, Artificial Sequence
  derived and/or modified protein sequence (wt) from LASV(Lassa virus/H.sapiens-wt/NGA/2016/ISTH_1472;Clade II)__AVO03605__GPCstabilized
MGQIITFFQEVPHVIEEVMNIVLIALSLLAILKGIYNVATCGLFGLVSFLLLCGRSCSTTYKGVYELQTLELDMASLNMTMPLSCTKNNSHHYIMVGNETGLELTLTNTSIINHKFCNLSDAHKKNLYDHALMSIISTFHLSIPNFNQYEAMSCDFNGGKISVQYNLSHTYAVDAANHCGTIANGVLQTFMRMAWGGSYIALDSGCGSWDCIMTSYQYLIIQNTTWEDHCQFSRPSPIGYLGLLSQRTRDIYISRRRRGTFTWTLSDSEGNETPGGYCLTRWMLIEAELKCFGNTAVAKCNEKHDEEFCDMLRLFDFNKQAIRRLKTPAQMSIQLINKAVNALINDQLIMKNHLRDIMCIPYCNYSKYWYLNHTVTGRTSLPRCWLVSNGSYLNETHFSDDIEQQADNMITELLQKEYIDRQGKTPLGLVDLFVFSTSFYLISIFLHLIKIPTHRHVIGKPCPKPHRLNHMGICSCGLYKHPGVPVKWKR

SEQ ID NO: 3663 - protein, 490 aa, Artificial Sequence
  derived and/or modified protein sequence (wt) from LASV(Lassa virus/H.sapiens-wt/NGA/2016/ISTH_1474;Clade II)__AVO03613__GPCstabilized
MGQIITFFQEVPHVIEEVMNIVLIALSLLAILKGIYNVATCGLFGLVSFLLLCGRSCSTTYKGVYELQTLELDMASLNMTMPLSCTKNNSHHYIMVGNETGLELTLTNTSIIHHKFCNLSDAHKKNLYDHALMSIISTFHLSIPNFNQYEAMSCDFNGGKISVQYNLSHTYAVDAANHCGTIANGVLQTFMRMAWGGSYIALDSGCGSWDCIMTSYQYLIIQNTTWEDHCQFSRPSPIGYLGLLSQRTRDIYISRRRRGTFTWTLSDSEGNETPGGYCLTRWMLIEAELKCFGNTAVAKCNEKHDEEFCDMLRLFDFNKQAIRRLKTPAQMSIQLINKAVNALINDQLIMKNHLRDIMCIPYCNYSKYWYLNHTVTGRTSLPRCWLVSNGSYLNETHFSDDIEQQADNMITELLQKEYIDRQGKTPLGLVDLFVFSTSFYLISIFLHLIKIPTHRHVIGKPCPKPHRLNHMGICSCGLYKHPGVPVKWKR

SEQ ID NO: 3664 - protein, 491 aa, Artificial Sequence
  derived and/or modified protein sequence (wt) from LASV(Lassa virus/H.sapiens-wt/NGA/2016/ISTH_1496;Clade II)__AVO03579__GPCstabilized
MGQIITFFQEVPHVIEEVMNIVLIALSLLAILKGVYNVATCGLFGLVSFLLLCGRSCSTTIYKGVYELQTLELDMASLNMTMPLSCTKNNSHHYIMVGNETGLELTLTNTSIINHKFCNLSDAHKKNLYDHALMSIISTFHLSIPNFNQYEAMSCDFNGGKISVQYNLSHAYAVDAANHCGTIANGVLQTFMRMAWGGSYIALDSGCRSWDCIMTSYQYLIIQNTTWEDHCQFSRPSPIGYLGLLSQRTRDIYISRRRRGTFTWTLSDSEGNETPGGYCLTRWMLIEAELKCFGNTAVAKCNEKHDEEFCDMLRLFDFNKQAIRRLKTPAQMSIQLINKAVNALINDQLIMKNHLRDIMCIPYCNYSKYWYLNHTVTGKTSLPRCWLVSNGSYLNETHFSDDIEQQADNMITELLQKEYIDRQGKTPLGLVDLFVFSTSFYLISIFLHLVKIPTHRHVIGKPCPKPHRLNHMGICSCGLYKHPGVPVKWKR

SEQ ID NO: 3665 - protein, 490 aa, Artificial Sequence
  derived and/or modified protein sequence (wt) from LASV(Lassa virus/H.sapiens-wt/NGA/2016/ISTH_1541;Clade II)__AVO03553__GPCstabilized
MGQIVTFFQEVPHVIEEIMNIVLITLSLLAVLKGIYNFATCGLIGLITFLFLCGRSCSTIYKGNYQLQTLELNMETLNMTMPLSCTKNNSHHYIRVGNETGLELTLTNVSIINHRFCNLSDAHKRNLYDHTLMSIISTFHLSIPNFNQYEAMSCDFNGGKISVQYNLSHGYAVDAAKHCGTVANGVLQTFMRMAWGGSYIALDSGCGNWDCIMTSYQYLIIQNTTWEDHCQFSRPSPIGYLGLLSQRTRDIYISRRRRGTFTWTLSDSEGRETPGGYCLTRWMLIEAELKCFGNTAVAKCNEKHDEEFCDMLRLFDFNKQAIQRLKTPAQMSIQLINKAVNALINDQLIMKNHLRDIMCIPYCNYSKYWYLNHTTTGKTSLPKCWLVTNGSYLNETHFSDDIEQQADNMITEMLQKEYIDRQGKTPLGLVDLFVFSTSFYLISIFLHLIKIPNHRHIVGKPCPKPHRLNHMGICSCGFYKQPGVPVRWKR

SEQ ID NO: 3666 - protein, 490 aa, Artificial Sequence
  derived and/or modified protein sequence (wt) from LASV(Lassa virus/H.sapiens-wt/NGA/2016/ISTH_1546;Clade II)__AVO03537__GPCstabilized
MGQIVTFFQEIPHVVEEIMNIVLITLSLLAILKGLYNFATCGLIGLITFLFLCGRSCSTIYKGSYQLQALELNMETLNMTMPLSCTKNNSHHYIRVGNETGLELTLTNTSIINHKFCNLSDAHKKNLYDHTLMSIISTFHLSIPNFNQYEAMSCDFNGGKISVQYNLSHSYAGDAARHCGTVANGVLQTFMRMAWGGSYIALDSGCGNWDCIMTSYQYLIIQNTTWEDHCQFSRPSPIGYLGLLSQRTRDIYISRRRRGTFTWTLSDSEGKETPGGYCLTRWMLIEAELKCFGNTAVAKCNEKHDEEFCDMLRLFDFNKQAIQRLKTPAQMSIQLINKAVNALINDQLIMKNHLRDIMCIPYCNYSKYWYLNHTTTGKTSLPRCWLVSNGSYLNETHFSDDIEQQADNMITEMLQKEYIDRQGKTPLGLVDLFVFSTSFYLISIFLHLIKIPTHRHIVGKSCPKPHRLNHMGICSCGLYKQPGVPVKWKR

SEQ ID NO: 3667 - protein, 490 aa, Artificial Sequence
  derived and/or modified protein sequence (wt) from LASV(Lassa virus/H.sapiens-wt/NGA/2016/ISTH_1591;Clade II)__AVO03647__GPCstabilized
MGQIITFFQEVPHVIEEVMNIVLIALSLLAILKGIYNVATCGLFGLVSFLLLCGRSCSTTYKGVYELQTLELDMASLNMTMPLSCTKNNSHHYIMVGNETGLELTLTNTSIIQHKFCNLSDAHKKNLYDHALMSIVSTFHLSIPNFNQYEAMSCDFNGGKITVQYNLSHSYAIDAANHCGTVANGVLQTFMRMAWGGSYIALDSGCGSWDCIMTSYQYLIIQNTTWEDHCQFSRPSPIGYLGLLSQRTRDIYISRRRRGTFTWTLSDSEGNETPGGYCLTRWMLIEAELKCFGNTAVAKCNEKHDEEFCDMLRLFDFNKQAIRRLKAPAQMSIQLINKAVNALINDQLIMKNHLRDIMCIPYCNYSKYWYLNHTVTGRTSLPRCWLVSNGSYLNETHFSDDIEQQADNMITELLQKEYMDRQGKTPLGLVDLFVFSTSFYLISIFLHLVKIPTHRHIIGKPCPKPHRLNHMGVCSCGLYKHPGVPVKWKR

SEQ ID NO: 3668 - protein, 490 aa, Artificial Sequence
  derived and/or modified protein sequence (wt) from LASV(Lassa virus/H.sapiens-wt/NGA/2016/ISTH_1604;Clade II)__AVO03541__GPCstabilized
MGQIVTFFQEVPHVIEEIMNIVLITLSLLAILKGVYNLATCGLIGLITFLFLCGRSCSMTYKGSYQLETLELNMETLNMTMPLSCTKNTSHHYIRVGNETGLELTLTNTSIINHKFCNLSDAHKKNLYDHSLMSIVSTFHLSIPNFNQYEAMSCDFNGGKISIQYNLSHAYAGDAAKHCGTLANGVLQTFMRMAWGGSYIALDSGCGNWDCIMTSYQYLIIQNTTWEDHCQFSRPSPIGYLGLLSQRTREIYISRRRRGTFTWTLSDSEGNEAPGGYCLTRWMLIEAELKCFGNAAVAKCNEKHDEEFCDMLRLFDFNKQAIQRLKTPAQMSIQLINKAVNALINDQLIMKNHLRDIMCIPYCNYSKYWYLNHTTTGRTSLPRCWLVSNGSYLNETHFSDDIEQQADNMITEMLQKEYIDRQGKTPLGLVDLFVFSTSFYLISIFLHLVKIPTHRHIVGKSCPKPHRLNHMGICSCGLYKQPGVPVRWKR

SEQ ID NO: 3669 - protein, 490 aa, Artificial Sequence
  derived and/or modified protein sequence (wt) from LASV(Lassa virus/H.sapiens-wt/NGA/2016/ISTH_1609;Clade II)__AVO03661__GPCstabilized
MGQIVTFFQEIPHVIEEVMNIVLITLSLLAVLKGIYNFATCGLIGLITFLFLCGRSCSTIYKGSYQLQKLELNMETLNMTMPLSCTKNSSHHYIRVGNETGLELTLTNTSIISHKFCNLSDAHKKNLYDHALMSIISTFHLSIPNFNQYEAMSCDFNGGKISVQYNLSHSYAGDAARHCGTLANGVLQTFMRMAWGGSYIALDSGCGNWDCIMTSYQFLIIQNTTWEDHCQFSRPSPMGYLGLLSQRTRDIYISRRRRGTFTWTLSDSEGKETPGGYCLTRWMLIEAELKCFGNTAVAKCNEKHDEEFCDMLRLFDFNKQAIQRLKTPAQMSIQLINKAVNALINDQLIMKNHLRDIMCIPYCNYSQYWYLNHTITGKTSLPKCWLVSNGSYLNETHFSDDIEQQADNMITEMLQKEYIDRQGKTPLGLVDLFVFSTSFYLISIFLHLIKIPTHRHIVGKSCPKPHRLNRMGICSCGLYKQPGVPVKWKR

SEQ ID NO: 3670 - protein, 490 aa, Artificial Sequence
  derived and/or modified protein sequence (wt) from LASV(Lassa virus/H.sapiens-wt/NGA/2016/ISTH_1610;Clade II)__AVO03603__GPCstabilized
MGQIITFFQEVPHVIEEVMNIVLIALSLLAILKGIYNVATCGLFGLVSFLFLCGRSCSTTYKGVYELQTLELDMASLNMTMPLSCTKNNSHHYIMVGNETGLELTLTNTSIINHKFCNLSDAHKKNLYDHALMSIISTFHLSIPNFNQYEAMSCDFNGGKISVQYNLSHTYAIDAANHCGTIANGVLQTFMRMAWGGSYIALDSGCGSWDCIMTSYQYLIIQNTTWEDHCQFSRPSPIGYLGLLSQRTRDIYISRRRRGTFTWTLSDSEGNETPGGYCLTRWMLIEAELKCFGNTAVAKCNEKHDEEFCDMLRLFDFNKQAIRRLKAPAQMNIQLINKAVNALINDQLIMKNHLRDIMCIPYCNYSKYWYLNHTVTGRTSLPRCWLVSNGSYLNETHFSDDIEQQADNMITELLQKEYMDRQGKTPLGLVDLFVFSTSFYLISIFLHLIKIPTHRHIVGKPCPKPHRLNHMGICSCGLYKHPGVPVKWKR

SEQ ID NO: 3671 - protein, 490 aa, Artificial Sequence
  derived and/or modified protein sequence (wt) from LASV(Lassa virus/H.sapiens-wt/NGA/2018/ISTH_0959;Clade II)__AVV65099__GPCstabilized
MGQIITFFQEVPHVIEEVMNIVLIALSLLAILKGIYNVVTCGLFGLVSFLLLCGRSCSTTYKGVYELQTLELDMASLNMTMPLSCTKNNSHHYIMVGNETGLELTLTNTSIINHKFCNLSDAHKKNLYDHALMSIISTFHLSIPNFNQYEAMSCDFNGGKISVQYNLSHAYAIDAANHCGTIANGVLQTFMRMAWGGSYIALDSGCGSWDCIMTSYQYLIIQNTTWEDHCQFSRPSPIGYLGLLSQRTRDIYISRRRRGTFTWTLSDSEGNETPGGYCLTRWMLIEAELKCFGNTAVAKCNEKHDEEFCDMLRLFDFNKQAIRRLKTPAQMSIQLINKAVNALINDQLIMKNHLRDIMCIPYCNYSKYWYLNHTVTGKTSLPRCWLVSNGSYLNETHFSDDIEQQADNMITELLQKEYIDRQGKTPLGLVDLFVFSTSFYLISIFLHLVKIPTHRHVIGKPCPKPHRLNHMGICSCGLYKHPGVPVKWKR

SEQ ID NO: 3672 - protein, 490 aa, Artificial Sequence
  derived and/or modified protein sequence (wt) from LASV(Lassa virus/H.sapiens-wt/NGA/2018/ISTH_1024;Clade II)__AVV65105__GPCstabilized
MGQIITFFQEVPHVIEEVMNIVLIALSLLAILKGVYNVATCGLFGLVSFLLLCGRSCSTTYKGVYELQTLELDMANLNMTMPLSCTKNNSHHYIRVGNETGLELTLTNTSIINHKFCNLSDAHKNNLYDHALMSIISTFHLSIPNFNQYEAMSCDFNGGKISVQYNLSHAYAVDAANHCGTIANGVLQTFMRMAWGGSYIALDSGCGSWDCIMTSYQYLIIQNTTWEDHCQFSRPSPIGYLGLLSQRTRDIYISRRRRGTFTWTLSDSEGNETPGGYCLTRWMLIEAELKCFGNTAVAKCNEKHDEEFCDMLRLFDFNKQAIRRLKTPAQMSIQLINKAVNALINDQLIMKNHLRDIMCIPYCNYSKYWYLNHTVTGKTSLPRCWLVSNGTYLNETHFSDDIEQQADNMITELLQKEYMDRQGKTPLGLVDLFVFSTSFYLISIFLHLVKIPTHRHVIGKPCPKPHRLNHMGICSCGLYKHPGVPVKWKR

SEQ ID NO: 3673 - protein, 490 aa, Artificial Sequence
  derived and/or modified protein sequence (wt) from LASV(Lassa virus/H.sapiens-wt/NGA/2018/ISTH_1079;Clade II)__AVV65107__GPCstabilized
MGQIITFFQEVPHVIEEVMNIVLIALSLLAILKGIYNVATCGLFGLVAFLLLCGRSCSTTYKGVYELQTLELDMASLNMTMPLSCTKNNSHHYIMVGNETGLELTLTNTSIINHKFCNLSDAHKKNLYDHALMSIISTFHLSIPNFNQYEAMSCDFNGGKISVQYNLSHTYAVDAANHCGTIANGVLQTFMRMAWGGSYIALDSGCGSWDCIMTSYQYLIIQNTTWEDHCQFSRPSPIGYLGLLSQRTRDIYISRRRRGTFTWTLSDSEGNETPGGYCLTRWMLIEAELKCFGNTAVAKCNEKHDEEFCDMLRLFDFNKQAIRRLKTPAQMSIQLINKAVNALINDQLIMKNHLRDIMCIPYCNYSKYWYLNHTVTGRTSLPRCWLVSNGSYLNETHFSDDIEQQADNMITELLQKEYMDRQGKTPLGLVDLFVFSTSFYLISIFLHLIKIPTHRHVIGKPCPKPHRLNHMGICSCGLYKHPGVPVKWKR

SEQ ID NO: 3674 - protein, 490 aa, Artificial Sequence
  derived and/or modified protein sequence (wt) from LASV(Lassa virus/H.sapiens-wt/NGA/2018/ISTH_1177;Clade II)__AVV65101__GPCstabilized
MGQIITFFQEVPHVIEEVMNIVLIALSLLAILKGIYNVATCGLFGLVSFLLLCGRSCSTTYKGVYELQTLELDMASLNMTMPLSCTKNNSHHYIRVGNETGLELTLTNTSIIDHKFCNLSDAHKKNLYDHALMSIISTFHLSIPNFNQYEAMSCDFNGGKISVQYNLSHTYAVDAANHCGTIANGVLQTFMRMAWGGSYIALDSGCGSWDCIMTSYQYLIIQNTTWEDHCQFSRPSPIGYLGLLSQRTRDIYISRRRRGTFTWTLSDSEGNETPGGYCLTRWMLIEAELKCFGNTAVAKCNEKHDEEFCDMLRLFDFNKQAIRRLKTPAQMSIQLINKAVNALINDQLIMKNHLRDIMCIPYCNYSKYWYLNHTITGRTSLPRCWLVSNGSYLNETHFSDDIEQQADNMITELLQKEYMDRQGKTPLGLVDLFVFSTSFYLISIFLHLVKIPTHRHVIGKPCPKPHRLNHMGICSCGLYKHPGVPVKWKR

SEQ ID NO: 3675 - protein, 490 aa, Artificial Sequence
  derived and/or modified protein sequence (wt) from LASV(Lassa virus/H.sapiens-wt/NGA/2018/ISTH_1375;Clade II)__AVV65115__GPCstabilized
MGQIITFFQEVPHVIEEVMNIVLIALSLLAILKGIYNIATCGLFGLVSFLLLCGRSCSTTYKGVYELQTLELDMASLNMTMPLSCTKNNSHHYIMVGNETGLELTLTNTSIINHRFCNLSDAHKKNLYDHALMSIISTFHLSIPNFNQYEAMSCDFNGGKISVQYNLSHAYAVDAANHCGTIANGVLQTFMRMAWGGSYIALDSGCGSWDCIMTSYQYLIIQNTTWEDHCQFSRPSPIGYLGLLSQRTRDIYISRRRRGTFTWTLSDSEGNETPGGYCLTRWMLIEAELKCFGNTAVAKCNEKHDEEFCDMLRLFDFNKQAIRRLKTPAQMSIQLINKAVNALINDQLIMKNHLRDIMCIPYCNYSKYWYLNHTVTGKTSLPRCWLVSNGSYLNETHFSDDIEQQADNMITELLQKEYIDRQGKTPLGLVDLFVFSTSFYLISIFLHLVKIPTHRHVIGKPCPKPHRLNHMGICSCGLYKHPGVPVKWKR

SEQ ID NO: 3676 - protein, 490 aa, Artificial Sequence
  derived and/or modified protein sequence (wt) from LASV(Lassa virus/H.sapiens-wt/NGA/2018/ISTH_1381;Clade II)__AVV65111__GPCstabilized
MGQIVTFFQEVPHVIEEVMNIVLIALSLLAILKGIYNVATCGLFGLVSFLLLCGRSCSTTYKGVYELQTLELDMASLNMTMPLSCTKNNSHHYIMVGNETGLELTLTNTSIINHKFCNLSDAHKKNLYDHALMSIISTFHLSIPNFNQYEAMSCDFNGGKISVQYNLSHTYAVDAANHCGTIANGVLQTFMRMAWGGSYIALDSGCGSWDCIMTSYQYLIIQNTTWEDHCQFSRPSPIGYLGLLSQRTRDIYISRRRRGTFTWTLSDSEGNETPGGYCLTRWMLIEAELKCFGNTAVAKCNEKHDEEFCDMLRLFDFNKQAIRRLKTPAQMSIQLINKAVNALINDQLIMKNHLRDIMCIPYCNYSKYWYLNHTVTGKTSLPRCWLVSNGSYLNETHFSDDIEQQADNMITELLQKEYMDRQGKTPLGLVDLFVFSTSFYLISIFLHLVKIPTHRHVVGKPCPKPHRLNHMGICSCGLYKHPGVPVRWKR

SEQ ID NO: 3677 - protein, 490 aa, Artificial Sequence
  derived and/or modified protein sequence (wt) from LASV(Lassa virus/H.sapiens-wt/NGA/2018/ISTH_1643;Clade II)__AVV65119__GPCstabilized
MGQIITFFQEVPHVIEEVMNIVLIALSLLAILKGIYNVATCGLFGLVSFLLLCGRSCSTTYKGVYELQTLELDMASLNMTMPLSCTKNNSHHYIMVGNETGLELTLTNTSIINHKFCNLSDAHKKNLYDHALMSIISTFHLSIPNFNQYEAMSCDFNGGKISVQYNLSHTYAVDAANHCGTIANGVLQTFMRMAWGGSYIALDSGCGSWDCIMTSYQYLIIQNTSWEDHCQFSRPSPIGYLGLLSQRTRDIYISRRRRGTFTWTLSDSEGNETPGGYCLTRWMLIEAELKCFGNTAVAKCNEKHDEEFCDMLRLFDFNKQAIRRLKTPAQMSIQLINKAVNALINDQLIMKNHLRDIMCIPYCNYSKYWYLNHTVTGKTSLPRCWLVSNGTYLNETHFSDDIEQQADNMITELLQKEYIDRQGKTPLGLVDLFVFSTSFYLISIFLHLVKIPTHRHVIGKPCPKPHRLNHMGICSCGLYKHPGVPVKWKR

SEQ ID NO: 3678 - protein, 490 aa, Artificial Sequence
  derived and/or modified protein sequence (wt) from LASV(LASV003-NIG-2008;Clade II)__AIT17580__GPCstabilized
MGQIITFFQEVPHVIEEVMNIVLIALSLLAILKGIYNVATCGLFGLVSFLLLCGRSCSTTYKGVYELQTLELDMASLNMTMPLSCTKNNSHHYIMVGNETGLELTLTNTSIINHKFCNLSDAHKKNLYDHALMSIISTFHLSIPNFNQYEAMSCDFNGGKISVQYNLSHTYAVDAANHCGTIANGVLQTFMRMAWGGSYIALDSGCGSWDCIMTSYQYLIIQNTTWEDHCQFSRPSPIGYLGLLSQRTRDIYISRRRRGTFTWTLSDSESNETPGGYCLTRWMLIEAELKCFGNTAVAKCNEKHDEEFCDMLRLFDFNKQAIRRLKAPAQMSIQLINKAVNALINDQLIMKNHLRDIMCIPYCNYSKYWYLNHTVTGRTSLPRCWLVSNGSYLNETHFSDDIEQQADNMITELLQKEYMDRQGKTPLGLVDLFVFSTSFYLISIFLHLVKIPTHRHVIGKPCPKPHRLNHMGICSCGLYKHPGVPVKWKR

SEQ ID NO: 3679 - protein, 490 aa, Artificial Sequence
  derived and/or modified protein sequence (wt) from LASV(LASV006-NIG-2008;Clade II)__AIT17584__GPCstabilized
MGQIITFFQEVPQVIEEVMNIVLIALSLLAILKGIYNVATCGLFGLVSFLLLCGRSCSTTYKGVYELQTLELDMASLNMTMPLSCTKNNSHHYIMVGNETGLELTLTNQSIINHKFCNLSDAHKKNLYDHALMSIISTFHLSIPNFNQYEAMSCDFNGGKISVQYNLSHSFAVDAANHCGTIANGVLQTFMRMAWGGSYIALDSGCGSWDCIMTSYQYLIIQNTTWEDHCQFSRPSPIGYLGLLSQRTRDIYISRRRRGTFTWTLSDSEGNETPGGYCLTRWMLIEAELKCFGNTAVAKCNEKHDEEFCDMLRLFDFNKQAIRRLKTPAQMSIQLINKAVNALINDQLIMKNHLRDIMCIPYCNYSKYWYLNHTKTGKTSLPRCWLVSNGSYLNETHFSDDIEQQADNMITELLQKEYMDRQGKTPLGLVDLFVFSTSFYLISIFLHLVKIPTHRHVIGKPCPKPHRLNHMGICSCGLYKHPGVPVKWKR

SEQ ID NO: 3680 - protein, 490 aa, Artificial Sequence
  derived and/or modified protein sequence (wt) from LASV(LASV035-NIG-2009;Clade II)__AIT17588__GPCstabilized
MGQIITFFQEVPHVIEEVMNIVLIALSLLAILKGIYNVATCGLFGLVSFLLLCGRSCSTTYKGVYELQTLELDMASLNMTMPLSCTKNNSHHYIMVGNETGLELTLTNTSIINHKFCNLSDAHKKNLYDHALMSIISTFHLSIPNFNQYEAMSCDFNGGKISVQYNLSHAYAVDAANHCGTIANGVLQTFMRMAWGGSYIALDSGCGSWDCIMTSYQYLIIQNTTWEDHCQFSRPSPIGYLGLLSQRTRDIYISRRRRGTFTWTLSDSEGNETPGGYCLTRWMLIEAELKCFGNTAVAKCNEKHDEEFCDMLRLFDFNKQAIRRLKAPAQMSIQLINKAVNALINDQLIMKNHLRDIMCIPYCNYSKYWYLNHTVTGKTSLPRCWLVSNGSYLNETHFSDDIEQQADNMITELLQKEYIDRQGKTPLGLVDLFVFSTSFYLISIFLHLVKIPTHRHVIGKPCPKPHRLNHMGICSCGLYKHPGVPVKWKR

SEQ ID NO: 3681 - protein, 490 aa, Artificial Sequence
  derived and/or modified protein sequence (wt) from LASV(LASV042-NIG-2009;Clade II)__AIT17592__GPCstabilized
MGQIITFFQEVPHVIEEVMNIVLIALSLLAILKGIYNVATCGLFGLVSFLLLCGRSCSTTYKGVYELQTLELDMASLNMTMPLSCTKNNSHHYIMVGNETGLELTLTNTSIINHKFCNLSDAHKKNLYDHTLMSIISTFHLSIPNFNQYEAMSCDFNGGRISVQYNLSHAYAVDAANHCGTIANGVLQTFMRMAWGGSYIALDSGCGSWDCIMTSYQYLIIQNTTWEDHCQFSRPSPIGYLGLLSQRTRDIYISRRRRGTFTWTLSDSEGNETPGGYCLTRWMLIEAELKCFGNTAVAKCNEKHDEEFCDMLRLFDFNKQAIRRLKTPAQMSIQLINKAVNALINDQLIMKNHLRDIMCIPYCNYSKYWYLNHTITGKTSLPRCWLVSNGSYLNETHFSDDIEQQADNMITELLQKEYIDRQGKTPLGLVDLFVFSTSFYLISIFLHLVKIPTHRHVVGKPCPKPHRLNHMGICSCGLYKHPGVPVKWKR

SEQ ID NO: 3682 - protein, 490 aa, Artificial Sequence
  derived and/or modified protein sequence (wt) from LASV(LASV045-NIG-2009;Clade II)__AIT17596__GPCstabilized
MGQIITFFQEVPHVIEEVMNIVLIALSLLAILKGIYNVATCGLFGLVSFLLLCGRSCSTTYKGVYELQTLELDMASLNMTMPLSCTKNNSHHYIMVGNETGLELTLTNTSIINHKFCNLSDAHKKNLYDHALMSIISTFHLSIPNFNQYEAMSCDFNGGKISVQYNLSHTYAVDAANHCGTIANGVLQTFMRMAWGGSYIALDSGCGSWDCIMTSYQYLIIQNTSWEDHCQFSRPSPIGYLGLLSQRTRDIYISRRRRGTFTWTLSDSEGNETPGGYCLTRWMLIEAELKCFGNTAVAKCNEKHDEEFCDMLRLFDFNKQAIRRLKTPAQMSIQLINKAVNALINDQLIMKNHLRDIMCIPYCNYSKYWYLNHTVTGKTSLPRCWLVSNGSYLNETHFSDDIEQQADNMITELLQKEYIDRQGKTPLGLVDLFVFSTSFYLISIFLHLVKIPTHRHVIGKPCPKPHRLNHMGICSCGLYKHPGVPVKWKR

SEQ ID NO: 3683 - protein, 490 aa, Artificial Sequence
  derived and/or modified protein sequence (wt) from LASV(LASV046-NIG-2009;Clade II)__AIT17600__GPCstabilized
MGQIITFFQEVPHVIEEVMNIVLIALSLLAILKGIYNVATCGLFGLVSFLLLCGRSCSTTYKGVYELQTLELDMASLNMTMPLSCTKNNSHHYIMVGNETGLELTLTNTSIINHKFCNLSDAHKKNLYDHALMSIISTFHLSIPNFNQYEAMSCDFNGGKISVQYNLSHAYAGDAANHCGTIANGVLQTFMRMAWGGSYIALDSGCGSWDCIMTSYQYLIIQNTTWEDHCQFSRPSPIGYLGLLSQRTRDIYISRRRRGTFTWTLSDSEGNETPGGYCLTRWMLIEAELKCFGNTAVAKCNEKHDEEFCDMLRLFDFNKQAIRRLKTPAQMSIQLINKAVNALINDQLIMKNHLRDIMCIPYCNYSKYWYLNHTVTGKTSLPRCWLVSNGSYLNETHFSDDIEQQADNMITELLQKEYIDRQGKTPLGLVDLFVFSTSFYLISIFLHLVKIPTHRHVIGKPCPKPHRLNHMGICSCGLYKHPGVPVKWKR

SEQ ID NO: 3684 - protein, 490 aa, Artificial Sequence
  derived and/or modified protein sequence (wt) from LASV(LASV049-NIG-2009;Clade II)__AIT17604__GPCstabilized
MGQIITFFQEVPHVIEEVMNIVLIALSLLAILKGIYNVATCGLFGLVSFLLLCGRSCSTTYKGVYELQTLELDMTSLNMTMPLSCTKNNSHHYIMVGNETGLELTLTNTSIINHKFCNLSDAHKKDLYDHALMSIISTFHLSIPNFNQYEAMSCDFNGGKISVQYNLSHTYAVDAAKHCGTIANGVLQTFMRMAWGGSYIALDSGCGSWDCIMTSYQYLIIQNTTWEDHCQFSRPSPVGYLGLLSQRTRDIYISRRRRGTFTWTLSDSEGNETPGGYCLTRWMLIEAELKCFGNTAVAKCNEKHDEEFCDMLRLFDFNKQAIRRLKTPAQMSIQLINKAVNALINDQLIMKNHLRDIMCIPYCNYSKYWYLNHTVTGKTSLPRCWLVSNGSYLNETHFSDDIEQQADNMITELLQKEYLDRQGKTPLGLVDLFVFSTSFYLISIFLHLVKIPTHRHVIGKPCPKPHRLNHMGICSCGLYKHPGVPVKWKR

SEQ ID NO: 3685 - protein, 490 aa, Artificial Sequence
  derived and/or modified protein sequence (wt) from LASV(LASV052-NIG-2008;Clade II)__AIT17608__GPCstabilized
MGQIITFFQEVPHVIEEVMNIVLIALSLLAILKGIYNVATCGLFGLVSFLLLCGRSCSTTYKGVYELQTLELDMASLNMTMPLSCTKNNSHHYIMVGNETGLELTLTNTSIINHKFCNLSDAHKRNLYNHALMSIISTFHLSIPNFNQYEAMSCDFNGGKISVQYNLSHTYAVDAANHCGTIANGVLQTFMRMAWGGSYIALDSGCGSWDCIMTSYQYLIIQNTTWEDHCQFSRPSPIGYLGLLSQRTRDIYISRRRRGTFTWTLSDSEGNETPGGYCLTRWMLIEAELKCFGNTAVAKCNEKHDEEFCDMLRLFDFNKQAIRRLKTPAQMSIQLINKAVNALINDQLIMKNHLRDIMCIPYCNYSKYWYLNHTVTGKTSLPRCWLVSNGSYLNETHFSDDIEQQADNMITELLQKEYIDRQGKTPLGLVDLFVFSTSFYLISIFLHLVKIPTHRHIIGKPCPKPHRLNHMGICSCGLYKHPGVPVKWRR

SEQ ID NO: 3686 - protein, 490 aa, Artificial Sequence
  derived and/or modified protein sequence (wt) from LASV(LASV056-NIG-2008;Clade II)__AIT17612__GPCstabilized
MGQIITFFQEVPHVIEEVMNIVLIALSLLAILKGIYNVATCGLFGLVSFLLLCGRSCSTTYKGVYELQTLELDMASLNMTMPLSCTKNNSHHYIRVGNETGLELTLTNTSIINHKFCNLSDAHKKNLYDHSLMSIISTFHLSIPNFNQYEAMSCDFNGGKISVQYNLSHTYAVDAANHCGTIANGVLQTFMRMAWGGSYIALDSGCGNWDCIMTSYQYLIIQNTTWEDHCQFSRPSPIGYLGLLSQRTRDIYISRRRRGTFTWTLSDSEGNETPGGYCLTRWMLIEAELKCFGNTAVAKCNEKHDEEFCDMLRLFDFNKQAIRRLKTPAQMSIQLINKAVNALINDQLIMKNHLRDIMCIPYCNYSKYWYLNHTVTGKTSLPRCWLVSNGSYLNETHFSDDIEQQADNMITELLQKEYIDRQGKTPLGLVDLFVFSTSFYLISIFLHLVKIPTHRHVVGKPCPKPHRLNHMGICSCGLYKHPGVPVKWKR

SEQ ID NO: 3687 - protein, 490 aa, Artificial Sequence
  derived and/or modified protein sequence (wt) from LASV(LASV058-NIG-2008;Clade II)__AIT17616__GPCstabilized
MGQIITFFQEVPHVIEEVMNIVLIALSLLAILKGIYNVATCGLFGLVSFLLLCGRSCSTTYKGVYELQTLELDMASLNMTMPLSCTKNNSHHYIMVGNETGLELTLTNTSIINHKFCNLSDAHKKNLYDHALMSIISTFHLSIPNFNQYEAMSCDFNGGKISVQYNLSHAYAVDAANHCGTIANGVLQTFMRMAWGGSYIALDSGCGSWDCIMTSYQYLIIQNTTWEDHCQFSRPSPIGYLGLLSQRTRDIYISRRRRGTFTWTLSDSEGNETPGGYCLTRWMLIEAELKCFGNTAVAKCNEKHDEEFCDMLRLFDFNKQAIRRLKTPAQMSIQLINKAVNALINDQLIMKNHLRDIMCIPYCNYSKYWYLNHTVTGKTSLPRCWLVSNGSYLNETHFSDDIEQQADNMITELLQKEYIDRQGKTPLGLVDLFVFSTSFYLISIFLHLVKIPTHRHVIGKPCPKPHRLNHMGICSCGLYKHPGVPVKWKR

SEQ ID NO: 3688 - protein, 490 aa, Artificial Sequence
  derived and/or modified protein sequence (wt) from LASV(LASV063-NIG-2009;Clade II)__AIT17620__GPCstabilized
MGQIITFFQEVPHVIEEVMNIVLIALSLLAILKGIYNVATCGLFGLVSFLLLCGRSCSTTYKGVYELQTLELDMASLNMTMPLSCTKNNSHHYIMVGNETGLELTLTNTSIISHKFCNLSDAHKKNLYDHALMSIISTFHLSIPNFNQYEAMSCDFNGGKISVQYNLSHAYAIDAANHCGTVANGVLQTFMRMAWGGSYIALDSGCGSWDCIMTSYQYLIIQNTTWEDHCQFSRPSPIGYLGLLSQRTRDIYISRRRRGTFTWTLSDSEGNETPGGYCLTRWMLIEAELKCFGNTAVAKCNEKHDEEFCDMLRLFDFNKQAIRRLKAPAQMSIQLINKAVNALINDQLIMKNHLRDIMCIPYCNYSKYWYLNHTVTGKTSLPRCWLVSNGSYLNETHFSDDIEQQADNMITELLQKEYMDRQGKTPLGLVDLFVFSTSFYLISIFLHLVKIPTHRHVIGKPCPKPHRLNHMGICSCGLYKHPGVPVKWKR

SEQ ID NO: 3689 - protein, 490 aa, Artificial Sequence
  derived and/or modified protein sequence (wt) from LASV(LASV1000-NIG-2009;Clade II)__AIT17782__GPCstabilized
MGQIITFFQEVPHVIEEVMNIVLIALSLLAILKGIYNVATCGLFGLVSFLLLCGRSCSTTYKGVYELQTLELDMASLNMTMPLSCTKNNSHHYIMVGNETGLELTLTNTSIINHKFCNLSDAHKKNLYDHALMSIISTFHLSIPNFNQYEAMSCDFNGGKISVQYNLSHTYAVDAANHCGTIANGVLQTFMRMAWGGSYIALDSGCGSWDCIMTSYQYLIIQNTTWEDHCQFSRPSPIGYLGLLSQRTRDIYISRRRRGTFTWTLSDSEGNETPGGYCLTRWMLIEAELKCFGNTAVAKCNEKHDEEFCDMLRLFDFNKQAIKRLKTPAQMSIQLINKAVNALINDQLIMKNHLRDIMCIPYCNYSKYWYLNHTVTGKTSLPRCWLVSNGSYLNETHFSDDIEQQADNMITELLQKEYIDRQGKTPLGLVDLFVFSTSFYLISIFLHLVKIPTHRHVVGKPCPKPHRLNHMGICSCGLYKHPGVPVKWKR

SEQ ID NO: 3690 - protein, 490 aa, Artificial Sequence
  derived and/or modified protein sequence (wt) from LASV(LASV1008-NIG-2009;Clade II)__AIT17786__GPCstabilized
MGQIITFFQEVPHVIEEVMNIVLIALSLLAILKGIYNVATCGLFGLVSFLLLCGRSCSTTYKGVYELQTLELDMASLNMTMPLSCTKNNSHHYIMVGNETGLELTLTNTSIINHKFCNLSDAHKKNLYDHALMSIISTFHLSIPNFNQYEAMSCDFNGGKISVQYNLSHAYAIDAADHCGTIANGVLQTFMRMAWGGSYIALDSGCGSWDCIMTSYQYLIIQNTTWEDHCQFSRPSPIGYLGLLSQRTRDIYISRRRRGTFTWTLSDSEGNETPGGYCLTRWMLIEAELKCFGNTAVAKCNEKHDEEFCDMLRLFDFNKQAIRRLKTPAQMSIQLINKAVNALINDQLIMKNHLRDIMCIPYCNYSKYWYLNHTVTGKTSLPRCWLVSNGSYLNETHFSDDIEQQADNMITELLQKEYMDRQGKTPLGLVDLFVFSTSFYLISIFLHLVKIPTHRHITGKPCPKPHRLNHMGICSCGLYKHPGVPVKWKR

SEQ ID NO: 3691 - protein, 490 aa, Artificial Sequence
  derived and/or modified protein sequence (wt) from LASV(LASV1011-NIG-2009;Clade II)__AIT17790__GPCstabilized
MGQIITFFQEVPHVIEEVMNIVLIALSLLAILKGIYNVATCGLFGLVSFLLLCGRSCSTTYKGVYELQTLELDMASLNMTMPLSCTKNNSHHYIMVGNETGLELTLTNTSIINHKFCNLSDAHKKNLYDHALMSIISTFHLSIPNFNQYEAMSCDFNGGKISVQYNLSHTYAVDAANHCGTIANGVLQTFMRMAWGGSYIALDSGCGSWDCIMTSYQYLIIQNTTWEDHCQFSRPSPIGYLGLLSQRTRDIYISRRRRGTFTWTLSDSEGNETPGGYCLTRWMLIEAELKCFGNTAVAKCNEKHDEEFCDMLRLFDFNKQAIRRLKTPAQMSIQLINKAVNALINDQLIMKNHLRDIMCIPYCNYSKYWYLNHTVTGKTSLPRCWLVSNGSYLNETHFSDDIEQQADNMITELLQKEYMDRQGKTPLGLVDLFVFSTSFYLISIFLHLVKIPTHRHITGKPCPKPHRLNHMGICSCGLYKHPGVPVKWKR

SEQ ID NO: 3692 - protein, 490 aa, Artificial Sequence
  derived and/or modified protein sequence (wt) from LASV(LASV1016-NIG-2009;Clade II)__AIT17798__GPCstabilized
MGQIITFFQEVPHVIEEVMNIVLIALSLLAILKGIYNVATCGLFGLVSFLLLCGRSCSTTYKGVYELQTLELDMASLNMTMPLSCTKNNSHHYIMVGNETGLELTLTNTSIINHKFCNLSDAHKKNLYDHALMSIISTFHLSIPNFNQYEAMSCDFNGGKISVQYNLSHTYAVDAANHCGTIANGVLQTFMRMAWGGSYIALDSGCGSWDCIMTSYQYLIIQNTTWEDHCQFSRPSPIGYLGLLSQRTRDIYISRRRRGTFTWTLSDSEGNETPGGYCLTRWMLIEAELKCFGNTAVAKCNEKHDEEFCDMLRLFDFNKQAIMRLKTPAQMSIQLINKAVNALINDQLIMKNHLRDIMCIPYCNYSKYWYLNHTVTGKTSLPRCWLVSNGSYLNETHFSDDIEQQADNMITEMLQKEYLDRQGKTPLGLVDLFVFSTSFYLISIFLHLVKIPTHRHIIGKPCPKPHRLNHMGICSCGLYKHPGVPVKWKR

SEQ ID NO: 3693 - protein, 490 aa, Artificial Sequence; identical to SEQ ID NO: 3605
  derived and/or modified protein sequence (wt) from LASV(LASV221-NIG-2010;Clade II)__AIT17624__GPCstabilized

SEQ ID NO: 3694 - protein, 490 aa, Artificial Sequence
  derived and/or modified protein sequence (wt) from LASV(LASV224-NIG-2010;Clade II)__AIT17626__GPCstabilized
MGQIITFFQEVPHVIEEVMNIVLIALSLLAILKGVYNVATCGLFGLVSFLLLCGRSCSTTYKGVYELQTLELDMASLNMTMPLSCTKNNSHHYIMVGNETGLELTLTNTSIIQHKFCNLSDAHKKNLYDHALMSIISTFHLSIPNFNQYEAMSCDFNGGKITVQYNLSHSYAIDAANHCGTIANGVLQTFMRMAWGGSYIALDSGCGSWDCIMTSYQYLIIQNTTWEDHCQFSRPSPIGYLGLLSQRTRDIYISRRRRGTFTWTLSDSEGNETPGGYCLTRWMLIEAELKCFGNTAVAKCNEKHDEEFCDMLRLFDFNKQAIRRLKTPAQMSIQLINKAVNALINDQLIMKNHLRDIMCIPYCNYSKYWYLNHTVTGRTSLPRCWLVSNGSYLNETHFSDDIEQQADNMITELLQKEYMDRQGKTPLGLVDLFVFSTSFYLISIFLHLVKIPTHRHIIGKPCPKPHRLNHMGVCSCGLYKHPGVPVKWKR

SEQ ID NO: 3695 - protein, 490 aa, Artificial Sequence
  derived and/or modified protein sequence (wt) from LASV(LASV225-NIG-2010;Clade II)__AIT17630__GPCstabilized
MGQIITFFQEVPHVIEEVMNIVLIALSLLAILKGIYNVATCGLFGLLSFLLLCGRSCSTTYKGVYELQTLELDMASLNMTMPLSCTKNNSHHYIMVGNETGLELTLTNTSIINHKFCNLSDAHKKNLYDHALMSIISTFHLSIPNFNQYEAMSCDFNGGKISVQYNLSHAYAVDAAEHCGTIANGVLQTFMRMAWGGSYIALDSGCGSWDCVMTSYQYLIIQNTSWEDHCQFSRPSPIGYLGLLSQRTRDIYISRRRRGTFTWTLSDSEGNETPGGYCLTRWMLIEAELKCFGNTAVAKCNEKHDEEFCDMLRLFDFNKQAIRRLKTPAQMSIQLINKAVNALINDQLIMKNHLRDIMCIPYCNYSKYWYLNHTVTGKTSLPRCWLVSNGSYLNETHFSDDIEQQADNMITELLQKEYIDRQGKTPLGLVDLFVFSTSFYLISIFLHLVKIPTHRHVIGKPCPKPHRLNHMGICSCGLYKHPGVPVKWKR

SEQ ID NO: 3696 - protein, 490 aa, Artificial Sequence
  derived and/or modified protein sequence (wt) from LASV(LASV229-NIG-2010;Clade II)__AIT17634__GPCstabilized
MGQIITFFQEVPHVIEEVMNIVLIALSLLAILKGIYNVATCGLFGLVSFLLLCGRSCSTIYKDVYELQTLELDMASLNMTMPLSCTKNNSHHYIMVGNETGLELTLTNTSIINHKFCNLSDAHKKNLYDHALMSIISTFHLSIPNFNQYEAMSCDFNGGKISVQYNLSHTYAIDAANHCGTIANGVLQTFMRMAWGGSYIALDSGCGSWDCIMTSYQYLIIQNTTWEDHCQFSRPSPIGYLGLLSQRTRDIYISRRRRGTFTWTLSDSEGNETPGGYCLTRWMLIEAELKCFGNTAVAKCNEKHDEEFCDMLRLFDFNKQAIRRLKTPAQMSIQLINKAVNALINDQLIMKNHLRDIMCIPYCNYSRYWYLNHTVTGRTSLPRCWLVSNGSYLNETHFSDDIEQQADNMITELLQKEYMDRQGKTPLGLVDLFVFSTSFYLISIFLHLVKIPTHRHVIGKPCPKPHRLNHMGICSCGLYNHPGVPVKWKR

SEQ ID NO: 3697 - protein, 490 aa, Artificial Sequence
  derived and/or modified protein sequence (wt) from LASV(LASV237-NIG-2010;Clade II)__AIT17638__GPCstabilized
MGQIITFFQEVPHVIEEVMNIVLIALSLLAILKGIYNVATCGLFGLVSFLLLCGRSCSTTYKGVYELQTLELDMASLNMTMPLSCTKNNSHHYIMVGNETGLELTLTNTSIINHKFCNLSDAHKKDLYDHALMSIISTFHLSIPNFNQYEAMSCDFNGGKISVQYNLSHTYAVDAANHCGTIANGVLQTFMRMAWGGSYIALDSGCGSWDCIMTSYQYLIIQNTTWEDHCQFSRPSPIGYLGLLSQRTRDIYISRRRRGTFTWTLSDSEGNETPGGYCLTRWMLIEAELKCFGNTAVAKCNEKHDEEFCDMLRLFDFNKQAIRRLKTPAQMSIQLINKAVNALINDQLIMKNHLRDIMCIPYCNYSKYWYLNHTVTGKTSLPRCWLVSNGSYLNETHFSDDIEQQADNMITELLQKEYMDRQGKTPLGLVDLFVFSTSFYLISIFLHLIKIPTHRHITGKPCPKPHRLNHMGICSCGLYKHPGVPVKWKR

SEQ ID NO: 3698 - protein, 490 aa, Artificial Sequence
  derived and/or modified protein sequence (wt) from LASV(LASV239-NIG-2010;Clade II)__AIT17642__GPCstabilized
MGQIITFFQEVPHVIEEVMNIVLIALSLLAILKGVYNVATCGLFGLVSFLLLCGRSCSTTYKGVYELQTLELDMASLNMTMPLSCTKNNSHHYIMVGNDTGLELTLTNTSIINHKFCNLSDAHKKNLYDHALMSIISTFHLSIPNFNQYEAMSCDFNGGKISVQYNLSHAYAVDAASHCGTIANGVLQTFMRMAWGGSYIALDSGCGSWDCIMTSYQYLIIQNTTWEDHCQFSRPSPIGYLGLLSQRTRDIYISRRRRGTFTWTLSDSEGNETPGGYCLTRWMLIEAELKCFGNTAVAKCNEKHDEEFCDMLRLFDFNKQAIRRLKTPAQMSIQLINKAVNALINDQLIMKNHLRDIMCIPYCNYSKYWYLNHTVTGKTSLPRCWLVSNGSYLNETHFSDDIEQQADNMITELLQKEYMDRQGKTPLGLVDLFVFSTSFYLISIFLHLVKIPTHRHIIGKPCPKPHRLNHMGICSCGLYKHPGVPVKWKR

SEQ ID NO: 3699 - protein, 490 aa, Artificial Sequence
  derived and/or modified protein sequence (wt) from LASV(LASV241-NIG-2011;Clade II)__AIT17646__GPCstabilized
MGQIITFFQEVPHVIEEVMNIVLIALSLLAILKGIYNVATCGLFGLVSFLLLCGRSCSTTYKGVYELQTLELDMASLNMTMPLSCTKNNSHHYIMVGNETGLELTLTNTSIINHKFCNLSDAHKKNLYDHALMSIISTFHLSIPNFNQYEAMSCDFNGGKISVQYNLSHAYAVDAASHCGTVANGVLQTFMRMAWGGSYIALDSGCGSWDCIMTSYQYLIIQNTTWEDHCQFSRPSPIGYLGLLSQRTRDIYISRRRRGTFTWTLSDSEGNETPGGYCLTRWMLIEAELKCFGNTAVAKCNEKHDEEFCDMLRLFDFNKQAIRRLKTPAQMSIQLINKAVNALINDQLIMKNHLRDIMCIPYCNYSKYWYLNHTVTGKTSLPRCWLVSNGSYLNETHFSDDIEQQADNMITELLQKEYMDRQGKTPLGLVDLFVFSTSFYLISIFLHLVKIPTHRHVIGKPCPKPHRLNHMGICSCGLYKHPGVPVKWKR

SEQ ID NO: 3700 - protein, 490 aa, Artificial Sequence
  derived and/or modified protein sequence (wt) from LASV(LASV242-NIG-2010;Clade II)__AIT17650__GPCstabilized
MGQIITFFQEVPHVIEEVMNIVLIALSLLAILKGIYNVATCGLFGLVSFLLLCGRSCSTTYKGVYELQTLELDMASLNMTMPLSCTKNNSHHYIMVGNETGLELTLTNISIINHKFCNLSDAHKKNLYDHALMSIISTFHLSIPNFNQYEAMSCDFNGGKISVQYNLSHTYAVDAANHCGTIANGVLQTFMRMAWGGSYIALDSGCGSWDCIMTSYQYLIIQNTTWEDHCQFSRPSPIGYLGLLSQRTRDIYISRRRRGTFTWTLSDSEGNETPGGYCLTRWMLIEAELKCFGNTAVAKCNEKHDEEFCDMLRLFDFNKQAIRRLKAPAQMSIQLINKAVNALINDQLIMKNHLRDIMCIPYCNYSKYWYLNHTVTGRTSLPRCWLVSNGSYLNETHFSDDIEQQADNMITELLQKEYIDRQGKTPLGLVDLFVFSTSFYLISIFLHLVKIPTHRHIIGKPCPKPHRLNHMGICSCGLYKHPGVPVKWKR

SEQ ID NO: 3701 - protein, 490 aa, Artificial Sequence
  derived and/or modified protein sequence (wt) from LASV(LASV246-NIG-2010;Clade II)__AIT17658__GPCstabilized
MGQIITFFQEVPHVIEEVMNIVLIALSLLAILKGVYNVATCGLFGLVSFLLLCGRSCSITYKGVYELQTLELDMANLNMTMPLSCTKNNSHHYIMVGNETGLELTLTNTSIINHKFCNLSDAHKKNLYDHALMSIISTFHLSIPNFNQYEAMSCDFNGGKISVQYNLSHTYAGDAADHCGTIANGVLQTFMRMAWGGSYIALDSGCGSWDCIMTSYQYLIIQNTTWEDHCQFSRPSPMGYLGLLSQRTRDIYISRRRRGTFTWTLSDSEGNETPGGYCLTRWMLIEAELKCFGNTAVAKCNEKHDEEFCDMLRLFDFNKQAIRRLKTPAQMSIQLINKAVNALINDQLIMKNHLRDIMCIPYCNYSKYWYLNHTITGKTSLPRCWLVSNGSYLNETHFSDDIEQQADNMITELLQKEYIDRQGKTPLGLVDLFVFSTSFYLISIFLHLVKIPTHRHITGKPCPKPHRLNHMGICSCGLYKHPGVPVRWKR

SEQ ID NO: 3702 - protein, 490 aa, Artificial Sequence
  derived and/or modified protein sequence (wt) from LASV(LASV251-NIG-2010;Clade II)__AIT17666__GPCstabilized
MGQIVTFFQEVPHVIEEVMNIVLIALSLLAILKGIYNVATCGLFGLVSFLLLCGRSCSTTYKGVYELQTLELDMASLNMTMPLSCTKNNSHHYIMVGNETGLELTLTNTSIINHKFCNLSDAHKKNLYDHALMSIISTFHLSIPNFNQYEAMSCDFNGGKISVQYNLSHTYAVDAANHCGTIANGVLQTFMRMAWGGSYIALDSGCGSWDCIMTSYQYLIIQNTTWEDHCQFSRPSPIGYLGLLSQRTRDIYISRRRRGTFTWTLSDSEGNETPGGYCLTRWMLIEAELKCFGNTAVAKCNEKHDEEFCDMLRLFDFNKQAIRRLKTPAQMSIQLINKAVNALINDQLIMKNHLRDIMCIPYCNYSKYWYLNHTVTGKTSLPRCWLVSNGSYLNETHFSDDIEQQADNMITELLQKEYMDRQGKTPLGLVDLFVFSTSFYLISIFLHLVKIPTHRHITGKPCPKPHRLNHMGICSCGLYKHPGVPVKWKR

SEQ ID NO: 3703 - protein, 490 aa, Artificial Sequence
  derived and/or modified protein sequence (wt) from LASV(LASV253-NIG-2011;Clade II)__AIT17670__GPCstabilized
MGQIITFFQEVPHVIEEVMNIVLIALSLLAILKGIYNVATCGLFGLVSFLLLCGRSCSTTYKGVYELQTLELDMASLNMTMPLSCTKNNSHHYIMVGNETGLELTLTNTSIINHKFCNLSDAHKKNLYDHALMSIISTFHLSIPNFNQYEAMSCDFNGGKISVQYNLSHTYAVDAANHCGTIANGVLQTFMRMAWGGSYIALDSGCGSWDCIMTSYQYLIIQNTTWEDHCQFSRPSPIGYLGLLSQRTRDIYISRRRRGTFTWTLSDSEGNETPGGYCLTRWMLIEAELKCFGNTAVAKCNEKHDEEFCDMLRLFDFNKQAIRRLKAPAQMSIQLINKAVNALINDQLIMKNHLRDIMCIPYCNYSKYWYLNHTVTGRTSLPRCWLVSNGSYLNETHFSDDIEQQADNMITELLQKEYIDRQGKTPLGLVDLFVFSTSFYLISIFLHLVKIPTHRHIIGKPCPKPHRLNHMGICSCGLYKHPGVPVKWKR

SEQ ID NO: 3704 - protein, 490 aa, Artificial Sequence
  derived and/or modified protein sequence (wt) from LASV(LASV254-NIG-2011;Clade II)__AIT17674__GPCstabilized
MGQIITFFQEVPHVIEEVMNIVLIALSLLAILKGIYNVATCGLFGLVSFLLLCGRSCSTTYKGVYELQTLELDMTNLNMTMPLSCTKNNSHHYIMVGNETGLELTLTNTSIINHKFCNLSDAHKKNLYNHALMSIISTFHLSIPNFNQYEAMSCDFNGGKISVQYNLSHSYAVDAANHCGTIANGVLQTFMRMAWGGSYIALDSGCGNWDCIMTSYQYLIIQNTTWEDHCQFSRPSPIGYLGLLSQRTRDIYISRRRRGTFTWTLSDSEGNETPGGYCLTRWMLIEAELKCFGNTAVAKCNEKHDEEFCDMLRLFDFNKQAIRRLKTPAQANIQLINKAVNALINDQLIMKNHLRDIMCIPYCNYSKYWYLNHTVTGKTSLPRCWLVSNGSYLNETHFSDDIEQQADNMITELLQKEYMDRQGKTPLGLVDLFVFSTSFYLISIFLHLVKIPTHRHVIGKPCPKPHRLNHMGICSCGLYKHPGVPVKWKR

SEQ ID NO: 3705 - protein, 490 aa, Artificial Sequence
  derived and/or modified protein sequence (wt) from LASV(LASV256-NIG-2010;Clade II)__AIT17678__GPCstabilized
MGQIITFFQEVPHVIEEVMNIVLITLSLLAILKGIYNIATCGLFGLVSFLLLCGRSCSTTYKGVYELQTLELDMTSLNMTMPLSCTKNNSHHYIMVGNETGLELTLTNTSIINHKFCNLSDAHKKNLYDHALMSIISTFHLSIPNFNQYEAMSCDFNGGKISVQYNLSHTYAVDAANHCGTIANGVLQTFMRMAWGGSYIALDSGCGSWDCIMTSYQYLIIQNTTWEDHCQFSRPSPIGYLGLLSQRTRDIYISRRRRGTFTWTLSDSEGNETPGGYCLTRWMLIEAELKCFGNTAVAKCNEKHDEEFCDMLRLFDFNKQAIRRLKTPAQMSIQLINKAVNALINDQLIMKNHLRDIMCIPYCNYSKYWYLNHTVTGKTSLPRCWLVSNGSYLNETHFSDDIEQQADNMITELLQKEYIDRQGKTPLGLVDLFVFSTSFYLISIFLHLVKIPTHRHIIGKPCPKPHRLNHMGICSCGLYKHPGIPVKWKR

SEQ ID NO: 3706 - protein, 490 aa, Artificial Sequence
  derived and/or modified protein sequence (wt) from LASV(LASV267-NIG-2010;Clade II)__AIT17686__GPCstabilized
MGQIITFFQEVPHVIEEVMNIVLIALSLLAILKGIYNVATCGLFGLVSFLLLCGRSCSTTYKGVYELQTLELDMASLNMTMPLSCTKNNSHHYIMVGNETGLELTLTNTSIINHKFCNLSDAHKKNLYDHALMSIISTFHLSIPNFNQYEAMSCDFNGGKISVQYNLSHTYAVDAANHCGTIANGVLQTFMRMAWGGSYIALDSRCGSWDCIMTSYQYLIIQNTTWEDHCQFSRPSPIGYLGLLSQRTRDIYISRRRRGTFTWTLSDSEGNETPGGYCLTRWMLIEAELKCFGNTAVAKCNEKHDEEFCDMLRLFDFNKQAIRRLKTPAQMSIQLINKAVNALINDQLIMKNHLRDIMCIPYCNYSKYWYLNHTVTGKTSLPRCWLVSNGSYLNETHFSDDIEQQADNMITELLQKEYMDRQGKTPLGLVDLFVFSTSFYLISIFLHLIKIPTHRHVIGKPCPKPHRLNHMGICSCGLYKHPGVPVKWKR

SEQ ID NO: 3707 - protein, 490 aa, Artificial Sequence
  derived and/or modified protein sequence (wt) from LASV(LASV271-NIG-2010;Clade II)__AIT17690__GPCstabilized
MGQIITFFQEVPHVIEEVMNIVLIALSLLAILKGIYNVATCGLFGLVSFLLLCGRSCSTTYKGVYELQTLELDMASLNMTMPLSCTKNNSHHYIMVGNETGLELTLTNTSIINHKFCNLSDAHKKNLYDHALMSIISTFHLSIPNFNQYEAMSCDFNGGKISVQYNLSHAYAVDAASHCGTVANGVLQTFMRMAWGGSYIALDSGCGSWDCIMTSYQYLIIQNTTWEDHCQFSRPSPIGYLGLLSQRTRDIYISRRRRGTFTWTLSDSEGNETPGGYCLTRWMLIEAELKCFGNTAVAKCNEKHDEEFCDMLRLFDFNKQAIRRLKTPAQMSIQLINKAVNALINDQLIMKNHLRDIMCIPYCNYSKYWYLNHTVTGRTSLPRCWLVSNGSYLNETHFSDDIEQQADNMITELLQKEYMDRQGKTPLGLVDLFVFSTSFYLISIFLHLVKIPTHRHVIGKPCPKPHRLNHMGICSCGLYKHPGVPVKWKR

SEQ ID NO: 3708 - protein, 490 aa, Artificial Sequence
  derived and/or modified protein sequence (wt) from LASV(LASV274-NIG-2010;Clade II)__AIT17694__GPCstabilized
MGQIITFFQEVPHVIEEVMNIVLIALSLLAILKGIYNVATCGLFGLVSFLLLCGRSCSTIYKGVYELQTLELDMASLNMTMPLSCTKNNSHHYIMVGNETGLELTLTNTSIINHKFCNLSDAHKKNLYDHALMSIISTFHLSIPNFNQYEAMSCDFNGGKISVQYNLSHTYAVDAANHCGTIANGVLQTFMRMAWGGSYIALDSGCGSWDCIMTSYQYLIIQNTTWEDHCQFSRPSPIGYLGLLSQRTRDIYISRRRRGTFTWTLSDSEGNETPGGYCLTRWMLIEAELKCFGNTAVAKCNEKHDEEFCDMLRLFDFNKQAIRRLKTPAQMSIQLINKAVNALINDQLIMKNHLRDIMCIPYCNYSKYWYLNHTVTGKTSLPRCWLVSNGSYLNETHFSDDIEQQADNMITELLQKEYIDRQGKTPLGLVDLFVFSTSFYLISIFLHLVKIPTHRHVVGKPCPKPHRLNHMGICSCGLYKHPGVPVKWKR

SEQ ID NO: 3709 - protein, 490 aa, Artificial Sequence
  derived and/or modified protein sequence (wt) from LASV(LASV719-NIG-2009;Clade II)__AIT17704__GPCstabilized
MGQIITFFQEVPHVIEEVMNIVLIALSLLAILKGIYNVATCGLFGLVSFLLLCGRSCSTTYKGVYELQTLELDMASLNMTMPLSCTKNNSHHYIMVGNETGLELTLTNTSIINHKFCNLSDAHKKNLYDHALMSIISTFHLSIPNFNQYEAMSCDFNGGKISVQYNLSHTYAVDAANHCGTIANGVLQTFMRMAWGGSYIALDSGCGSWDCIMTSYQYLIIQNTTWEDHCQFSRPSPIGYLGLLSQRTRDIYISRRRRGTFTWTLSDSEGNETPGGYCLTRWMLIEAELKCFGNTAVAKCNEKHDEEFCDMLRLFDFNKQAIRRLKTPAQMSIQLINKAVNALINDQLIMKNHLRDIMCIPYCNYSKYWYLNHTVTGKTSLPRCWLVSNGSYLNETHFSDDIEQQADNMITELLQKEYIDRQGKTPLGLVDLFVFSTSFYLISIFLHLVKIPTHRHVIGKPCPKPHRLNHMGICSCGLYKHPGVPVKWKR

SEQ ID NO: 3710 - protein, 490 aa, Artificial Sequence
  derived and/or modified protein sequence (wt) from LASV(LASV738-NIG-2009;Clade II)__AIT17712__GPCstabilized
MGQIITFFQEVPHVIEEVMNIVLIALSLLAILKGIYNVATCGLFGLVSFLLLCGRSCSTTYKGVYELQTLELDMASLNMTMPLSCTKNNSHHYIMVGNETGLELTLTNTSIINHKFCNLSDAHKKNLYDHALMSIISTFHLSIPNFNQYEAMSCDFNGGKISVQYNLSHTYAVDAANHCGTIANGVLQTFMRMAWGGSYIALDSGCGAWDCIMTSYQYLIIQNTTWEDHCQFSRPSPIGYLGLLSQRTRDIYISRRRRGTFTWTLSDSEGNETPGGYCLTRWMLIEAELKCFGNTAVAKCNEKHDEEFCDMLRLFDFNKQAIMRLKTPAQMSIQLINKAVNALINDQLIMKNHLRDIMCIPYCNYSKYWYLNHTVTGKTSLPRCWLVSNGSYLNETHFSDDIEQQADNMITEMLQKEYIDRQGKTPLGLVDLFVFSTSFYLISIFLHLVKIPTHRHVIGKPCPKPHRLNHMGICSCGLYKHPGVPVRWKR

SEQ ID NO: 3711 - protein, 490 aa, Artificial Sequence
  derived and/or modified protein sequence (wt) from LASV(LASV966-NIG-2009;Clade II)__AIT17718__GPCstabilized
MGQIITFFQEVPHVIEEVMNIVLIALSLLAILKGIYNVATCGLFGLVSFLLLCGRSCSTTYKGVYELQTLELDMASLNMTMPLSCTKNNSHHYIRVGNETGLELTLTNASIINHKFCNLSDAHKKNLYDHALMSIISTFHLSIPNFNQYEAMSCDFNGGKISVQYNLSHAYAIDAANHCGTVANGVLQTFMRMAWGGSYIALDSGCGNWDCIMTSYQYLIIQNTTWEDHCQFSRPSPIGYLGLLSQRTRDIYISRRRRGTFTWTLSDSEGNETPGGYCLTRWMLIEAELKCFGNTAVAKCNEKHDEEFCDMLRLFDFNKQAIRRLKTPAQMSIQLINKAVNALINDQLIMKNHLRDIMCIPYCNYSKYWYLNHTVTGKTSLPRCWLVSNGSYLNETHFSDDIEQQADNMITELLQKEYMDRQGKTPLGLVDLFVFSTSFYLISIFLHLVKIPTHRHVIGKPCPKPHRLNHMGICSCGFYKHPGVPVKWKR

SEQ ID NO: 3712 - protein, 490 aa, Artificial Sequence
  derived and/or modified protein sequence (wt) from LASV(LASV969-NIG-2009;Clade II)__AIT17724__GPCstabilized
MGQIITFFQEVPHVIEEVMNIVLIALSLLAILKGIYNVATCGLFGLVSFLLLCGRSCSTTYKGVYELQTLELDMANLNMTMPLSCTKNNSHHYIMVGNETGLELTLTNTSIINHKFCNLSDAHKKNLYDHALMSIISTFHLSIPNFNQYEAMSCDFNGGKISVQYNLSHTYAVDAANHCGTVANGVLQTFMRMAWGGSYIALDSGCGSWDCIMTSYQYLIIQNTTWEDHCQFSRPSPIGYLGLLSQRTRDIYISRRRRGTFTWTLSDSEGNETPGGYCLTRWMLIEAELKCFGNTAVAKCNEKHDEEFCDMLRLFDFNKQAIRRLKTPAQMSIQLINKAVNALINDQLIMKNHLRDIMCIPYCNYSKYWYLNHTVTGKTSLPRCWLVSNGSYLNETHFSDDIEQQADNMITELLQKEYMDRQGKTPLGLVDLFVFSTSFYLISIFLHLVKIPTHRHIMGKPCPKPHRLNHMGICSCGLYKHPGVPVKWKR

SEQ ID NO: 3713 - protein, 490 aa, Artificial Sequence
  derived and/or modified protein sequence (wt) from LASV(LASV971-NIG-2009;Clade II)__AIT17728__GPCstabilized
MGQIITFFQEVPHVIEEVMNIVLIALSLLAILKGIYNVATCGLFGLVSFLLLCGRSCSTTYKGVYELQTLELDMGSLNMTMPLSCTKNNSHHYIMVGNETGLELTLTNTSIINHKFCNLSDAHKKNLYDHALMSIISTFHLSIPNFNQYEAMSCDFNGGKISVQYNLSHTYAVDAANHCGTIANGVLQTFMRMAWGGSYIALDSGCGSWDCIMTSYQYLIIQNTTWEDHCQFSRPSPIGYLGLLSQRTRDIYISRRRRGTFTWTLSDSEGNETPGGYCLTRWMLIEAELKCFGNTAVAKCNEKHDEEFCDMLRLFDFNKQAIRRLKTPAQMSIQLINKAVNALINDQLIMKNHLRDIMCIPYCNYSKYWYLNHTVTGKTSLPRCWLVSNGSYLNETHFSDDIEQQADNMITELLQKEYMDRQGKTPLGLVDLFVFSTSFYLISIFLHLVKIPTHRHVIGKPCPKPHRLNHMGICSCGLYKHPGVPVKWKR

SEQ ID NO: 3714 - protein, 490 aa, Artificial Sequence
  derived and/or modified protein sequence (wt) from LASV(LASV975-NIG-2009;Clade II)__AIT17732__GPCstabilized
MGQIITFFQEVPHVIEEVMNIVLIALSLLAILKGIYNVATCGLFGLVSFLLLCGRSCSTTYKGVYELQTLELDMASLNMTMPLSCTKNNSHHYIMVGNETGLELTLTNTSIINHKFCNLSDAHKKNLYDHALMSIISTFHLSIPNFNQYEAMSCDFNGGKISVQYNLSHTYAVDAANHCGTIANGVLQTFMRMAWGGSYIALDSGCGSWDCIMTSYQYLIIQNTTWEDHCQFSRPSPIGYLGLLSQRTRDIYISRRRRGTFTWTLSDSEGNETPGGYCLTRWMLIEAELKCFGNTAVAKCNEKHDEEFCDMLRLFDFNKQAIRRLKTPAQMSIQLINKAVNALINDQLIMKNHLRDIMCIPYCNYSKYWYLNHTVTGKTSLPRCWLVSNGSYLNETHFSDDIEQQADNMITELLQKEYIDRQGKTPLGLVDLFVFSTSFYLISIFLHLVKIPTHRHIVGKPCPKPHRLNHMGICSCGLYKHPGVPVKWKR

SEQ ID NO: 3715 - protein, 490 aa, Artificial Sequence
  derived and/or modified protein sequence (wt) from LASV(LASV976-NIG-2009;Clade II)__AIT17736__GPCstabilized
MGQIVTFFQEVPHVIEEVMNIVLIALSLLAILKGIYNVATCGLFGLVSFLLLCGRSCSTTYKGVYELQTLELDMASLNMTMPLSCTKNNSHHYIMVGNETGLELTLTNTSIINHKFCNLSDAHKKDLYDHALMSIISTFHLSIPNFNQYEAMSCDFNGGKISVQYNLSHTYAVDAANHCGTIANGVLQTFMRMAWGGSYIALDSGCGSWDCIMTSYQYLIIQNTTWEDHCQFSRPSPIGYLGLLSQRTRDIYISRRRRGTFTWTLSDSEGNETPGGYCLTRWMLIEAELKCFGNTAVAKCNEKHDEEFCDMLRLFDFNKQAIMRLKTPAQMSIQLINKAVNALINDQLIMKNHLRDIMCIPYCNYSKYWYLNHTVTGKTSLPRCWLVSNGSYLNETRFSDDIEQQADNMITEMLQKEYLDRQGKTPLGLVDLFVFSTSFYLISIFLHLVKIPTHRHIIGKPCPKPHRLNHMGICSCGLYKHPGVPVKWKR

SEQ ID NO: 3716 - protein, 490 aa, Artificial Sequence
  derived and/or modified protein sequence (wt) from LASV(LASV978-NIG-2009;Clade II)__AIT17744__GPCstabilized
MGQIITFFQEVPHVIEEVMNIVLIALSLLAILKGIYNVATCGLFGLMSFLLLCGRSCSTTYKGVYELQTLELDMANLNMTMPLSCTKNNSHHYIMVGNETGLELTLTNTSIINHKFCNLSDAHKKNLYDHALMSIISTFHLSIPNFNQYEAMSCDFNGGKISVQYNLSHAYAVDAANHCGTIANGVLQTFMRMAWGGSYIALDSGCGSWDCIMTSYQYLIIQNTSWEDHCQFSRPSPIGYLGLLSQRTRDIYISRRRRGTFTWTLSDSEGNETPGGYCLTRWMLIEAELKCFGNTAVAKCNEKHDEEFCDMLRLFDFNKQAIRRLKTPAQMSIQLINKAVNALINDQLIMKNHLRDIMCIPYCNYSKYWYLNHTVTGKTSLPRCWLVSNGSYLNETHFSDDIEQQADNMITELLQKEYIDRQGKTPLGLVDLFVFSTSFYLISIFLHLVKIPTHRHVIGKPCPKPHRLNHMGICSCGLYKHPGVPVKWKR

SEQ ID NO: 3717 - protein, 490 aa, Artificial Sequence
  derived and/or modified protein sequence (wt) from LASV(LASV981-NIG-2009;Clade II)__AIT17752__GPCstabilized
MGQIITFFHEVPHVIEEVMNIVLIALSLLAILKGIYNVATCGLFGLVSFLLLCGRSCSTTYKGVYELQTLELDMASLNMTMPLSCTKNNSHHYIMVGNETGLELTLTNTSIINHKFCNLSDAHKKNLYDHALMSIISTFHLSIPNFNQYEAMSCDFNGGKISVQYNLSHTYAIDAANHCGTIANGVLQTFMRMAWGGSYIALDSGCGSWDCIMTSYQYLIIQNTTWEDHCQFSRPSPIGYLGLLSQRTRDIYISRRRRGTFTWTLSDSEGNETPGGYCLTRWMLIEAELKCFGNTAVAKCNEKHDEEFCDMLRLFDFNKQAIRRLKTPAQMSIQLINKAVNALINDQLIMKNHLRDIMCIPYCNYSKYWYLNHTVTGKTSLPRCWLVSNGSYLNETHFSDDIEQQADNMITELLQKEYIDRQGKTPLGLVDLFVFSTSFYLISIFLHLVKIPTHRHVIGKPCPKPHRLNHMGICSCGLYKHPGVPVKWKR

SEQ ID NO: 3718 - protein, 490 aa, Artificial Sequence
  derived and/or modified protein sequence (wt) from LASV(LASV982-NIG-2009;Clade II)__AIT17756__GPCstabilized
MGQIITFFQEVPHVIEEVMNIVLIALSLLAILKGIYNVATCGLFGLVSFLLLCGRSCSITYKGVYELQTLELDMASLNMTMPLSCTKNNSHHYIMVGNETGLELTLTNTSIINHKFCNLSDAHKKNLYDHALMSIISTFHLSIPNFNQYEAMSCDFNGGKISVQYNLSHTYAVDAANHCGTIANGVLQTFMRMAWGGSYIALDSGCGSWDCIMTSYQYLIIQNTTWEDHCQFSRPSPIGYLGLLSQRTRDIYISRRRRGTFTWTLSDSEGNETPGGYCLTRWMLIEAELKCFGNTAVAKCNEKHDEEFCDMLRLFDFNKQAIRRLKAPAQMSIQLINKAVNALINDQLIMKNHLRDIMCIPYCNYSKYWYLNHTVTGRTSLPRCWLVSNGSYLNETHFSDDIEQQADNMITELLQKEYIDRQGKTPLGLVDLFVFSTSFYLISIFLHLVKIPTHRHIIGKPCPKPHRLNHMGICSCGLYKHPGVPVKWKR

SEQ ID NO: 3719 - protein, 490 aa, Artificial Sequence
  derived and/or modified protein sequence (wt) from LASV(LASV988-NIG-2009;Clade II)__AIT17758__GPCstabilized
MGQIITFFQEVPHVIEEVMNIVLIALSLLAILKGIYNVATCGLFGLVSFLLLCGRSCSTTYKGVYELQTLELNMASLNMTMPLSCTKNNSHHYIMVGNETGLELTLTNTSIINHKFCNLSDAHKRNLYDHALMSIISTFHLSIPNFNQYEAMSCDFNGGKISVQYNLSHTYAVDAAKHCGTIANGVLQTFMRMAWGGSYIALDSGCGSWDCIMTSYQYLIIQNTTWEDHCEFSRPSPIGYLGLLSQRTRDIYISRRRRGTFTWTLSDSEGNETPGGYCLTRWMLIEAELKCFGNTAVAKCNEKHDEEFCDMLRLFDFNKQAIRRLKAPAQMSIQLINKAVNALINDQLIMKNHLRDIMCIPYCNYSKYWYLNHTVTGKTSLPRCWLVSNGSYLNETHFSDDIEQQADNMITELLQKEYIDRQGKTPLGLVDLFVFSTSFYLISIFLHLVKIPTHRHVIGKPCPKPHRLNHMGICSCGLYKHPGVPVKWKR

SEQ ID NO: 3720 - protein, 490 aa, Artificial Sequence
  derived and/or modified protein sequence (wt) from LASV(LASV989-NIG-2009;Clade II)__AIT17762__GPCstabilized
MGQIITFFQEVPHVIEEVMNIVLIALSLLAILKGIYNVATCGLFGLVSFLLLCGRSCSTTYKGVYELQTLELDMASLNMTMPLSCTKNNSHHYIMVGNETGLELTLTNTSIISHKFCNLSDAHKKNLYDHALMSIISTFHLSIPNFNQYEAMSCDFNGGKISVQYNLSHTYAVDAANHCGTIANGVLQTFMRMAWGGSYIALDSGCGSWDCIMTSYQYLIIQNTTWEDHCQFSRPSPIGYLGLLSQRTRDIYISRRRRGTFTWTLSDSEGNEAPGGYCLTRWMLIEAELKCFGNTAVAKCNEKHDEEFCDMLRLFDFNKQAIRRLKTPAQMSIQLINKAVNALINDQLIMKNHLRDIMCIPYCNYSRYWYLNHTVTGKTSLPRCWLVSNGSYLNETHFSDDIEQQADNMITELLQKEYMDRQGKTPLGLVDLFVFSTSFYLISIFLHLVKIPTHRHVIGKPCPKPHRLNHMGICSCGLYKHPGVPVKWKR

SEQ ID NO: 3721 - protein, 490 aa, Artificial Sequence
  derived and/or modified protein sequence (wt) from LASV(LASV991-NIG-2009;Clade II)__AIT17770__GPCstabilized
MGQIVTFFQEVPHVIEEVMNIVLIALSLLAILKGIYNVATCGLFGLVSFLLLCGRSCSTTYKGVYELQALELDMSSLNMTMPLSCTKNNSHHYIMVGNETGLELTLTNTSIIHHKFCNLSDAHKKDLYDHALMSIISTFHLSIPNFNQYEAMSCDFNGGKISVQYNLSHTYAVDAANHCGTIANGVLQTFMRMAWGGSYIALDSGCGGWDCIMTSYQFLIIQNTTWEDHCQFSRPSPIGYLGLLSQRTRDIYISRRRRGTFTWTLSDSEGNETPGGYCLTRWMLIEAELKCFGNTAVAKCNEKHDEEFCDMLRLFDFNKQAIKRLKTPAQMSIHLINKAVNALINDQLIMKNHLRDIMCIPYCNYSKYWYLNHTVTGKTSLPRCWLVSNGSYLNETHFSDDIEQQADNMITELLQKEYIDRQGKTPLGLVDLFVFSTSFYLISIFLHLVKIPTHRHVIGKPCPKPHRLNHMGICSCGLYKHPGVPVRWKR

SEQ ID NO: 3722 - protein, 490 aa, Artificial Sequence
  derived and/or modified protein sequence (wt) from LASV(LASV993-NIG-2009;Clade II)__AIT17778__GPCstabilized
MGQIITFFQEVPHVIEEVMNIVLIALSLLAILKGIYNVATCGLFGLVSFLLLCGRSCSTTYKGVYELQTLELDMANLNMTMPLSCTKNNSHHYIMVGNETGLELTLTNTSIINHKFCNLSDAHKKNLYDHALMSIISTFHLSIPNFNQYEAMSCDFNGGKISVQYNLSHTYARDAANHCGTIANGVLQTFMRMAWGGSYIALDSGCGSWDCIMTSYQYLIIQNTTWEDHCQFSRPSPIGYLGLLSQRTRDIYISRRRRGTFTWTLSDSEGNETPGGYCLTRWMLIEAELKCFGNTAVAKCNEKHDEEFCDMLRLFDFNKQAIRRLKTPAQMNIQLINKAVNALINDQLIMKNHLRDIMCIPYCNYSKYWYLNHTVTGKTSLPRCWLVSNGSYLNETHFSDDIEQQADNMITELLQKEYMDRQGKTPLGLVDLFVFSTSFYLISIFLHLVKIPTHRHVIGKPCPKPHRLNHMGICSCGLYKHPGVPVKWKR

SEQ ID NO: 3723 - protein, 490 aa, Artificial Sequence
  derived and/or modified protein sequence (wt) from LASV(Nig08-04;Clade II)__ADU56610__GPCstabilized
MGQIVTFFQEVPHVIEEVMNIVLIALSLLAILKGIYNVATCGLFGLISFLLLCGRSCSTTYKGVYELQTLELDMANLNMTMPLSCTKNSSHHYIMVGNETGLELTLTNTSIINHKFCNLSDAHKKNLYDHALMSIISTFHLSIPNFNQYEAMSCDFNGGKISVQYNLSHAYAVDAANHCGTIANGVLQTFMRMAWGGSYIALDSGCGNWDCIMTSYQYLIIQNTTWEDHCQFSRPSPIGYLGLLSQRTRDIYISRRRRGTFTWTLSDSEGNEAPGGYCLTRWMLIEAELKCFGNTAIAKCNEKHDEEFCDMLRLFDFNKQAIKRLKAPAQMSIQLINKAVNALINDQLIMKNHLRDIMCIPYCNYSKYWYLNHTVTGKTSLPRCWLISNGSYLNETHFSDDIEQQADNMITELLQKEYMDRQGKTPLGLVDLFVFSTSFYLISIFLHLVKIPTHRHIVGRPCPKPHRLNHMGICSCGLYKHPGVPVKWKR

SEQ ID NO: 3724 - protein, 490 aa, Artificial Sequence
  derived and/or modified protein sequence (wt) from LASV(Nig08-A41;Clade II)__ADU56626__GPCstabilized
MGQIITFFQEVPHVIEEVMNIVLIALSLLAILKGIYNVATCGLFGLVSFLLLCGRSCSTTYKGVYELQTLELNMASLNMTMPLSCTKNNSHHYIMVGNETGLELTLTNTSIINHKFCNLSDAHKRNLYDHALMSIISTFHLSIPNFNQYEAMSCDFNGGKISVQYNLSHTYAVDAAKHCGTIANGVLQTFMRMAWGGSYIALDSGCGSWDCIMTSYQYLIIQNTTWEDHCQFSRPSPIGYLGLLSQRTRDIYISRRRRGTFTWTLSDSEGNETPGGYCLTRWMLIEAELKCFGNTAVAKCNEKHDEEFCDMLRLFDFNKQAIRRLKAPAQMSIQLINKAVNALINDQLIMKNHLRDIMCIPYCNYSKYWYLNHTVTGKTSLPRCWLVSNGSYLNETHFSDDIEQQADNMITELLQKEYIDRQGKTPLGLVDLFVFSTSFYLISIFLHLVKIPTHRHVIGKPCPKPHRLNHMGICSCGLYKHPGVPVKWKR

SEQ ID NO: 3725 - protein, 490 aa, Artificial Sequence
  derived and/or modified protein sequence (wt) from LASV(Nig08-A47;Clade II)__ADU56630__GPCstabilized
MGQIITFFQEVPHVIEEVMNIVLIALSLLAILKGIYNVATCGLFGLVSFLLLCGRSCSTTYKGVYELQTLELDMASLNMTMPLSCTKNNSHHYIMVGNETGLELTLTNTSIINHKFCNLSDAHKKNLYDHALMSIISTFHLSIPNFNQYEAMSCDFNGGKISVQYNLSHAYAVDAANHCGTIANGVLQTFMRMAWGGSYIALDSGCGSWDCIMTSYQYLIIQNTTWEDHCQFSRPSPIGYLGLLSQRTRDIYISRRRRGTFTWTLSDSEGNETPGGYCLTRWMLIEAELKCFGNTAVAKCNEKHDEEFCDMLRLFDFNKQAIRRLKTPAQMSIQLINKAVNALINDQLIMKNHLRDIMCIPYCNYSKYWYLNHTVTGKTSLPRCWLVSNGSYLNETHFSDDIEQQADNMITELLQKEYMDRQGKTPLGLVDLFVFSTSFYLISIFLHLVRIPTHRHVIGKPCPKPHRLNHMGICSCGLYKHPGVPVKWKR

SEQ ID NO: 3726 - protein, 490 aa, Artificial Sequence
  derived and/or modified protein sequence (wt) from LASV(CSF;Clade III)__AAL13212__GPCstabilized
MGQIVTFFQEVPHVIEEIMNIVLITLSLLAILKGVYNLATCGLIGLITFLFLCGRSCSMTYKGSYQLETLELNMETLNMTMPLSCTKNTSHHYIRVGNETGLELTLTNTSIINHKFCNLSDAHKKNLYDHSLMSIISTFHLSIPNFNQYEAMSCDFNGGKISIQYNLSHTYAGDAAKHCGTLANGILQTFMRMAWGGSYIALDSGCGNWDCIMTSYQYLIIQNTTWEDHCQFSRPSPIGYLGLLSQRTREIYISRRRRGTFTWTLSDSEGNENPGGYCLTRWMLIEAELKCFGNTAVAKCNEKHDEEFCDMLRLFDFNKQAIQRLKAPAQMSIQLINKAVNALINDQLIMKNHLRDIMCIPYCNYSKYWYLNHTTTGRTSLPRCWLVSNGSYLNETRFSDDIEQQADNMITEMLQKEYIDRQGKTPLGLVDLFVFSTSFYLISIFLHLIKIPTHRHIVGGPCPKPHRLNHKGICSCGLYKRPGVSVRWKR

SEQ ID NO: 3727 - protein, 490 aa, Artificial Sequence
  derived and/or modified protein sequence (wt) from LASV(ISTH2121-NIG-2012;Clade III)__AIT17540__GPCstabilized
MGQIVTFFQEVPHVIEEIMNIVLITLSLLAILKGIYNFATCGLIGLITFLFLCGRSCSTIYKGSYQLQTLELNMETLNMTMPLSCTKNNSHHYIRVGNETGLELTLTNTSIINHKFCNLSEAHKKNLYDHALMSIISTFHLSIPNFNQYEAMSCDFNGGKISVQYNLSHSYAVDAANHCGTVANGVLQTFMRMAWGGSYIALDSGCGNWDCIMTSYQYLIIQNTTWEDHCQFSRPSPIGYLGLLSQRTRDIYISRRRRGTFTWTLSDSEGKETPGGYCLTRWMLIEAELKCFGNTAVAKCNEKHDEEFCDMLRLFDFNKQAIQRLKTPAQMSIQLINKAVNALINDQLIMKNHLRDIMCIPYCNYSKYWYLNHTSTGRTSLPKCWLVSNGSYLNETHFSDDIEQQADNMITEMLQKEYIDRQGKTPLGLVDLFVFSTSFYLISIFLHLVKIPTHRHIVGKSCPKPHRLNHMGICSCGLYKQPGVPVKWKR

SEQ ID NO: 3728 - protein, 490 aa, Artificial Sequence
  derived and/or modified protein sequence (wt) from LASV(Nig08-A19;Clade III)__ADU56618__GPCstabilized
MGQIVTFFQEVPHVIEEVMNIVLIALSILAILKGLYNIATCGLIGLVTFLLLSGRSCSMTYKGVYELQTLELNMNTLNMTMPLSCTKNNSHHYIMVGNETGLELTLTNTSLLHHKFCNLSDAHKKNLYDHTLMSIISTFHLSIPNFNQYEAMSCDFNGGKITVQYNLSHSYAIDAANHCGTVANGVLQTFMRMAWGGSYIALDSGCGKWDCIMTSYQYLIIQNTTWEDHCQFSRPSPIGYLGLLSQRTRDIYISRRRRGTFTWTLSDSEGNETPGGYCLTRWMLIEAELKCFGNTAVAKCNEKHDEEFCDMLRLFDFNKQAIRRLKAPAQMSIQLINKAVNALINDQLIMKNHLRDIMCIPYCNYSKYWYLNHTSTGRTSLPRCWLVSNGSYLNETHFSDDIEQQADNMITEMLQKEYLDRQGKTPLGLVDLFVFSTSFYLISIFLHLVKIPTHRHIVGKPCPKPHRLNHMGICSCGLYKQPGVPVRWKR

SEQ ID NO: 3729 - protein, 490 aa, Artificial Sequence
  derived and/or modified protein sequence (wt) from LASV(ONM-299;Clade III)__ANH09734__GPCstabilized
MGQIVTFFQEVPHVIEEIMNIVLITLSLLAILKGLYNFATCGLIGLITFLFLCGRSCSMIYKGSYQLETLELNMETLNMTMPLSCTKNNSHHYIRVGNETGLELTLTNTSIIGHKFCNLSDAHKKNLYDHSLMSIISTFHLSIPNFNQYEAMSCDFNGGKISIQYNLSHTYAGDAAKHCGTVANGVLQTFMRMAWGGSYIALDSGCGNWDCIMTSYQYLIIQNTTWEDHCQFSRPSPIGYLGLLSQRTRDIYISRRRRGTFTWTLSDSEGKETPGGYCLTRWMLIEAELKCFGNTAVAKCNEKHDEEFCDMLRLFDFNKQAIQRLKTPAQMSIQLINKAVNALINDQLIMKNHLRDIMCIPYCNYSKYWYLNHTSTGRTSLPKCWLVSNGSYLNETHFSDDIEQQADNMITEMLQKEYIDRQGKTPLGLVDVFVFSTSFYLISIFLHLVKIPTHRHIVGKSCPKPHRLNHMGICSCGLYKQPGVPVRWKR

SEQ ID NO: 3730 - protein, 490 aa, Artificial Sequence
  derived and/or modified protein sequence (wt) from LASV(ONM-700;Clade III)__ANH09738__GPCstabilized
MGQIVTFFQEVPHVIEEIMNIVLITLSLLAILKGLYNFATCGLIGLITFLFLCGRSCSMIYKGSYQLETLELNMETLNMTMPLSCTKNNSHHYIRVGNETGLELTLTNTSIINHKFCNLSDAHKRNLYDHSLMSIISTFHLSIPNFNQYEAMSCDFNGGKISIQYNLSHTYAGDAAKHCGTVANGVLQTFMRMAWGGSYIALDSGCGNWDCIMTSYQYLIIQNTTWEDHCQFSRPSPIGYLGLLSQRTRDIYISRRRRGTFTWTLSDSEGKETPGGYCLTRWMLIEAELKCFGNTAVAKCNEKHDEEFCDMLRLFDFNKQAIQRLKTPAQMSIQLINKAVNALINDQLIMKNHLRDIMCIPYCNYSKYWYLNHTSTGRTSLPKCWLVSNGSYLNETHFSDDIEQQADNMITEMLQKEYIDRQGKTPLGLVDVFMFSTSFYLISIFLHLVKIPTHRHIVGKSCPKPHRLNHMGICSCGLYKQPGVPVRWKR

SEQ ID NO: 3731 - protein, 490 aa, Artificial Sequence
  derived and/or modified protein sequence (wt) from LASV(Weller;Clade III)__AAT49010__GPCstabilized
MGQIVTFFQEVPHVIEEVMNIVLIALSVLAILKGLYNFATCGLIGLVTFLLLSGRSCSMIYKGVYELQTLELNMETLNMTMPLSCTKNTSHHYIRVGNDTGLELTLTNETLLHHKFCNLSDAHKRNLYDHALMSIISTFHLSIPNFNQYEAMSCDFNGGKITVQYNLSHSYAVDAAKHCGTVANGVLQTFMRMAWGGSYIALDSRCGNWDCIMTSYQYLIIQNTTWEDHCQFSRPSPIGYLGLLSQRTRDIYISRRRRGTFTWTLSDSEGNETPGGYCLTRWMLIEAELKCFGNTAVAKCNEKHDEEFCDMLRLFDFNKQAIRRLKTPAQMSIQLINKAVNALINDQLIMKNHLRDIMCIPYCNYSKYWYLNHTSTGKTSLPRCWLVSNGSYLNETHFSDDIEQQADNMITEMLQKEYLDRQGKTPLGLVDLFVFSTSFYLISIFLHLIKIPTHRHIVGKPCPKPHRLNHMGICSCGLYKQPGVPVRWKR

SEQ ID NO: 3732 - protein, 491 aa, Artificial Sequence
  derived and/or modified protein sequence (wt) from LASV(BA366;Clade IV)__ADI39451__GPCstabilized
MGQIVTFFQEVPHVIEEVMNIVLIALSVLAVLKGLYNVATCGLIGLIAFLLLCGRSCTTTLYKGVYELQALELNMETLNMTMPLSCTKNNSHHYIMVGNETGLELTLTNTSIINHKFCNLSDAHKKNLYDHALMSIISTFHLSIPNFNQYEAMSCDFNGGKISVQYNLSHTYAVDAANHCGTVANGVLQTFMRMAWGGSYIALDSGCGSWDCIMTSYQYLIIQNTTWEDHCQFSRPSPIGYLGLLSQRTRDIYISRRRRGTFTWTLSDSEGKDTPGGYCLTRWMLIEAELKCFGNTAVAKCNEKHDEEFCDMLRLFDFNKQAIQRLKAPAQMSIQLINKAVNALINDQLIMKNHLRDIMCIPYCNYSKYWYLNHTITGRTSLPKCWLVSNGSYLNETHFSDDIEQQADNMITEMLQKEYIERQGKTPLGLVDLFVFSTSFYLISIFLHLIKIPTHRHIVNKPCPKPHRLNHMGVCSCGLYKQPGVPVRWKR

SEQ ID NO: 3733 - protein, 491 aa, Artificial Sequence
  derived and/or modified protein sequence (wt) from LASV(G1180-SLE-2010;Clade IV)__AIT17168__GPCstabilized
MGQIVTFFQEVPHVIEEVMNIVLIALSILAVLKGLYNFATCGLVGLLTFLLLCGRSCTASRYKGVYELQTLELNMETLNMTMPLSCTKNNSHHYIMVGNETGLELTLTNTSIINHKFCNLSDAHKKNLYDHALMSIISTFHLSIPNFNQYEAMSCDFNGGKISVQYNLSHSYAGDAANHCGTVANGVLQTFMRMAWGGSYIALDSGCGSWDCIMTSYQYLIIQNTTWEDHCQFSRPSPIGYLGLLSQRTRDIYISRRRRGTFTWTLSDSEGKDTPGGYCLTRWMLIEAELKCFGNTAVAKCNEKHDEEFCDMLRLFDFNKQAIQRLKAPAQMSIQLINKAVNALINDQLIMKNHLRDIMCIPYCNYSKYWYLNHTTTGKTSLPKCWLVSNGSYLNETHFSDDIEQQADNMITEMLQKEYMERQGKTPLGLVDLFVFSTSFYLISIFLHLVKIPTHRHIVGKSCPKPHRLNHMGICSCGLYKQPGVPVKWKR

SEQ ID NO: 3734 - protein, 491 aa, Artificial Sequence
  derived and/or modified protein sequence (wt) from LASV(G1190-SLE-2010;Clade IV)__AIT17172__GPCstabilized
MGQIVTFFQEVPHVIEEVMNIVLIALSILAVLKGLYNFATCGLVGLVTFLLLCGRSCTTSLYKGVYELQTLELNMETLNMTMPLSCTKNNSHHYIMVGNETGLELTLTNTSIINHKFCNLSDAHKKNLYDHALMSIISTFHLSIPNFNQYEAMSCDFNGGKISVQYNLSHSYAGDAANHCGTVANGVLQTFMRMAWGGSYIALDSGCGRWDCIMTSYQYLIIQNTTWEDHCQFSRPSPIGYLGLLSQRTRDIYISRRRRGTFTWTLSDSEGKDTPGGYCLTRWMLIEAELKCFGNTAVAKCNEKHDEEFCDMLRLFDFNKQAIQRLKAPAQMSIQLINKAVNALINDQLIMKNHLRDIMCIPYCNYSKYWYLNHTTTGKTSLPKCWLVSNGSYLNETHFSDDIEQQADNMITEMLQKEYMERQGKTPLGLVDLFVFSTSFYLISIFLHLVKIPTHRHIVGKPCPRPHRLNHMGICSCGLYKQPGVPVKWKR

SEQ ID NO: 3735 - protein, 491 aa, Artificial Sequence
  derived and/or modified protein sequence (wt) from LASV(G1200-LIB-2010;Clade IV)__AIT17176__GPCstabilized
MGQIVTFFQEVPHVIEEVMNIVLIALSLLAVLKGLYNVATCGLIGLITFLLLCGRSCTTNLYKGVYELQALELNMETLNMTMPLSCTKNNSHHYIMVGNETGLELTLTNTSIINHKFCNLSDAHKKNLYDHALMSIISTFHLSIPNFNQYEAMSCDFNGGRISVQYNLSHSYAGDAASHCGTIANGVLQTFMRMAWGGSYIALDSGCGGWDCIMTSYQYLIIQNTTWEDHCQFSRPSPIGYLGLLSQRTRDIYISRRRRGTFTWTLSDSEGKDTPGGYCLTRWMLIEAELKCFGNTAVAKCNEKHDEEFCDMLRLFDFNKQAIQRLKAPAQMSIQLINKAVNALINDQLIMKNHLRDIMCIPYCNYSKYWYLNHTVTGKTSLPKCWLVSNGSYLNETHFSDDIEQQADNMITEMLQKEYMERQGKTPLGLVDLFVFSTSFYLISIFLHLVKIPTHRHVVGKPCPKPHRLNHMGICSCGLYKQPGVPVRWKR

SEQ ID NO: 3736 - protein, 491 aa, Artificial Sequence
  derived and/or modified protein sequence (wt) from LASV(G1442-SLE-2011;Clade IV)__AIT17180__GPCstabilized
MGQIVTFFQEVPHVIEEVMNIVLIALSILAVLKGLYNVATCGLIGLVTFLLLCGRSCTTTLYKGVYELQTLELNMETLNMTMPLSCTKNNSHHYIRVGNETGLELTLTNTSIINHKFCNLSDAHKKNLYDHALMSIISTFHLSIPNFNQYEAMSCDFNGGKISVQYNLSHSYAGDAANHCGTVANGVLQTFMRMAWGGSYIALDSGCGNWDCIMTSYQYLIIQNTTWDDHCQFSRPSPIGYLGLLSQRTRDVYISRRRRGTFTWTLSDSEGKDTPGGYCLTRWMLIEAELKCFGNTAVAKCNEKHDEEFCDMLRLFDFNKQAIQRLKAPAQMSIQLINKAVNALINDQLIMKNHLRDIMCIPYCNYSKYWYLNNTATGKTSLPKCWLISNGSYLNETHFSDDIEQEADNMITEMLQKEYMERQGKTPLGLVDLFVFSTSFYLISIFLHLVKIPTHRHIVGKSCPKPHRLNHMGICSCGLYKQPGVPVRWKR

SEQ ID NO: 3737 - protein, 491 aa, Artificial Sequence
  derived and/or modified protein sequence (wt) from LASV(G1529-SLE-2011;Clade IV)__AIT17184__GPCstabilized
MGQIVTFFQEVPHVIEEVMNIVLIALSILAVLKGLYNVATCGLIGLVTFLLLCGRSCTTTLYKGVYELQALELNMETLNMTMPLSCTKNNSHHYIRVGNETGLELTLTNTSIIDHKFCNLSDAHKKNLYDHALMSIISTFHLSIPNFNQYEAMSCDFNGGKISVQYNLSHSYAGDAANHCGTVANGVLQTFMRMAWGGSYIALDSGCNGWDCIMTSYQYLIIQNTTWDDHCQFSRPSPIGYLGLLSQRTRDIYISRRRRGTFTWTLSDSEGKDTPGGYCLTRWMLIEAELKCFGNTAVAKCNEKHDEEFCDMLRLFDFNKQAIRRLKAPAQMSIQLINKAVNALINDQLIMKNHLRDIMCIPYCNYSKYWYLNNTATGKTSLPRCWLVSNGSYLNETHFSDDIEQQADNMITEMLQREYMERQGKTPLGLVDLFVFSTSFYLISIFLHLVKIPTHRHIVGKPCPKPHRLNHMGICSCGLYKQPGVPVKWKR

SEQ ID NO: 3738 - protein, 491 aa, Artificial Sequence
  derived and/or modified protein sequence (wt) from LASV(G1618-SLE-2011;Clade IV)__AIT17188__GPCstabilized
MGQIVTFFQEVPHVIEEVMNIVLIALSILAVLKGLYNFATCGFVGLVSFLLLCGRSCTTSLYKGVYELQTLELNMETLNMTMPLSCTKNNSHHYIMVGNETGLELTLTNTSIINHKFCNLSDAHKKNLYDHALMSIISTFHLSIPNFNQYEAMSCDFNGGKISVQYNLSHSYAVDAANHCGTVANGVLQTFMRMAWGGSYIALDSGCGSWDCIMTSYQYLIIQNTTWEDHCQFSRPSPIGYLGLLSQRTRDIYISRRRRGTFTWTLSDSEGKDTPGGYCLTRWMLIEAELKCFGNTAVAKCNEKHDEEFCDMLRLFDFNKQAIQRLRAPAQMSIQLINKAVNALINDQLIMKNHLRDIMCIPYCNYSKYWYLNHTTTGRTSLPKCWLVSNGSYLNETHFSDDIEQQADNMITEMLQKEYMERQGKTPLGLVDLFVFSTSFYLISIFLHLVKIPTHRHIVGKSCPKPHRLNHMGICSCGLYGQPGVPVKWKR

SEQ ID NO: 3739 - protein, 491 aa, Artificial Sequence
  derived and/or modified protein sequence (wt) from LASV(G1646-SLE-2011;Clade IV)__AIT17192__GPCstabilized
MGQIVTFFQEVPHVIEEVMNIVLIALSILAVLKGLYNFATCGFIGLVSFLLLCGRSCTTSLYKGVYELQTLELNMETLNMTMPLSCTKNNSHHYIMVGNETGLELTLTNTSIINHKFCNLSDAHKKNLYDHALMSIISTFHLSIPNFNQFEAMSCDFNGGKISVQYNLSHSYAVDAANHCGTVANGVLQTFMRMAWGGSYIALDSGCGSWDCIMTSYQYLIIQNTTWEDHCQFSRPSPIGYLGLLSQRTRDIYISRRRRGTFTWTLSDSEGKDTPGGYCLTRWMLIEAELKCFGNTAVAKCNEKHDEEFCDMLRLFDFNKQAIQRLKAPAQMSIQLINKAVNALINDQLIMKNHLRDIMCIPYCNYSKYWYLNHTTTGRTSLPKCWLVSNGSYLNETHFSDDIEQQADNMITEMLQKEYMERQGKTPLGLVDLFVFSTSFYLISIFLHLVKIPTHRHIVGKSCPKPHRLNHMGICSCGLYGQPGVPVKWKR

SEQ ID NO: 3740 - protein, 491 aa, Artificial Sequence
  derived and/or modified protein sequence (wt) from LASV(G1647-SLE-2011;Clade IV)__AIT17196__GPCstabilized
MGQIVTFFQEVPHVIEEVMNIVLIALSILAVLKGLYNLATCGLVGLVTFLLLCGRSCTTSLYKGVYELQTLELNMETLNMTMPLSCTKNNSHHYIMVGNETGLELTLTNTSIINHKFCNLSDAHKKNLYDHALMSIISTFHLSIPNFNQYEAMSCDFNGGKISVQYNLSHSYAGDAANHCGTVANGVLQTFMRMAWGGSYIALDSGCGRWDCIMTSYQYLIIQNTTWEDHCQFSRPSPIGYLGLLSQRTRDIYISRRRRGTFTWTLSDSEGKDTPGGYCLTRWMLIEAELKCFGNTAVAKCNEKHDEEFCDMLRLFDFNKQAIQRLKAPAQMNIQLINKAVNALINDQLIMKNHLRDIMCIPYCNYSKYWYLNHTTTGKTSLPRCWLVSNGSYLNETHFSDDIEQQADNMITEMLQKEYMERQGKTPLGLVDLFVFSTSFYLISIFLHLVKIPTHRHIVGKPCPKPHRLNHMGICSCGFYKQPGVPVKWKR

SEQ ID NO: 3741 - protein, 491 aa, Artificial Sequence
  derived and/or modified protein sequence (wt) from LASV(G1774-SLE-2011;Clade IV)__AIT17204__GPCstabilized
MGQIVTFFQEVPHVIEEVMNIVLIALSILAVLKGLYNLATCGLVGLVTFLLLCGRSCTSSLYKGVYELQTLELNMETLNMTMPLSCTKNSSHHYIRVGNETGLELTLTNTSIINHKFCNLSDAHKKNLYDHALMSIISTFHLSIPNFNQYEAMSCDFNGGKISVQYNLSHSYAGDAANHCGTVANGVLQTFMRMAWGGSYIALDSGCDRWDCIMTSYQYLIIQNTTWEDHCQFSRPSPIGYLGLLSQRTRDIYISRRRRGTFTWTLSDSEGKDTPGGYCLTRWMLIEAELKCFGNTAVAKCNEKHDEEFCDMLRLFDFNKQAIQRLKAPAQMSIQLINKAVNALINDQLIMKNHLRDIMCIPYCNYSKYWYLNHTITGKTSLPKCWLVSNGSYLNKTHFSDDIEQQADNMITEMLQKEYMERQGKTPLGLVDLFVFSTSFYLISIFLHLIKIPTHRHIVGKPCPKPHRLNHMGICSCGLYKQPGVPVKWKR

SEQ ID NO: 3742 - protein, 491 aa, Artificial Sequence
  derived and/or modified protein sequence (wt) from LASV(G1792-SLE-2011;Clade IV)__AIT17208__GPCstabilized
MGQIVTFFQEVPHVIEEVMNIVLIALSILAVLKGLYNFATCGLIGLVTFLLLCGRSCTTSLYKGVYELQTLELNMETLNMTMPLSCTKNNSHHYIMVGNETGLELTLTNTSIINHKFCNLSDAHKKNLYDHALMSIISTFHLSIPNFNQYEAMSCDFNGGKISVQYNLSHSYAGDAANHCGTVANGVLQTFMRMAWGGSYIALDSGCGQWDCIMTSYQYLIIQNTTWEDHCQFSRPSPIGYLGLLSQRTRDIYISRRRRGTFTWTLSDSEGKDTPGGYCLTRWMLIEAELKCFGNTAVAKCNEKHDEEFCDMLRLFDFNKQAIQRLKAPAQMSIQLINKAVNALINDQLIMKNHLRDIMCIPYCNYSKYWYLNHTTTGKTSLPKCWLVSNGSYLNETHFSDDIEQQADNMITEMLQKEYMERQGKTPLGLVDLFVFSTSFYLISIFLHLVKIPTHRHIVGKSCPKPHRLNHMGICSCGLYKQPGVPVKWKR

SEQ ID NO: 3743 - protein, 491 aa, Artificial Sequence
  derived and/or modified protein sequence (wt) from LASV(G1897-SLE-2011;Clade IV)__AIT17210__GPCstabilized
MGQIVTFFQEVPHVIEEVMNIVLIALSILAVLKGLYNLATCGLVGLVTFLLLCGRSCTTSLYKGVYELQTLELNMETLNMTMPLSCTKNNSHHYIMVGNETGLELTLTNTSIINHKFCNLSDAHKKNLYDHALMSIISTFHLSIPNFNQYEAMSCDFNGGKISVQYNLSHSYAGDAANHCGTVANGVLQTFMRMAWGGSYIALDSGCDRWDCIMTSYQYLIIQNTTWEDHCQFSRPSPIGYLGLLSQRTRDIYISRRRRGTFTWTLSDSEGKDTPGGYCLTRWMLIEAELKCFGNTAVAKCNEKHDEEFCDMLRLFDFNKQAIQRLKAPAQMSIQLINKAVNALINDQLIMKNHLRDIMCIPYCNYSKYWYLNHTTTGKTSLPKCWLVSNGSYLNETHFSDDIEQQADNMITEMLQKEYMERQGKTPLGLVDLFVFSTSFYLISIFLRLVKIPTHRHIVGKPCPKPHRLNHMGICSCGLYKQPGVPVKWKR

SEQ ID NO: 3744 - protein, 491 aa, Artificial Sequence
  derived and/or modified protein sequence (wt) from LASV(G1932-SLE-2011;Clade IV)__AIT17212__GPCstabilized
MGQIVTFFQEVPHVIEEVMNIVLIALSILAVLKGLYNLATCGLVGLVTFLLLCGRSCTTSLYKGVYELQTLELNMETLNMTMPLSCTKNNSHHYIMVGNETGLELTLTNTSIINHKFCNLSDAHRKNLYDHALMSIISTFHLSIPNFNQYEAMSCDFNGGKISVQYNLSHSYAGDAANHCGTVANGVLQTFMRMAWGGSYIALDSGCGKWDCIMTSYQYLIIQNTTWEDHCQFSRPSPIGYLGLLSQRTRDIYISRRRRGTFTWTLSDSEGKDTPGGYCLTRWMLIEAELKCFGNTAVAKCNEKHDEEFCDMLRLFDFNKQAIQRLKAPAQMSIQLINKAVNALINDQLIMKNHLRDIMCIPYCNYSKYWYLNHTTTGKTSLPRCWLVSNGSYLNETHFSDDIEQQADNMITEMLQKEYMERQGKTPLGLVDLFVFSTSFYLISIFLHLVKIPTHRHIVGKPCPKPHRLNHMGICSCGLYKQPGVPVKWKR

SEQ ID NO: 3745 - protein, 491 aa, Artificial Sequence
  derived and/or modified protein sequence (wt) from LASV(G1959-SLE-2011;Clade IV)__AIT17216__GPCstabilized
MGQIVTFFQEVPHVIEEVMNIVLIALSILAVLKGLYNFATCGLVGLVTFLLLCGRSCTTSLYKGVYELQTLELNMETLNMTMPLSCTKNNSHHYIMVGNETGLELTLTNTSIINHKFCNLSDAHKKNLYDHALMSIISTFHLSIPNFNQYEAMSCDFNGGKISVQYNLSHSYAGDAANHCGTVANGVLQTFMRMAWGGSYIALDSGCGRWDCIMTSYQYLIIQNTTWEDHCQFSRPSPIGYLGLLSQRTRDIYISRRRRGTFTWTLSDSEGKDTPGGYCLTRWMLIEAELKCFGNTAVAKCNEKHDEEFCDMLRLFDFNKQAIQRLKAPAQMSIQLINKAVNALINDQLIMKNHLRDIMCIPYCNYSKYWYLNHTTTGKTSLPKCWLVSNGSYLNETHFSDDIEQQADNMITEMLQKEYMERQGKTPLGLVDLFVFSTSFYLISIFLHLVKIPTHRHIVGKPCPKPHRLNYMGICSCGLYKQPGVPVRWKR

SEQ ID NO: 3746 - protein, 491 aa, Artificial Sequence
  derived and/or modified protein sequence (wt) from LASV(G2141-SLE-2011;Clade IV)__AIT17224__GPCstabilized
MGQIVTFFQEVPHVIEEVMNIVLIALSILAVLKGLYNVATCGLIGLVTFLLLCGRSCTTTLYKGVYELQALELNMETLNMTMPLSCTKNNSHHYIRVGNDTGLELTLTNTSIIQHKFCNLSDAHKKNLYDHTLMSIISTFHLSIPNFNQYEAMSCDFNGGKISVQYNLSHSYAGDAASHCGTVANGVLQTFMRMAWGGSYIALDSGCGNWDCIMTSYQYLIIQNTTWEDHCQFSRPSPIGYLGLLSQRTRDIYISRRRRGTFTWTLSDSEGRDTPGGYCLTRWMLIEAELKCFGNTAVAKCNEKHDEEFCDMLRLFDFNKQAIQRLKTPAQMSIQLINKAVNALINDQLIMKNHLRDIMCIPYCNYSKYWYLNNTITGKSSLPKCWLVSNGSYLNETHFSDDIEQEADNMITEMLQKEYMERQGKTPLGLVDLFVFSTSFYLISIFLHLVKIPTHRHIVGKPCPKPHRLNHMGVCSCGLYKQPGVPVRWKR

SEQ ID NO: 3747 - protein, 491 aa, Artificial Sequence
  derived and/or modified protein sequence (wt) from LASV(G2147-SLE-2011;Clade IV)__AIT17228__GPCstabilized
MGQIVTFFQEVPHVIEEVMNIVLIALSILAVLKGLYNFATCGLVGLLTFLLLCGRSCTTSLYKGVYELQTLELNMETLNMTMPLSCTKNNSHHYIMVGNETGLELTLTNTSIIDHKFCNLSDAHKKNLYDHALMSIISTFHLSIPNFNQYEAMSCDFNGGKISVQYNLSHSYAGDAANHCGTVANGVLQTFMRMAWGGSYIALDSGCGGWDCIMTSYQYLIIQNTTWEDHCQFSRPSPIGYLGLLSQRTRDIYISRRRRGTFTWTLSDSEGKDTPGGYCLTRWMLIEAELKCFGNTAVAKCNEKHDEEFCDMLRLFDFNKQAIQRLKAPAQMSIQLINKAVNALINDQLIMKNHLRDIMCIPYCNYSKYWYLNHTTTGKTSLPKCWLVSNGSYLNETHFSDDIEQQADNMITEMLQKEYMERQGKTPLGLVDLFVFSTSFYLISIFLHLVKIPTHRHIVGKSCPKPHRLNHMGICSCGLYKQPGVPVKWKR

SEQ ID NO: 3748 - protein, 491 aa, Artificial Sequence
  derived and/or modified protein sequence (wt) from LASV(G2165-SLE-2011;Clade IV)__AIT17232__GPCstabilized
MGQIVTFFQEVPHVIEEVMNIVLIALSILAVLKGLYNFATCGLVGLVTFLLLCGRSCTTSLYKGVYELQTLELNMETLNMTMPLSCTKNNSHHYIRVGNETGLELTLTNTSIINHKFCNLSDAHKKNLYDHALMSIISTFHLSIPNFNQYEAMSCDFNEGKISVQYNLSHSYAGDAANHCGTVANGVLQTFMRMAWGGSYIALDSGCGKWDCIMTSYQYLIIQNTTWEDHCQFSRPSPIGYLGLLSQRTRDIYISRRRRGTFTWTLSDSEGKDTPGGYCLTRWMLIEAELKCFGNTAVAKCNEKHDEEFCDMLRLFDFNKQAIERLKAPAQMSIQLINKAVNALINDQLIMKNHLRDIMCIPYCNYSKYWYLNHTTTGKTSLPKCWLVSNGSYLNETHFSDDIEQQADNMITEMLQKEYMERQGKTPLGLVDLFVFSTSFYLISIFLHLVKIPTHRHIVGKSCPKPHRLNHMGICSCGLYKQPGVPVKWKR

SEQ ID NO: 3749 - protein, 491 aa, Artificial Sequence
  derived and/or modified protein sequence (wt) from LASV(G2184-SLE-2011;Clade IV)__AIT17236__GPCstabilized
MGQIVTFFQEVPHVIEEVMNIVLIALSILAVLKGLYNFATCGLVGLVTFLLLCGRSCTTSLYKGVYELQTLELNMETLNMTMPLSCTKNNSHHYIMVGNETGLELTLTNTSIINHKFCNLSDAHKKNLYDHALMSIISTFHLSIPNFNQYEAMSCDFNGGRISVQYNLSHSYAGEAANHCGTVANGVLQTFMRMAWGGSYIALDSGCGKWDCIMTSYQYLIIQNTTWEDHCQFSRPSPIGYLGLLSQRTRDIYISRRRRGTFTWTLSDSEGKDTPGGYCLTRWMLIEAELKCFGNTAVAKCNEKHDEEFCDMLRLFDFNKQAIQRLKAPAQMSIQLINKAVNALINDQLIMKNHLRDIMCIPYCNYSRYWYLNHTTTGKTSLPKCWLVSNGSYLNETHFSDDIEQQADNMITEMLQKEYMERQGKTPLGLVDLFVFSTSFYLISIFLHLVKIPTHRHIVGKSCPKPHRLNHMGICSCGLYKQPGVPVKWKR

SEQ ID NO: 3750 - protein, 491 aa, Artificial Sequence
  derived and/or modified protein sequence (wt) from LASV(G2197-SLE-2011;Clade IV)__AIT17240__GPCstabilized
MGQIVTFFQEVPHVIEEVMNIVLIALSILAVLKGLYNLATCGLVGLVTFLLLCGRSCTTSLYKGFYELQTLELNMETLNMTMPLSCTKNNSHHYIRVGNETGLELTLTNTSIIDHKFCNLSDAHKKNLYDHALMSIISTFHLSIPNFNQYEAMSCDFNGGKISVQYNLSHSYAGDAANHCGTVANGVLQTFMRMAWGGSYIALDSGCGRWDCIMTSYQYLIIQNTTWEDHCQFSRPSPIGYLGLLSQKTRDIYISRRRRGTFTWTLSDSEGKDTPGGYCLTRWMLIEAELKCFGNTAVAKCNEKHDEEFCDMLRLFDFNKQAIQRLKAPAQMSIQLINKAVNALINDQLIMKNHLRDIMCIPYCNYSKYWYLNHTTTGKTSLPKCWLVSNGSYLNETHFSDDIEQQADNMITEMLQKEYMERQGKTPLGLVDLFVFSTSFYLISIFLHLVKIPTHRHIVGKSCPKPHRLNHMGICSCGLYKQPGVPVKWKR

SEQ ID NO: 3751 - protein, 491 aa, Artificial Sequence
  derived and/or modified protein sequence (wt) from LASV(G2222-SLE-2011;Clade IV)__AIT17244__GPCstabilized
MGQIVTFFQEVPHVIEEVMNIVLIALSILAVLKGLYNLATCGLVGLVTFLLLCGRSCTTNLYKGVYELQTLELNMETLNMTMPLSCTKNSSHHYIRVGNETGLELTLTNTSIIDHKFCNLSDAHKKNLYDHALMSIISTFHLSIPNFNQYEAMSCDFNGGKISVQYNLSHSYVGDAADHCGTVANGVLQTFMRMAWGGSYIALDSGCGKWDCIITSYQYLIIQNTTWEDHCQFSRPSPIGYLGLLSQRTRDIYISRRRRGTFTWTLSDSEGKDTPGGYCLTRWMLIEAELKCFGNTAVAKCNEKHDEEFCDMLRLFDFNKQAIQRLKAPAQMSIQLINKAVNALINDQLIMKNHLRDIMCIPYCNYSKYWYLNHTITGKTSLPRCWLVSNGSYLNETRFSDDIEQQADNMITEMLQKEYMERQGKTPLGLVDLFVFSTSFYLISIFLHLVKIPTHRHIVGKPCPKPHRLNHMGICSCGLYKQPGVPVKWKR

SEQ ID NO: 3752 - protein, 491 aa, Artificial Sequence
  derived and/or modified protein sequence (wt) from LASV(G2230-SLE-2012;Clade IV)__AIT17246__GPCstabilized
MGQIVTFFQEVPHVIEEVMNIVLIALSLLAVLKGLYNVATCGLIGLITFLLLCGRSCTTNLYKGVYELQTLELNMETLNMTMPLSCTKNSSHHYIMVGNETGLELTLTNTSIINHKFCNLSDAHKKNLYDHTLMSIISTFHLSIPNFNQYEAMSCDFNGGKISVQYNLSHSYAVDAANHCGTVANGILQTFMRMAWGGSYIALDSGCGNWDCIMTSYQYLIIQNTTWEDHCQFSRPSPIGYLGLLSQRTRDIYISRRRRGTFTWTLSDSEGNDTPGGYCLTRWMLIEAELKCFGNTAVAKCNEKHDEEFCDMLRLFDFNKQAIQRLKAPAQMSIQLINKAVNALINDQLIMKNHLRDIMCIPYCNYSKYWYLNHTTTGKTSLPKCWLVSNGSYLNETHFSDDIEQQADNMITEMLQKEYMERQGKTPLGLVDLFVFSTSFYLISIFLHLVKIPTHRHIVGKPCPKPHRLNHMGICSCGLYKQPGVPVRWKR

SEQ ID NO: 3753 - protein, 491 aa, Artificial Sequence
  derived and/or modified protein sequence (wt) from LASV(G2259-SLE-2012;Clade IV)__AIT17250__GPCstabilized
MGQIVTFFQEVPHVIEEVMNIVLIALSLLAVLKGLYNVATCGLIGLVTFLLLCGRSCTTNLYKGVYELQTLELNMETLNMTMPLSCTKNNSHHYIMVGNETGLELTLTNTSIINHKFCNLSDAHKKNLYDHTLMSIISTFHLSIPNFNQYEAMSCDFNGGKISVQYNLSHSYAVDAANHCGTVANGVLQTFMRMAWGGSYIALDSGCGNWDCIMTSYQYLIIQNTTWEDHCQFSRPSPIGYLGLLSQRTRDIYISRRRRGTFTWTLSDSEGNDTPGGYCLTRWMLIEAELKCFGNTAVAKCNEKHDEEFCDMLRLFDFNKQAIQRLKAPAQMSIQLINKAVNALINDQLIMKNHLRDIMCIPYCNYSKYWYLNHTTTGKTSLPKCWLVSNGSYLNETHFSDDIEQQADNMITEMLQKEYMERQGKTPLGLVDLFVFSTSFYLISIFLHLVKIPTHRHIVGKPCPKPHRLNHMGICSCGLYKQPGVPVRWKR

SEQ ID NO: 3754 - protein, 491 aa, Artificial Sequence
  derived and/or modified protein sequence (wt) from LASV(G2263-SLE-2012;Clade IV)__AIT17254__GPCstabilized
MGQIVTFFQEVPHVIEEVMNIVLIALSILAVLKGLYNFATCGIVGLVTFLLLCGRSCTTSLYKGVYELQTLELNMETLNMTMPLSCTKNNSHHYIMVGNETGLELTLTNTSIINHKFCNLSDAHKKNLYDHALMSIISTFHLSIPNFNQYEAMSCDFNGGKISVQYNLSHSYAGDAANHCGTVANGVLQTFMRMAWGGSYIALDSGCDRWDCIMTSYQYLIIQNTTWEDHCQFSRPSPIGYLGLLSQRTRDIYISRRRRGTFTWTLSDSEGKNTPGGYCLTRWMLIEAELKCFGNTAVAKCNEKHDEEFCDMLRLFDFNKQAIQRLKAPAQMSISLINKAVNALINDQLIMKNHLRDIMCIPYCNYSKYWYLNHTTTGKTSLPRCWLVSNGSYLNETHFSDDIEQQADNMITEMLQKEYMDRQGKTPLGLVDLFVFSTSFYLISIFLHLVKIPTHRHIVGKTCPKPHRLNHMGICSCGLYKQPGVPVKWKR

SEQ ID NO: 3755 - protein, 491 aa, Artificial Sequence
  derived and/or modified protein sequence (wt) from LASV(G2280-SLE-2012;Clade IV)__AIT17258__GPCstabilized
MGQIVTFFQEVPHVIEEVMNIVLIALSILAVLKGLYNIATCGLVGLVTFLLLCGRSCTTSLYKGVYELQTLELNMETLNMTMPLSCTKNNSHHYIMVGNETGLELTLTNTSIINHKFCNLSDAHKKNLYDHALMSIVSTFHLSIPNFNQYEAMSCDFNGGKISVQYNLSHSYAVDAANHCGTVANGVLQTFMRMAWGGSYIALDSGCGGWDCIMTSYQYLIIQNVTWEDHCQFSRPSPIGYLGLLSQRTRDVYISRRRRGTFTWTLSDSEGNDTPGGYCLTRWMLIEAELKCFGNTAVAKCNEKHDEEFCDMLRLFDFNKQAIQRLKAPAQMSIQLINKAVNALINDQLIMKNHLRDIMCIPYCNYSKYWYLNHTTTGKTSLPKCWLVSNGSYLNETHFSDDIEQQADNMITEMLQKEYMERQGKTPLGLVDLFVFSTSFYLISIFLHLVKIPTHRHIVGKPCPKPHRLNHMGICSCGLYKQPGVPVKWKR

SEQ ID NO: 3756 - protein, 491 aa, Artificial Sequence
  derived and/or modified protein sequence (wt) from LASV(G2295-SLE-2012;Clade IV)__AIT17262__GPCstabilized
MGQIVTFFQEVPHVIEEVMNIVLIALSILAVLKGLYNLATCGLVGLVTFLLLCGRSCTTSLYKGVYELQTLELNMETLNMTMPLSCTKNNSHHYIMVGNETGLELTLTNTSIINHKFCNLSDAHKKNLYDHALMSIISTFHLSIPNFNQYEAMSCDFNGGKISVQYNLSHSYAGDAATHCGTVANGVLQTFMRMAWGGSYIALDSGCGKWDCIMTSYQYLIIQNTTWEDHCQFSRPSPIGYLGLLSQRTRDIYISRRRRGTFTWTLSDSEGKDTPGGYCLTRWMLIEAELKCFGNTAVAKCNEKHDEEFCDMLRLFDFNKQAIQRLKTPAQMSIQLINKAVNALINDQLIMKNHLRDIMCIPYCNYSKYWYLNHTTTGKTSLPRCWLVSNGSYLNETHFSDDIEQQADNMITEMLQKEYMERQGKTPLGLVDLFVFSTSFYLISIFLHLVKIPTHRHIVGKPCPKPHRLNHMGICSCGLYKQPGVPVKWKR

SEQ ID NO: 3757 - protein, 491 aa, Artificial Sequence
  derived and/or modified protein sequence (wt) from LASV(G2315-SLE-2012;Clade IV)__AIT17266__GPCstabilized
MGQIVTFFQEVPHVIEEVMNIVLIALSILAVLKGLYNLATCGLVGLVTFLLLCGRSCTTSLYKGVYELQTLELNMETLNMTMPLSCTKNNSHHYIMVGNETGLELTLTNTSLINHKFCNLSDAHKKNLYDHALMSIISTFHLSIPNFNQYEAMSCDFNGGKISVQYNLSHSYAVDAANHCGTVANGVLQTFMRMAWGGSYIALDSGCGGWDCIMTSYQYLIIQNTTWEDHCQFSRPSPIGYLGLLSQRTRDIYISRRRRGTFTWTLSDSEGKDTPGGYCLTRWMLIEAELKCFGNTAVAKCNEKHDEEFCDMLRLFDFNKQAIQRLKAPAQMSIQLINKAVNALINDQLIMKNHLRDIMCIPYCNYSKYWYLNHTTTGRTSLPRCWLVSNGSYLNETHFSDDIEQQADNMITEMLQKEYMERQGKTPLGLVDLFVFSTSFYLISIFLHLVKIPTHRHIVGKSCPKPHRLNHMGICSCGLYKQPGVPVKWKR

SEQ ID NO: 3758 - protein, 491 aa, Artificial Sequence
  derived and/or modified protein sequence (wt) from LASV(G2318-SLE-2012;Clade IV)__AIT17270__GPCstabilized
MGQIVTFFQEVPHVIEEVMNIVLIALSVLAVLKGLYNFATCGLVGLVTFLLLCGRSCSTSVYKGVYELQTLELNMETLNMTMPLSCTKNNSHHYIMVGNETGLELTLTNTSIINHKFCNLSDAHKKNLYDHALMSIISTFHLSIPNFNQYEAMSCDFNGGKISVQYNLSHSYAVDAANHCGTVANGVLQTFMRMAWGGSYIALDSGCGGWDCIMTNYQYLIIQNTTWEDHCQFSRPSPIGYLGLLSQRTRDIYISRRRRGTFTWTLSDSEGKDTPGGYCLTRWMLIEAELKCFGNTAVAKCNEKHDEEFCDMLRLFDFNKQAIQRLKAPAQMSIQLINKAVNALINDQLIMKNHLRDIMCIPYCNYSKYWYLNHTTTGRTSLPKCWLVSNGSYLNETHFSDDIEQQADNMITEMLQREYMERQGKTPLGLVDLFVFSTSFYLISIFLHLVKIPTHRHIVGKSCPKPHRLNHMGICSCGLYKQPGVPVKWKR

SEQ ID NO: 3759 - protein, 491 aa, Artificial Sequence
  derived and/or modified protein sequence (wt) from LASV(G2363-SLE-2012;Clade IV)__AIT17274__GPCstabilized
MGQIVTFFQEVPHVIEEVMNIVLIALSILAVLKGLYNVATCGLTGLVAFLLLCGRSCTTTLYKGVYELQALELNMETLNMTMPLSCTKNNSHHYIRVGNETGLELTLTNTSIIEHRFCNLSDAHKKNLYDHALMSIISTFHLSIPNFNQYEAMSCDFNGGKISVQYNLSHSYAVDAANHCGTVANGVLQTFMRMAWGGSYIALDSGCNGWDCIMTSYQYLIIQNTTWEDHCQFSRPSPIGYLGLLSQRTRDIYISRRRRGTFTWTLSDSEGKDTPGGYCLTRWMLIEAELKCFGNTAVAKCNEKHDEEFCDMLRLFDFNKQAIQRLKAPAQMSIQLINKAVNALINDQLIMKNHLRDIMCIPYCNYSKYWYLNNTATGKTSLPRCWLVSNGSYLNETHFSDDIEQQADNMITEMLQKEYMERQGKTPLGLVDLFVFSTSFYLISIFLHLVKIPTHRHIVGKPCPKPHRLNHMGICSCGLYKQPGAPVRWKR

SEQ ID NO: 3760 - protein, 491 aa, Artificial Sequence
  derived and/or modified protein sequence (wt) from LASV(G2384-SLE-2012;Clade IV)__AIT17276__GPCstabilized
MGQIVTFFQEVPHVIEEVMNIVLIALSILAVLKGLYNFATCGLVGLVTFLLLCGRSCTTSLYKGVYELQTLELNMETLNMTMPLSCTKNNSHHYIMVGNETGLELTLTNTSIINHKFCNLSDAHKKNLYDHALMSIISTFHLSIPNFNQYEAMSCDFNGGKISVQYNLSHSYAGDAANHCGTVANGVLQTFMRMAWGGSYIALDSGCGKWDCIMTSYQYLIIQNTTWEDHCQFSRPSPIGYLGLLSQRTRDIYISRRRRGTFTWTLSDSEGKDTPGGYCLTRWMLIEAELKCFGNTAVAKCNEKHDEEFCDMLRLFDFNKQAIQRLKAPAQMSIQLINKAVNALINDQLIMKNHLRDIMCIPYCNYSKYWYLNHTTTGKTSLPKCWLVSNGSYLNETHFSDDIEQQADNMITEMLQKEYMERQGKTPLGLVDLFVFSTSFYLISIFLHLVKIPTHRHIVGKSCPKPHRLNHMGICSCGLYKQPGVPVRWKR

SEQ ID NO: 3761 - protein, 490 aa, Artificial Sequence
  derived and/or modified protein sequence (wt) from LASV(G2392-SLE-2012;Clade IV)__AIT17280__GPCstabilized
MGQIVTFFQEVPHVIEEVMNIVLIALSILAVLKGLYNFATCGLVGLVTFLLLCGRSCTTSLYKGVYELQTLELNMETLNMTMPLSCTKNNSHHYIRVGNETGLELTLTNTSIIDHKFCNLSDAHKKNLYDHALMSIISTFHLSIPNFNQYEAMSCDFNGGKISVQYNLSHSYAGDAANHCGTVANGVLQTFMRMAWGGSYIALDSGCEWDCIMTSYQYLIIQNTTWDNHCQFSRPSPIGYLGLLSQRTRDIYISRRRRGTFTWTLSDSEGKDTPGGYCLTRWMLIEAELKCFGNTAVAKCNEKHDEEFCDMLRLFDFNKQAIQRLKVPAQMSIQLINKAVNALINDQLIMKNHLRDIMCIPYCNYSKYWYLNHTTTGKTSLPKCWLVSNGSYLNETHFSDDIEQQADNMITEMLQKEYMERQGKTPLGLVDLFVFSTSFYLISIFLHLVKIPTHRHIVGKSCPKPHRLNHMGICSCGFYKQPGVPVKWKR

SEQ ID NO: 3762 - protein, 491 aa, Artificial Sequence
  derived and/or modified protein sequence (wt) from LASV(G2405-SLE-2012;Clade IV)__AIT17284__GPCstabilized
MGQIVTFFQEVPHVIEEVMNIVLIALSVLAVLKGLYNFATCGIVGLVTFLLLCGRSCTTSLYKGVYELQTLELNMETLNMTMPLSCTKNNSHHYIMVGNDTGLELTLTNTSIINHKFCNLSDAHKKNLYDHALMSIISTFHLSIPNFNQYEAMSCDFNGGKISVQYNLSHSYAGDAADHCGTVANGVLQTFMRMAWGGSYIALDSGCGRWDCIMTSYQYLIIQNTTWEDHCQFSRPSPIGYLGLLSQRTRDIYISRRRRGTFTWTLSDSEGKDTPGGYCLTRWMLIEAELKCFGNTAVAKCNEKHDEEFCDMLRLFDFNKQAIQRLKAPAQMSIQLINKAVNALINDQLIMKNHLRDIMCIPYCNYSKYWYLNHTTTGKTSLPKCWLVSNGSYLNETHFSDDIEQQADNMITEMLQKEYMERQGKTPLGLVDLFVFSTSFYLISIFLHLVKIPTHRHIVGKPCPKPHRLNHMGICSCGLYKQPGVPVKWKR

SEQ ID NO: 3763 - protein, 491 aa, Artificial Sequence
  derived and/or modified protein sequence (wt) from LASV(G2427-SLE-2012;Clade IV)__AIT17288__GPCstabilized
MGQIVTFFQEVPHVIEEVMNIVLIALSILAVLKGLYNFATCGLVGLVTFLLLCGRSCTTSLYKGVYELQTLELNMETLNMTMPLSCTKNNSHHYIMVGNETGLELTLTNTSIINHKFCNLSDAHKKNLYDHALMSIISTFHLSIPNFNQYEAMSCDFNGGKISVQYNLSHSYAVDAANHCGTVANGVLQTFMRMAWGGGYIALDSGCGNWDCIMTSYQYLIIQNTTWEDHCQFSRPSPIGYLGLLSQRTRDIYISRRRRGTFTWTLSDSEGKDTPGGYCLTRWMLIEAELKCFGNTAVAKCNEKHDEEFCDMLRLFDFNKQAIQRLKAPAQMSIQLINKAVNALINDQLIMKNHLRDIMCIPYCNYSKYWYLNHTVTGKTSLPKCWLVSNGSYLNETHFSDDIEQQADNMITEMLQKEYMERQGKTPLGLVDLFVFSTSFYLISIFLHLVKIPTHRHIVGKSCPKPHRLNHMGICSCGLYKQPGVPVRWKR

SEQ ID NO: 3764 - protein, 491 aa, Artificial Sequence
  derived and/or modified protein sequence (wt) from LASV(G2431-SLE-2012;Clade IV)__AIT17292__GPCstabilized
MGQIVTFFQEVPHVIEEVMNIVLIALSIMAVLKGLYNIATCGLVGLVTFLLLCGRSCTTTLYKGVYELQTLELNMETLNMTMPLSCTKNNSHHYIMVGNETGLELTLTNTSIINHKFCNLSDAHKKNLYDHALMSIISTFHLSIPNFNQYEAMSCDFNGGKISVQYNLSHSYAGDAANHCGTVANGVLQTFMRMAWGGSYIALDSGCGGWDCIMTSYQYLIIQNTTWEDHCQFTRPSPIGYLGLLSQRTRDIYISRRRRGTFTWTLSDSEGNDTPGGYCLTRWMLIEAELKCFGNTAVAKCNEKHDEEFCDMLRLFDFNKQAIQRLRAPAQMSIQLINKAVNALINDQLIMKNHLRDIMCIPYCNYSKYWYLNHTTTGRTSLPRCWLVSNGSYLNETHFSDDIEQQADNMITEMLQKEYMERQGKTPLGLVDLFVFSTSFYLISIFLHLIKIPTHRHIVGKPCPKPHRLNHMGVCSCGLYKQPGVPVRWKR

SEQ ID NO: 3765 - protein, 491 aa, Artificial Sequence
  derived and/or modified protein sequence (wt) from LASV(G2511-SLE-2012;Clade IV)__AIT17294__GPCstabilized
MGQIVTFFQEVPHVIEEVMNIVLIALSILAVLKGLYNLATCGLVGLVTFLLLCGRSCTTSLYKGVYELQTLELNMETLNMTMPLSCTKNNSHHYIMVGNETGLELTLTNTSIIDHKFCNLSDAHKKNLYDHALMSIISTFHLSIPNFNQYEAMSCDFNGGKISVQYNLSHSYAGDAANHCGTVANGVLQTFMRMAWGGSYIALDSGCGGWDCIMTSYQYLIIQNTTWEDHCQFSRPSPVGYLGLLSQRTRDIYISRRRRGTFTWTLSDSEGKDTPGGYCLTRWMLIEAELKCFGNTAVAKCNEKHDEEFCDMLRLFDFNKQAIQRLKTPAQMSIQLINKAVNALINDQLIMKNHLRDIMCIPYCNYSKYWYLNHTTTGKTSLPRCWLVSNGSYLNETHFSDDIEQQADNMITEMLQKEYMERQGKTPLGLVDLFVFSTSFYLISIFLHLVKIPTHRHIVGKPCPKPHRLNHMGICSCGLYKQPGVPVKWKR

SEQ ID NO: 3766 - protein, 491 aa, Artificial Sequence
  derived and/or modified protein sequence (wt) from LASV(G2554-SLE-2012;Clade IV)__AIT17298__GPCstabilized
MGQIVTFFQEVPHVIEEVMNIVLIALSILAVLKGLYNIATCGLLGLVCFLLLCGRSCTTSLYKGVYELQTLELNMETLNMTMPLSCTKNNSHHYIMVGNETGLELTLTNTSIINHKFCNLSDAHKKNLYDHALMSIISTFHLSIPNFNQYEAMSCDFNGGKISVQYNLSHSYAVDAASHCGTIANGVLQTFMRMAWGGSYIALDSGCGGWDCIMTSYQYLIIQNTTWEDHCQFSRPSPIGYLGLLSQRTRDIYISRRRRGTFTWTLSDSEGKDTPGGYCLTRWMLIEAELKCFGNTAVAKCNEKHDEEFCDMLRLFDFNKQAIQRLKAPAQMSIQLINKAVNALINDQLIMKNHLRDIMCIPYCNYSKYWYLNHTTTGKTSLPKCWLVSNGSYLNETHFSDDIEQQADNMITEMLQKEYMERQGKTPLGLVDLFVFSTSFYLISIFLHLVKIPTHRHVVGKPCPKPHRLNHMGICSCGLYGQPGVPVKWKR

SEQ ID NO: 3767 - protein, 491 aa, Artificial Sequence
  derived and/or modified protein sequence (wt) from LASV(G2557-SLE-2012;Clade IV)__AIT17302__GPCstabilized
MGQIVTFFQEVPHVIEEVMNIVLIALSLLAVLKGLYNVATCGLIGLVTFLLLCGRSCTTNLYKGVYELQTLELNMETLNMTMPLSCTKNNSHHYIMVGNETGLELTLTNTSIISHKFCNLSDAHKKNLYDHTLMSIISTFHLSIPNFNQYEAMSCDFNGGKISVQYNLSHSYAVDAANHCGTVANGVLQTFMRMAWGGSYIALDSGCGNWDCIMTSYQYLIIQNTTWEDHCQFSRPSPIGYLGLLSQRTRDIYISRRRRGTFTWTLSDSEGNDTPGGYCLTRWMLIEAELKCFGNTAVAKCNEKHDEEFCDMLRLFDFNKQAIQRLKAPAQMSIQLINKAVNALINDQLIMKNHLRDIMCIPYCNYSKYWYLNHTTTGKTSLPKCWLVSNGSYLNETHFSDDIEQQADNMITEMLQKEYMERQGKTPLGLVDLFVFSTSFYLISIFLHLVKIPTHRHIVGKPCPKPHRLNHMGICSCGLYKQPGVPVRWKR

SEQ ID NO: 3768 - protein, 491 aa, Artificial Sequence
  derived and/or modified protein sequence (wt) from LASV(G2587-SLE-2012;Clade IV)__AIT17310__GPCstabilized
MGQIVTFFQEVPHVIEEVMNIVLIALSILAVLKGLYNLATCGLVGLVTFLLLCGRSCTTSLYKGVYELQTLELNMETLNMTMPLSCTKNNSHHYIMVGNETGLELTLTNTSIINHKFCNLSDAHKKNLYDHALMSIISTFHLSIPNFNQYEAMSCDFNGGKISVQYNLSHSYAGDAATHCGTVANGVLQTFMRMAWGGSYIALDSGCGKWDCIMTSYQYLIIQNTTWEDHCQFSRPSPIGYLGLLSQRTRDIYISRRRRGTFTWTLSDSEGKDTPGGYCLTRWMLIEAELKCFGNTAVAKCNEKHDEEFCDMLRLFDFNKQAIQRLKTPAQMSIQLINKAVNALINDQLIMKNHLRDIMCIPYCNYSKYWYLNHTTTGKTSLPRCWLVSNGSYLNETHFSDDIEQQADNMITEMLQKEYMERQGKTPLGLVDLFVFSTSFYLISIFLHLVKIPTHRHIVGKPCPKPHRLNYMGICSCGLYKQPGVPVKWKR

SEQ ID NO: 3769 - protein, 491 aa, Artificial Sequence
  derived and/or modified protein sequence (wt) from LASV(G2612-SLE-2012;Clade IV)__AIT17314__GPCstabilized
MGQIVTFFQEVPHVIEEVMNIVLITLSILAVLKGLYNVATCGLVGLVTFLLLCGRSCTTSLYKGVYELQTLELNMETLNMTMPLSCTKNNSHHYIMVGNETGLELTLTNTSIINHKFCNLSDAHKKDLYDHALMSIISTFHLSIPNFNQYEAMSCDFNGGKISVQYNLSHSYAVDAANHCGTVANGVLQTFMRMAWGGSYIALDSGCGGWDCIMTSYQYLIIQNTTWEDHCQFSRPSPIGYLGLLSQRTRDIYISRRRRGTFTWTLSDSEGNDTPGGYCLTRWMLIEAELKCFGNTAVAKCNEKHDEEFCDMLRLFDFNKQAIQRLKAPAQMSIQLINKAVNALINDQLIMKNHLRDIMCIPYCNYSKYWYLNHTTTGKTSLPKCWLVSNGSYLNETHFSDDIEQQADNMITEMLQKEYMERQGKTPLGLVDLFVFSTSFYLISIFLHLVKIPTHRHIVGKPCPKPHRLNHMGICSCGLYKQPGVPVKWKR

SEQ ID NO: 3770 - protein, 491 aa, Artificial Sequence
  derived and/or modified protein sequence (wt) from LASV(G2615-SLE-2012;Clade IV)__AIT17318__GPCstabilized
MGQIVTFFQEVPHVIEEVMNIVLIALSLLAVLKGLYNVATCGLIGLVTFLLLCGRSCTTNLYKGVYELQTLELNMETLNMTMPLSCTKNNSHHYIMVGNETGLELTLTNTSIINHKFCNLSDAHKKNLYDHALMSIISTFHLSIPNFNQYEAMSCDFNGGKISVQYNLSHSYAVDAANHCGTVANGVLQTFMRMAWGGSYIALDSGCGNWDCIMTSYQYLIIQNITWEDHCQFSRPSPIGYLGLLSQRTRDIYISRRRRGTFTWTLSDSEGNDTPGGYCLTRWMLIEAELKCFGNTAVAKCNEKHDEEFCDMLRLFDFNKQAIQRLKAPAQMSIQLINKAVNALINDQLIMKNHLRDIMCIPYCNYSKYWYLNHTTTGKTSLPKCWLVSNGSYLNETHFSDDIEQQADNMITEMLQKEYMERQGKTPLGLVDLFVFSTSFYLISIFLHLVKIPTHRHIVGKPCPKPHRLNHMGICSCGLYKQPGVPVRWKR

SEQ ID NO: 3771 - protein, 491 aa, Artificial Sequence
  derived and/or modified protein sequence (wt) from LASV(G2723-SLE-2012;Clade IV)__AIT17322__GPCstabilized
MGQIVTFFQEVPHVIEEVMNIVLIALSLLAVLKGLYNVATCGLIGLVTFLLLCGRSCTTNLYKGAYELQTLELNMETLNMTMPLSCTKNNSHHYIMVGNETGLELTLTNTSIINHKFCNLSDAHKKNLYDHTLMSIISTFHLSIPNFNQYEAMSCDFNGGKISVQYNLSHSYAVDAANHCGTVANGVLQTFMRMAWGGSYIALDSGCGNWDCIMTSYQYLIIQNTTWEDHCQFSRPSPIGYLGLLSQRTRDIYISRRRRGTFTWTLSDSEGNDTPGGYCLTRWMLIEAELKCFGNTAVAKCNEKHDEEFCDMLRLFDFNKQAIQRLKAPAQMSIQLINKAVNALINDQLIMKNHLRDIMCIPYCNYSKYWYLNHTTTGKTSLPKCWLVSNGSYLNETHFSDDIEQQADNMITEMLQKEYMERQGKTPLGLVDLFVFSTSFYLISIFLHLVKIPTHRHIVGKPCPKPHRLNHMGICSCGLYKQPGVPVRWKR

SEQ ID NO: 3772 - protein, 491 aa, Artificial Sequence
  derived and/or modified protein sequence (wt) from LASV(G2868-SLE-2012;Clade IV)__AIT17328__GPCstabilized
MGQIVTFFQEVPHVIEEVMNIVLITLSILAVLKGLYNIATCGLVGLVTFLLLCGKSCTTSLYKGVYELQTLELNMETLNMTMPLSCTKNNSHHYIRVGNETGLELTLTNTSIINHKFCNLSDAHKKNLYDHALMSIISTFHLSIPNFNQYEAMSCDFNGGKISVQYNLSHSYAVDAANHCGTVANGVLQTFMRMAWGGSYIALDSGCGNWDCIMTSYQYLIIQNTTWEDHCQFSRPSPIGYLGLLSQRTRDIYISRRRRGTFTWTLSDSEGNDAPGGYCLTRWMLIEAELKCFGNTAVAKCNEKHDEEFCDMLRLFDFNKQAIQRLKAPAQMSIQLINKAVNALINDQLIMKNHLRDIMCIPYCNYSKYWYLNHTTTGKTSLPKCWLVSNGSYLNETHFSDDIEQQADNMITEMLQKEYMERQGKTPLGLVDLFVFSTSFYLISIFLHLVKIPTHRHVVGKSCPKPHRLNHMGICSCGLYKQPGVPVKWKR

SEQ ID NO: 3773 - protein, 491 aa, Artificial Sequence
  derived and/or modified protein sequence (wt) from LASV(G2903-SLE-2012;Clade IV)__AIT17332__GPCstabilized
MGQIVTFFQEVPHVIEEVMNIVLIALSILAVLKGLYNLATCGLVGLVTFLLLCGRSCTTSLYKGVYELQTLELNMETLNMTMPLSCTKNNSHHYIRVGNETGLELTLTNTSIINHKFCNLSDAHKKNLYDHALMSIISTFHLSIPNFNQYEAMSCDFNGGKISVQYNLSHSYAVDAANHCGTVANGVLQTFMRMAWGGSYIALDSGCGRWDCIMTSYQYLIIQNTTWEDHCLFSRPSPIGYLGLLSQRTRDIYISRRRRGTFTWTLSDSEGRDTPGGYCLTRWMLIEAELKCFGNTAVAKCNEKHDEEFCDMLRLFDFNKQAIQRLKAPAQMSIQLINKAVNALINDQLIMKNHLRDIMCIPYCNYSKYWYLNHTTTGRTSLPRCWLVSNGSYLNETHFSDDIEQQADNMITEMLQKEYMERQGKTPLGLVDLFVFSTSFYLISIFLHLVKIPTHRHIVGKSCPKPHRLNHMGICSCGLYKQPGVPVKWKR

SEQ ID NO: 3774 - protein, 491 aa, Artificial Sequence
  derived and/or modified protein sequence (wt) from LASV(G2944-SLE-2012;Clade IV)__AIT17340__GPCstabilized
MGQIVTFFQEVPHVIEEVMNIVLIALSILAVLKGLYNFATCGLVGLVTFLLLCGRSCTTSLYKGVYELQTLELNMETLNMTMPLSCTKNNSHHYIMVGNETGLELTLTNISIINHKFCNLSDAHKKNLYDHALMSIISTFHLSIPNFNQYEAMSCDFNGGKISVQYNLSHSYAGDAANHCGTVANGVLQTFMRMAWGGSYIALDSGCGEWDCIMTSYQYLIIQNTTWEDHCQFSRPSPIGYLGLLSQRTRDIYISRRRRGTFTWTLSDSEGKDTPGGYCLTRWMLIEAELKCFGNTAVAKCNEKHDEEFCDMLRLFDFNKQAIQRLKAPAQMSIQLINKAVNALINDQLIMKNHLRDIMCIPYCNYSKYWYLNHTTTGKTSLPKCWLVSNGSYLNETHFSDDIEQQADNMITEMLQKEYMERQGKTPLGLVDLFVFSTSFYLISIFLHLVKIPTHRHIVGKPCPRPHRLNHMGICSCGLYKQPGVPVKWKR

SEQ ID NO: 3775 - protein, 491 aa, Artificial Sequence
  derived and/or modified protein sequence (wt) from LASV(G3010-SLE-2013;Clade IV)__AIT17344__GPCstabilized
MGQIVTFFQEVPHVIEEVMNIVLIALSILAVLKGLYNFATCGLVGLVTFLLLCGRSCTTSLYKGVYELQTLELNMETLNMTMPLSCTKNNSHHYIMVGNETGLELTLTNTSIINHKFCNLSDAHKKNLYNHALMSIISTFHLSIPNFNQYEAMSCDFNGGKISVQYNLSHSYAGDAASHCGTVANGVLQTFMRMAWGGSYIALDSGCGKWDCIMTSYQYLIIQNTTWEDHCQFSRPSPIGYLGLLSQRTRDIYISRRRRGTFTWTLSDSEGKDTPGGYCLTRWMLIEAELKCFGNTAVAKCNEKHDEEFCDMLRLFDFNKQAIQRLKTPAQMSIQLINKAVNALINDQLIMKNHLRDIMCIPYCNYSKYWYLNHTTTGKTSLPKCWLVSNGSYLNETHFSDDIEQQADNMITEMLQKEYMERQGKTPLGLVDLFVFSTSFYLISIFLHLVKIPTHRHIVGKSCPKPHRLNHMGICSCGLYKQPGVPVRWKR

SEQ ID NO: 3776 - protein, 491 aa, Artificial Sequence
  derived and/or modified protein sequence (wt) from LASV(G3016-SLE-2013;Clade IV)__AIT17348__GPCstabilized
MGQIVTFFQEVPHVIEEVMNIVLIALSILAVLKGLYNIATCGLIGLVTFLLLCGRSCTTSLYKGVYELQTLELNMETLNMTMPLSCTKNNSHHYIMVGNETGLELTLTNTSIINHKFCNLSDAHKKNLYDHALMSIISTFHLSIPNFNQYEAMSCDFNGGKISVQYNLSHSYAGDAANHCGTVANGVLQTFMRMAWGGSYIALDSGCGRWDCIMTSYQYLIIQNTTWEDHCQFSRPSPIGYLGLLSQRTRDIYISRRRRGTFTWTLSDSEGNDTPGGYCLTRWMLIEAELKCFGNTAVAKCNEKHDEEFCDMLRLFDFNKQAIQRLKAPAQMSIQLINKAVNALINDQLIMKNHLRDIMCIPYCNYSKYWYLNHTTTGKTSLPKCWLVSNGSYLNETHFSDDIEQQADNMITEMLQKEYMERQGKTPLGLVDLFVFSTSFYLISIFLHLVKIPTHRHIVGKPCPKPHRLNHMGICSCGLYKQPGVPVKWKR

SEQ ID NO: 3777 - protein, 491 aa, Artificial Sequence
  derived and/or modified protein sequence (wt) from LASV(G3034-SLE-2013;Clade IV)__AIT17350__GPCstabilized
MGQIVTFFQEVPHVIEEVMNIVLIALSILAVLKGLYNVATCGLIGLVTFLLLCGRSCTTTLYKGVYELQALELNMETLNMTMPLSCTKNNSHHYIMVGNETGLELTLTNTSIIDHKFCNLSDAHKKNLYDHALMSIISTFHLSIPNFNQYEAMSCDFNGGKISVQYNLSHSYAGDAAKHCGTVANGVLQTFMRMAWGGSYIALDSGCNGWDCVMTSYQYLIIQNTTWEDHCQFSRPSPIGYLGLLSQRTRDIYISRRRRGTFTWTLSDSEGKDTPGGYCLTRWMLIEAELKCFGNTAVAKCNEKHDEEFCDMLRLFDFNKQAIQRLKTPAQMSIQLINKAVNALINDQLIMKNHLRDIMCIPYCNYSKYWYLNHTVTGKTSLPRCWLVSNGSYLNETHFSDDIEQQADNMITEMLQKEYIERQGKTPLGLVDLFVFSTSFYLISIFLHLVKIPTHRHIIGKPCPKPHRLNHMGICSCGLYKQPGVPVRWKR

SEQ ID NO: 3778 - protein, 491 aa, Artificial Sequence
  derived and/or modified protein sequence (wt) from LASV(G3101-SLE-2013;Clade IV)__AIT17354__GPCstabilized
MGQIVTFFQEVPHVIEEVMNIVLIALSILAVLKGLYNFATCGLVGLVTFLLLCGRSCTTSLYKGVYELQTLELNMETLNMTMPLSCTKNNSHHYIMVGNETGLELTLTNISIINHKFCNLSDAHKKNLYDHALMSIISTFHLSIPNFNQYEAMSCDFNGGKISVQYNLSHSYAGDAANHCGTVANGVLQTFMRMAWGGSYIALDSGCGGWDCIMTSYQYLIIQNTTWEDHCQFSRPSPIGYLGLLSQRTRDIYISRRRRGTFTWTLSDSEGKDTPGGYCLTRWMLIEAELKCFGNTAVAKCNEKHDEEFCDMLRLFDFNKQAIQRLKAPAQMSIQLINKAVNALINDQLIMKNHLRDIMCIPYCNYSKYWYLNHTTTGKTSLPKCWLVSNGSYLNETHFSDDIEQQADNMITEMLQKEYMERQGKTPLGLVDLFVFSTSFYLISIFLHLVKIPTHRHIVGKPCPRPHRLNHMGICSCGLYKQPGVPVKWKR

SEQ ID NO: 3779 - protein, 491 aa, Artificial Sequence
  derived and/or modified protein sequence (wt) from LASV(G3110-SLE-2013;Clade IV)__AIT17360__GPCstabilized
MGQIVTFFQEVPHVIEEVMNIVLIALSILAVLKGLYNFATCGLVGLVTFLLLCGRSCTTSLYKGVYELQTLELNMETLNMTMPLSCTKNNSHHYIRVGNETGLELTLTNTSIINHRFCNLSDAHKKNLYDHALMSIISTFHLSIPNFNQYEAMSCDFNGGKISVQYNLSHSYAGDAANHCGTVANGVLQTFMRMAWGGSYIALDSGCGKWDCIMTSYQYLIIQNTTWDDHCQFSRPSPIGYLGLLSQRTRDIYISRRRRGTFTWTLSDSEGKDTPGGYCLTRWMLIEAELKCFGNTAVAKCNEKHDEEFCDMLRLFDFNKQAIRRLKAPAQMSIQLINKAVNALINDQLIMKNHLRDIMCIPYCNYSKYWYLNHTTTGKTSLPRCWLVSNGSYLNETHFSDDIEQQADNMITEMLQKEYMERQGKTPLGLVDLFVFSTSFYLISIFLHLVKIPTHRHIVGKSCPKPHRLNHMGICSCGFYKQPGVPVKWKR

SEQ ID NO: 3780 - protein, 491 aa, Artificial Sequence
  derived and/or modified protein sequence (wt) from LASV(G3148-SLE-2013;Clade IV)__AIT17364__GPCstabilized
MGQIVTFFQEVPHVIEEVMNIVLIALSILAVLKGLYNFATCGLVGLVTFLLLCGRSCTTSLYKGVYELQTLELNMETLNMTMPLSCTKNNSHHYIMVGNETGLELTLTNTSIINHKFCNLSDAHKKNLYDHALMSIISTFHLSIPNFNQYEAMSCDFNGGKISVQYNLSHSYAGDAANHCGTVANGVLQTFMRMAWGGSYIALDSGCDRWDCIMTSYQYLIIQNTTWEDHCQFSRPSPIGYLGLLSQRTRDIYISRRRRGTFTWTLSDSEGKDTPGGYCLTRWMLIEAELKCFGNTAVAKCNEKHDEEFCDMLRLFDFNKQAIQRLKAPAQMSIQLINKAVNALINDQLIMKNHLRDIMCIPYCNYSKYWYLNHTTTGKTSLPKCWLVSNGSYLNETHFSDDIEQQADNMITEMLQKEYIERQGKTPLGLVDLFVFSTSFYLISIFLHLVKIPTHRHIVGKPCPKPHRLNHMGICSCGLYKQPGVSVKWKR

SEQ ID NO: 3781 - protein, 491 aa, Artificial Sequence
  derived and/or modified protein sequence (wt) from LASV(G3151-SLE-2013;Clade IV)__AIT17368__GPCstabilized
MGQIVTFFQEVPHVIEEVMNIVLIALSILAVLKGLYNFATCGLVGLVTFLLLCGRSCTTSLYKGVYELQTLELNMETLNMTMPLSCTKNNSHHYIMVGNETGLELTLTNTSIINHKFCNLSDAHKKNLYDHALMSIISTFHLSIPNFNQFEAMSCDFNGGKISVQYNLSHSYAGDAANHCGTVANGVLQTFMRMAWGGSYIALDSGCSKWDCIMTSYQYLIIQNTTWDDHCQFSRPSPIGYLGLLSQRTRDIYISRRRRGTFTWTLSDSEGKDTPGGYCLTRWMLIEAELKCFGNTAVAKCNEKHDEEFCDMLRLFDFNKQAIQRLKAPAQMSIQLINKAVNALINDQLIMKNHLRDIMCIPYCNYSKYWYLNHTTTGKTSLPKCWLVSNGSYLNETHFSDDIEQQADNMITEMLQKEYMERQGKTPLGLVDLFVFSTSFYLISIFLHLVKIPTHRHIVGKSCPKPHRLNYMGICSCGFYKQPGVPVKWKR

SEQ ID NO: 3782 - protein, 491 aa, Artificial Sequence
  derived and/or modified protein sequence (wt) from LASV(G3157-SLE-2013;Clade IV)__AIT17370__GPCstabilized
MGQIVTFFQEVPHVIEEVMNIVLIALSILAVLKGLYNFATCGLVGLVTFLLLCGRSCTTSLYKGVYELQTLELNMETLNMTMPLSCTKNNSHHYIMVGNETGLELTLTNTSIINHKFCNLSDAHKKNLYDHALMSIISTFHLSIPNFNQYEAMSCDFNGGKISVQYNLSHSYAGDAANHCGTVANGVLQTFMRMAWGGSYIALDSGCDRWDCIMTSYQYLIIQNTTWEDHCQFSRPSPIGYLGLLSQRTRDIYISRRRRGTFTWTLSDSEGKDTPGGYCLTRWMLIEAELKCFGNTAVAKCNEKHDEEFCDMLRLFDFNKQAIQRLKAPAQMSIQLINKAVNALINDQLIMKNHLRDIMCIPYCNYSKYWYLNHTTTGKTSLPKCWLVSNGSYLNETHFSDDIEQQADNMITEMLQKEYMERQGKTPLGLVDLFVFSTSFYLISIFLHLVKIPTHRHIVGKPCPKPHRLNHMGICSCGLYKQPGVSVKWKR

SEQ ID NO: 3783 - protein, 491 aa, Artificial Sequence
  derived and/or modified protein sequence (wt) from LASV(G3206-SLE-2013;Clade IV)__AIT17378__GPCstabilized
MGQIVTFFQEVPHVIEEVMNIVLIALSILAVLKGLYNLATCGLVGLVTFLLLCGRSCTTSLYKGVYELQTLELNMETLNMTMPLSCTKNNSHHYIMVGNETGLELTLTNTSIINHKFCNLSDAHKKNLYDHTLMSIISTFHLSIPNFNQYEAMSCDFNGGKISVQYNLSHSYAVDAANHCGTVANGVLQTFMRMAWGGSYIALDSGCSGWDCIMTSYQYLVIQNTTWEDHCQFSRPSPIGYLGLLSQRTRDIYISRRRRGTFTWTLSDSEGKNTPGGYCLTRWMLIEAELKCFGNTAVAKCNEKHDEEFCDMLRLFDFNKQAIQRLKAPAQMSIQLINKAVNALINDQLIMKNHLRDIMCIPYCNYSKYWYLNHTTTGRTSLPRCWLVSNGSYLNETHFSDDIEQQADNMITEMLQKEYMERQGKTPLGLVDLFVFSTSFYLISIFLHLVKIPTHRHIVGKSCPKPHRLNHMGICSCGFYKQPGVPVKWKR

SEQ ID NO: 3784 - protein, 491 aa, Artificial Sequence
  derived and/or modified protein sequence (wt) from LASV(G3234-SLE-2013;Clade IV)__AIT17388__GPCstabilized
MGQIVTFFQEVPHVIEEVMNIVLIALSILAVLKGLYNVATCGLIGLVTFLLLCGRSCTTTLYKGVYELQALELNMETLNMTMPLSCTKNNSHHYIRVGNETGLELTLTNTSIINHKFCNLSDAHKKNLYDHALMSIISTFHLSIPNFNQYEAMSCDFNGGIISVQYNLSHSYAGDAANHCGTVANGVLQTFMRMAWGGSYIALDSGCNGWDCIMTSYQYLIIQNTTWDDHCQFSRPSPIGYLGLLSQRTRDIYISRRRRGTFTWTLSDSEGKDTPGGYCLTRWMLIEAELKCFGNTAVAKCNEKHDEEFCDMLRLFDFNKQAIQRLKTPAQMNIQLINKAVNALINDQLIMKNHLRDIMCIPYCNYSKYWYLNNTATGKTSLPRCWLVSNGSYLNETHFSDDIEQQADNMITEMLQKEYMERQGKTPLGLVDLFVFSTSFYLISIFLHLVKIPTHRHIVGKPCPKPHRLNHIGICSCGLYKQPGVPVKWKR

SEQ ID NO: 3785 - protein, 491 aa, Artificial Sequence
  derived and/or modified protein sequence (wt) from LASV(G502-SLE-2009;Clade IV)__AIT17126__GPCstabilized
MGQIVTFFQEVPHVIEEVMNIVLIALSILAVLKGLYNFATCGLVGLLTFLLLCGRSCTTGLYKGVYELQTLELNMETLNMTMPLSCTKNNSHHYIMVGNETGLELTLTNTSIINHKFCNLSDAHKKNLYDHALMSIISTFHLSIPNFNQYEAMSCDFNGGKISVQYNLSHSYAGDAADHCGTVANGVLQTFMRMAWGGSYIALDSGCGRWDCIMTSYQYLIIQNTTWEDHCQFSRPSPIGYLGLLSQRTRDIYISRRRRGTFTWTLSDSEGKDTPGGYCLTRWMLIEAELKCFGNTAVAKCNEKHDEEFCDMLRLFDFNKQAIQRLKAPAQMSIQLINKAVNALINDQLVMKNHLRDIMCIPYCNYSRYWYLNHTTTGRTSLPKCWLVSNGSYLNETHFSDDIEQQADNMITEMLQKEYMERQGKTPLGLVDLFVFSTSFYLISIFLHLVKIPTHRHIVGKSCPKPHRLNHMGICSCGLYKQPGVPVKWKR

SEQ ID NO: 3786 - protein, 491 aa, Artificial Sequence
  derived and/or modified protein sequence (wt) from LASV(G503-SLE-2009;Clade IV)__AIT17130__GPCstabilized
MGQIVTFFQEVPHVIEEVMNIVLIALSILAVLKGLYNFATCGFVGLVTFLLLCGRSCTTSLYKGVYELQTLELNMETLNMTMPLSCTKNNSHHYIRVGNDTGLELTLTNTSIINHKFCNLSDAHKKNLYDHALMSIISTFHLSIPNFNQYEAMSCDFNGGKISVQYNLSHSYAVDAASHCGTIANGVLQTFMRMAWGGSYIALDSGCDRWDCIMTSYQYLIIQNTTWEDHCQFSRPSPIGYLGLLSQRTRDIYISRRRRGTFTWTLSDSEGKDTPGGYCLTRWMLIEAELKCFGNTAVAKCNEKHDEEFCDMLRLFDFNKQAIQRLKAPAQMSIQLINKAVNALINDQLIMKNHLRDIMCIPYCNYSKYWYLNHTTTGKTSLPKCWLVSNGSYLNETHFSDDIEQQADNMITEMLQKEYMERQGKTPLGLVDLFVFSTSFYLISIFLHLVKIPTHRHIVGKSCPKPHRLNHMGICSCGLYKQPGVPVKWKR

SEQ ID NO: 3787 - protein, 491 aa, Artificial Sequence
  derived and/or modified protein sequence (wt) from LASV(G610-SLE-2009;Clade IV)__AIT17134__GPCstabilized
MGQIVTFFQEVPHVIEEVMNIVLIALSILAVLKGLYNFATCGLVGLVTFLLLCGRSCTTSLYKGVYELQTLELNMETLNMTMPLSCTKNNSHHYIMVGNETGLELTLTNTSIINHKFCNLSDAHKKNLYDHALMSIISTFHLSIPNFNQYEAMSCDFNGGKISVQYNLSHSYAGDAANHCGTVANGVLQTFMRMAWGGSYIALDSGCGRWDCIMTSYQYLIIQNTTWEDHCQFSRPSPIGYLGLLSQRTRDIYISRRRRGTFTWTLSDSEGKDTPGGYCLTRWMLIEAELKCFGNTAVAKCNEKHDEEFCDMLRLFDFNKQAIQRLKAPAQMSIQLINKAVNALINDQLIMKNHLRDIMCIPYCNYSKYWYLNHTTTGKTSLPKCWLVSNGSYLNETHFSDDIEQQADNMITEMLQKEYMERQGKTPLGLVDLFVFSTSFYLISIFLHLVKIPTHRHIVGKSCPKPHRLNHMGICSCGLYKQPGVPVKWKR

SEQ ID NO: 3788 - protein, 491 aa, Artificial Sequence
  derived and/or modified protein sequence (wt) from LASV(G636-SLE-2009;Clade IV)__AIT17138__GPCstabilized
MGQIVTFFQEVPHVIEEVMNIVLIALSILAVLKGLYNLATCGLVGLVTFLLLCGRSCTTSLYKGVYELQTLELNMETLNMTMPLSCTKNNSHHYIMVGNETGLELTLTNTSLINHKFCNLSDAHKKNLYDHALMSIISTFHLSIPNFNQYEAMSCDFNGGKISVQYNLSHSYAVDAASHCGTVANGVLQTFMRMAWGGSYIALDSGCGGWDCIMTSYQYLIIQNTTWEDHCQFSRPSPIGYLGLLSQRTRDIYISRRRRGTFTWTLSDSEGKDTPGGYCLTRWMLIEAELKCFGNTAVAKCNEKHDEEFCDMLRLFDFNKQAIQRLKAPAQMSIQLINKAVNALINDQLIMKNHLRDIMCIPYCNYSKYWYLNHTTTGRTSLPRCWLVSNGSYLNETHFSDDIEQQADNMITEMLQKEYMERQGKTPLGLVDLFVFSTSFYLISIFLHLVKIPTHRHIVGKSCPKPHRLNHMGICSCGLYKQPGVPVKWKR

SEQ ID NO: 3789 - protein, 491 aa, Artificial Sequence
  derived and/or modified protein sequence (wt) from LASV(G692-SLE-2009;Clade IV)__AIT17146__GPCstabilized
MGQIVTFFQEVPHVIEEVMNIVLIALSILAVLKGLYNLATCGLVGLVTFLLLCGRSCTTSLYKGVYELQTLELNMETLNMTMPLSCTKNNSHHYIMVGNETGLELTLTNTSIINHKFCNLSDAHKKNLYDHALMSIISTFHLSIPNFNQYEAMSCDFNGGKISVQYNLSHSYAGDAANHCGTVANGVLQTFMRMAWGGSYIALDSGCGRWDCIMTSYQYLIIQNTTWEDHCSFSRPSPIGYLGLLSQRTRDIYISRRRRGTFTWTLSDSEGKDTPGGYCLTRWMLIEAELKCFGNTAVAKCNEKHDEEFCDMLRLFDFNKQAIQRLKAPAQMSIQLINKAVNALINDQLIMKNHLRDIMCIPYCNYSKYWYLNHTTTGKTSLPKCWLVSNGSYLNETHFSDDIEQQADNMITEMLQKEYMERQGKTPLGLVDLFVFSTSFYLISIFLHLVKIPTHRHIVGKSCPKPHRLNHMGICSCGFYKQPGVPVKWKR

SEQ ID NO: 3790 - protein, 491 aa, Artificial Sequence
  derived and/or modified protein sequence (wt) from LASV(G733-SLE-2010;Clade IV)__AIT17154__GPCstabilized
MGQIVTFFQEVPHVIEEVMNIVLIALSILAVLKGLYNFATCGIVGLVSFLLLCGRSCTTSLYKGVYELQTLELNMETLNMTMPLSCTKNNSHHYIMVGNETGLELTLTNTSIINHKFCNLSDAHKKNLYDHALMSIISTFHLSIPNFNQYEAMSCDFNGGKISVQYNLSHSYAGDAANHCGTIANGVLQTFMRMAWGGSYIALDSGCDRWDCIMTSYQYLIIQNTTWEDHCQFSRPSPIGYLGLLSQRTRDIYISRRRRGTFTWTLSDSEGKDTPGGYCLTRWMLIEAELKCFGNTAVAKCNEKHDEEFCDMLRLFDFNKQAIQRLKAPAQMSIQLINKAVNALINDQLIMKNHLRDIMCIPYCNYSKYWYLNHTTTGKTSLPKCWLVSNGSYLNETHFSDDIEQQADNMITEMLQKEYMERQGKTPLGLVDLFVFSTSFYLISIFLHLVKIPTHRHVVGKSCPKPHRLNHMGICSCGLYGQPGVPVKWKR

SEQ ID NO: 3791 - protein, 491 aa, Artificial Sequence
  derived and/or modified protein sequence (wt) from LASV(G771-SLE-2010;Clade IV)__AIT17158__GPCstabilized
MGQIVTFFQEVPHVIEEVMNIVLIALSILAVLKGLYNFATCGLVGLVTFLLLCGRSCTTSLYKGVYELQTLELNMETLNMTMPLSCTKNNSHHYIMVGNETGLELTLTNTSIINHKFCNLSDAHKKNLYDHALMSIISTFHLSIPNFNQYEAMSCDFNGGKISVQYNLSHSYAGDAANHCGTVANGVLQTFMRMAWGGSYIALDSGCDRWDCIMTSYQYLIIQNTTWEDHCQFSRPSPIGYLGLLSQRTRDIYISRRRRGTFTWTLSDSEGKDTPGGYCLTRWMLIEAELKCFGNTAVAKCNEKHDEEFCDMLRLFDFNKQAIQRLKAPAQMSIQLINKAVNALINDQLIMKNHLRDIMCIPYCNYSKYWYLNHTTTGKTSLPKCWLVSNGSYLNETHFSDDIEQQADNMITEMLQKEYMERQGKTPLGLVDLFVFSTSFYLISIFLHLVKIPTHRHIVGKSCPKPHRLNHMGICSCGLYKQPGVPVKWKR

SEQ ID NO: 3792 - protein, 491 aa, Artificial Sequence
  derived and/or modified protein sequence (wt) from LASV(G808-SLE-2010;Clade IV)__AIT17164__GPCstabilized
MGQIVTFFQEVPHVIEEVMNIVLIALSILAVLKGLYNFATCGLVGLVTFLLLCGRSCTSSLYKGVYELQTLELNMETLNMTMPLSCTKNNSHHYIRVGNETGLELTLTNTSIIDHKFCNLSDAHKKNLYDHALMSIISTFHLSIPNFNQYEAMSCDFNGGKISVQYNLSHSYAGDAAKHCGTVANGVLQTFMRMAWGGSYIALDSGCGNWDCIMTSYQYLIIQNTTWEDHCQFSRPSPIGYLGLLSQRTRDIYISRRRRGTFTWTLSDSEGNDAPGGYCLTRWMLIQAELKCFGNTAVAKCNEKHDEEFCDMLRLFDFNKQAIQRLKAPAQMSIQLINKAVNALINDQLIMKNHLRDIMCIPYCNYSKYWYLNHTTTGRTSLPRCWLVSNGSYLNETHFSDDIEQQADNMITEMLQKEYMERQGKTPLGLVDLFVFSTSFYLISIFLHLVKIPTHRHIVGKSCPKPHRLNHMGICSCGLFKQPGVPVKWKR

SEQ ID NO: 3793 - protein, 491 aa, Artificial Sequence
  derived and/or modified protein sequence (wt) from LASV(Guinea Faranah;Clade IV)__AMZ00381__GPCstabilized
MGQIVTFFQEVPHVIEEVMNIVLIALSILAVLKGLYNVATCGLIGLIAFLLLCGRSCTSTLYKGVYELQALELNMETLNMTMPLSCTKNNSHHYIMVGNETGLELTLTNTSIINHKFCNLSDAHKKNLYNHALMSIISTFHLSIPNFNQYEAMSCDFNGGKISVQYNLSHSYAVDAANHCGTVANGILQTFMRMAWGGSYIALDSGCGGWDCIMSSYQYLVIQNTTWEDHCQFSRPSPIGYLGLLSQRTRDIYISRRRRGTFTWTLSDSEGKDTPGGYCLTRWMLIEAELKCFGNTAVAKCNEKHDEEFCDMLRLFDFNKQAIQRLKAPAQMSIQLINKAVNALINDQLIMKNHLRDIMCIPYCNYSKYWYLNHTITGRTSLPKCWLVSNGSYLNETHFSDDIEQQADNMITEMLQKEYLERQGKTPLGLVDLFVFSTSFYLISIFLHLIKIPTHRHIVGKSCPKPHRLNHMGVCSCGLYKQPGVPVRWKR

SEQ ID NO: 3794 - protein, 491 aa, Artificial Sequence
  derived and/or modified protein sequence (wt) from LASV(GUINEA Z-185a;Clade IV)__AMZ00377__GPCstabilized
MGQIVTFFQEVPHVIEEVMNIVLIALSILAVLKGLYNVATCGLIGLVTFLFLCGRSCSTSLYKGVYELQTLELNMETLNMTMPLSCTKNNSHHYIMVGNETGLELTLTNTSIINHKFCNLSDAHKKNLYDHTLMSIISTFHLSIPNFNQYEAMSCDFNGGKISVQYNLSHSYAVDAANHCGTVANGVLQTFMRMAWGGSYIALDSGCGNWDCIMTSYQYLVIQNTTWEDHCQFSRPSPIGYLGLLSQRTRDIYISRRRRGTFTWTLSDSEGKDTPGGYCLTRWMLIEAELKCFGNTAVAKCNEKHDEEFCDMLRLFDFNKQAIQRLKAPAQMSIQLINKAVNALINDQLIMKNHLRDIMCIPYCNYSKYWYLNHTVTGKTSLPKCWLVSNGSYLNETHFSDDIEQQADNLITEMLQKEYMERQGKTPLGLVDLFVFSTSFYLISIFLHLVKIPTHRHIVGKPCPKPHRLNHMGICSCGVYKQPGVPVRWKR

SEQ ID NO: 3795 - protein, 491 aa, Artificial Sequence
  derived and/or modified protein sequence (wt) from MOPV/LASV reassortant(IGS-1;Clade IV)__AFY05576__GPCstabilized
MGQIVTFFQEVPHVIEEVMNIVLIALSVLAVLKGLYNFATCGLVGLVTFLLLCGRSCTTSLYKGVYELQTLELNMETLNMTMPLSCTKNNSHHYIMVGNETGLELTLTNTSIINHKFCNLSDAHKKNLYDHALMSIISTFHLSIPNFNQYEAMSCDFNGGKISVQYNLSHSYAGDAANHCGTVANGVLQTFMRMAWGGSYIALDSGCGNWDCIMTSYQYLIIQNTTWEDHCQFSRPSPIGYLGLLSQRTRDIYISRRRRGTFTWTLSDSEGEDTPGGYCLTRWMLIEAELKCFGNTAVAKCNEKHDEEFCDMLRLFDFNKQAIQRLKAPAQMSIQLINKAVNALINDQLIMKNHLRDIMCIPYCNYSKYWYLNHTTTGRTSLPKCWLVSNGSYLNETHFSDDIEQQADNMITEMLQKEYMERQGKTPLGLVDLFVFSTSFYLISIFLHLVKIPTHRHIVGKSCPKPHRLNHMGICSCGLYKQPGVPVKWKR

SEQ ID NO: 3796 - protein, 491 aa, Artificial Sequence
  derived and/or modified protein sequence (wt) from MOPV/LASV reassortant(IGS-11;Clade IV)__AFY05588__GPCstabilized
MGQIVTFFQEVPHVIEEVMNIVLIALSVLAVLKGLYNFATCGLVGLVTFLLLCGRSCTTSLYKGVYELQTLELNMETLNMTMPLSCTKNNSHHYIMVGNETGLELTLTNTSIINHKFCNLSDAHKKNLYDHALMSIISTFHLSIPNFNQYEAMSCDFNGGKISVQYNLSHSYAGDAANHCGTVANGVLQTFMRMAWGGSYIALDSGCGNWDCIMTSYQYLIIQNTTWEDHCQFSRPSPIGYLGLLSQRTRDLYISRRRRGTFTWTLSDSEGEDTPGGYCLTRWMLIEAELKCFGNTAVAKCNEKHDEEFCDMLRLFDFNKQAIQRLKAPAQMSIQLINKAVNALINDQLIMKNHLRDIMCIPYCNYSKYWYLNHTTTGRTSLPKCWLVSNGSYLNETHFSDDIEQQADNMITEMLQKEYMERQGKTPLGLVDLFVFSTSFYLISIFLHLVKIPTHRHIVGKSCPKPHRLNHMGICSCGLYKQPGVPVKWKR

SEQ ID NO: 3797 - protein, 491 aa, Artificial Sequence
  derived and/or modified protein sequence (wt) from MOPV/LASV reassortant(IGS-12;Clade IV)__AFY05590__GPCstabilized
MGQIVTFFQEVPHVIEEVMNIVLIALSVLAVLKGLYNFATCGLVGLVTFLLLCGRSCTTSLYKGVYELQTLELNMETLNMTMPLSCTKNNSHHYIMVGNETGLELTLTNTSIINHKFCNLSDAHKKNLYDHALMSIISTFHLSIPNFNQYEAMSCDFNGGKISVQYNLSHSYAGDAANHCGTVANGVLQTFMRMAWGGSYIALDSGCGNWDCIMTSYQYLIIQNTTWEDHCQFSRPSPIGYLGLLSQRTRDMYISRRRRGTFTWTLSDSEGEDTPGGYCLTRWMLIEAELKCFGNTAVAKCNEKHDEEFCDMLRLFDFNKQAIQRLKAPAQMSIQLINKAVNALINDQLIMKNHLRDIMCIPYCNYSKYWYLNHTTTGRTSLPKCWLVSNGSYLNETHFSDDIEQQADNMITEMLQKEYMERQGKTPLGLVDLFVFSTSFYLISIFLHLVKIPTHRHIVGKSCPKPHRLNHMGICSCGLYKQPGVPVKWKR

SEQ ID NO: 3798 - protein, 491 aa, Artificial Sequence
  derived and/or modified protein sequence (wt) from LASV(LM032-SLE-2010;Clade IV)__AIT17802__GPCstabilized
MGQIVTFFQEVPHVIEEVMNIVLIALSILAVLKGLYNLATCGLVGLVTFLLLCGRSCTTSLYKGVYELQTLELNMETLNMTMPLSCTKNNSHHYIMVGNETGLELTLTNTSIINHKFCNLSDAHKKNLYNHALMSIISTFHLSIPNFNQYEAMSCDFNGGKISVQYNLSHSYAGDAANHCGTVANGVLQTFMRMAWGGSYIALDSGCDRWDCIMTSYQYLIIQNTTWEDHCQFSRPSPIGYLGLLSQRTRDIYISRRRRGTFTWTLSDSEGKDTPGGYCLTRWMLIEAELKCFGNTAVAKCNEKHDEEFCDMLRLFDFNKQAIQRLKAPAQMSIQLINKAVNALINDQLIMKNHLRDIMCIPYCNYSKYWYLNHTTTGKTSLPKCWLVSNGSYLNETHFSDDIEQQADNMITEMLQKEYMERLGKTPLGLVDLFVFSTSFYLISIFLHLVKIPTHRHIVGRSCPKPHRLNHMGICSCGLYKQPGVPVKWKR

SEQ ID NO: 3799 - protein, 491 aa, Artificial Sequence
  derived and/or modified protein sequence (wt) from LASV(LM222-SLE-2010;Clade IV)__AIT17806__GPCstabilized
MGQIVTFFQEVPHVIEEVMNIVLIALSILAVLKGLYNFATCGLIGLVTFLLLCGRSCTTSLYKGVYELQTLELNMETLNMTMPLSCTKNNSHHYIMVGNETGLELTLTNTSIINHKFCNLSDAHKKNLYDHALMSIISTFHLSIPNFNQYEAMSCDFNGGKISVQYNLSHSYAGDAANHCGTVANGVLQTFMRMAWGGSYIALDSGCGKWDCIMTSYQYLIIQNTTWEDHCQFSRPSPIGYLGLLSQRTRDIYISRRRRGTFTWTLSDSEGKDTPGGYCLTRWMLIEAELKCFGNTAVAKCNEKHDEEFCDMLRLFDFNKQAIQRLKAPAQMSIQLINKAVNALINDQLIMKNHLRDIMCIPYCNYSKYWYLNHTTTGKTSLPKCWLVSNGSYLNETHFSDDIEQQADNMITEMLQKEYMERQGKTPLGLVDLFVFSTSFYLISIFLHLVKIPTHRHIVGKSCPKPHRLNHMGICSCGLYKQPGVPVKWKR

SEQ ID NO: 3800 - protein, 491 aa, Artificial Sequence
  derived and/or modified protein sequence (wt) from LASV(LM395-SLE-2009;Clade IV)__AIT17810__GPCstabilized
MGQIVTFFQEVPHVIEEVMNIVLIALSILAVLKGLYNLATCGLVGLVTFLLLCGRSCTTSLYKGVYELQTLELNMETLNMTMPLSCTKDNSHHYIRVGNETGLELTLTNTSILNHKFCNLSDAHKKNLYDHALMSIISTFHLSIPNFNQYEAMSCDFNGGRISVQYNLSHSYAGDAANHCGTVANGVLQTFMRMAWGGSYIALDSGCGRWDCIMTSYQYLIIQNTTWEDHCQFSRPSPIGYLGLLSQRTRDIYISRRRRGTFTWTLSDSEGKDTPGGYCLTRWMLIEAELKCFGNTAVAKCNEKHDEEFCDMLRLFDFNKQAIQRLKAPAQMSIQLINKAVNALINDQLIMKNHLRDIMCIPYCNYSKYWYLNHTTTGKTSLPRCWLVSNGSYLNETHFSDDIEQQADNMITEMLQKEYMERQGKTPLGLVDLFVFSTSFYLISIFLHLVKIPTHRHVVGKPCPKPHRLNHMGICSCGLYKQPGVPVKWKR

SEQ ID NO: 3801 - protein, 491 aa, Artificial Sequence
  derived and/or modified protein sequence (wt) from LASV(LM765-SLE-2012;Clade IV)__AIT17814__GPCstabilized
MGQIVTFFQEVPHVIEEVMNIVLIALSILAVLKGLYNFATCGLVGLVTFLLLCGRSCTTSLYKGVYELQTLELNMETLNMTMPLSCTKNNSHHYIMVGNETGLELTLTNTSIIDHKFCNLSDAHRKNLYDHALMSIISTFHLSIPNFNQYEAMSCDFNGGKISVQYNLSHSYAKDAADHCGTVANGVLQTFMRMAWGGSYIALDSGCGRWDCIMTSYQYLIIQNTTWEDHCQFSRPSPIGYLGLLSQRTRDIYISRRRRGTFTWTLSDSEGKDTPGGYCLTRWMLIEAELKCFGNTAVAKCNEKHDEEFCDMLRLFDFNKQAIQRLKAPAQMSIQLINKAVNALINDQLIMKNHLRDIMCIPYCNYSKYWYLNHTTTGKTSLPKCWLVSNGSYLNETHFSDDIEQQADNMITEMLQKEYMERQGKTPLGLVDLFVFSTSFYLISIFLHLVKIPTHRHIVGKPCPKPHRLNHMGICSCGLYKQPGVPVKWKR

SEQ ID NO: 3802 - protein, 491 aa, Artificial Sequence
  derived and/or modified protein sequence (wt) from LASV(LM774-SLE-2012;Clade IV)__AIT17820__GPCstabilized
MGQIVTFFQEVPHVIEEVMNIVLIALSILAVLKGLYNFATCGLVGLVTFLLLCGRSCTTSLYKGVYELQTLELNMETLNMTMPLSCTKNNSHHYIMVGNETGLELTLTNTSIINHKFCNLSDAHKKNLYDHALMSIISTFHLSIPNFNQYEAMSCDFNGGKISVQYNLSHSYAEDAANHCGTVANGVLQTFMRMAWGGSYIALDSGCGNWDCIMTSYQYLIIQNTTWEDHCQFSRPSPIGYLGLLSQRTRDIYISRRRRGTFTWTLSDSEGKDTPGGYCLTRWMLIEAELKCFGNTAVAKCNEKHDEEFCDMLRLFDFNKQAIQRLKAPAQMSIQLINKAVNALINDQLIMKNHLRDIMCIPYCNYSKYWYLNHTTTGKTSLPKCWLVSNGSYLNETHFSDDIEQQADNMITEMLQKEYMERQGKTPLGLVDLFVFSTSFYLISIFLHLVKIPTHRHIVGKSCPKPHRLNHMGICSCGLYKQPGVPVKWKR

SEQ ID NO: 3803 - protein, 491 aa, Artificial Sequence
  derived and/or modified protein sequence (wt) from LASV(LM776-SLE-2012;Clade IV)__AIT17824__GPCstabilized
MGQIVTFFQEVPHVIEEVMNIVLIALSILAVLKGLYNFATCGLVGLVTFLLLCGRSCTTSVYKGVYELQTLELNMETLNMTMPLSCTKNNSHHYIMVGNETGLELTLTNTSIINHKFCNLSDAHKKNLYDHALMSIISTFHLSIPNFNQYEAMSCDFNGGKISVQYNLSHSYAGDAANHCGTVANGVLQTFMRMAWGGSYIALDSGCGKWDCIMTSYQYLIIQNTTWEDHCQFSRPSPIGYLGLLSQRTRDIYISRRRRGTFTWTLSDSEGKDTPGGYCLTRWMLIEAELKCFGNTAVAKCNEKHDEEFCDMLRLFDFNKQAIQRLKAPAQMSIQLINKAVNALINDQLIMKNHLRDIMCIPYCNYSKYWYLNHTTTGKTSLPKCWLVSNGSYLNETHFSDDIEQQADNMITEMLQKEYMERQGKTPLGLVDLFVFSTSFYLISIFLHLVKIPTHRHIVGKSCPKPHRLNHMGICSCGLYKQPGVPVRWKR

SEQ ID NO: 3804 - protein, 491 aa, Artificial Sequence
  derived and/or modified protein sequence (wt) from LASV(LM778-SLE-2012;Clade IV)__AIT17828__GPCstabilized
MGQIVTFFQEVPHVIEEVMNIVLIALSILAVLKGLYNFATCGLVGLVTFLLLCGRSCTTSLYKGDYELQTLELNMETLNMTMPLSCTKNNSHHYIMVGNETGLELTLTNTSIINHKFCNLSDAHKKNLYDHALMSIISTFHLSIPNFNQYEAMSCDFNGGKISVQYNLSHSYAGDAANHCGTVANGVLQTFMRMAWGGSYIALDSGCGNWDCIMTSYQYLIIQNTTWEDHCQFSRPSPIGYLGLLSQRTRDIYISRRRRGTFTWTLSDSEGKDTPGGYCLTRWMLIEAELKCFGNTAVAKCNEKHDEEFCDMLRLFDFNKQAIQRLKAPAQMSIQLINKAVNALINDQLIMKNHLRDIMCIPYCNYSKYWYLNHTTTGKTSLPKCWLVSNGSYLNETHFSDDIEQQADNMITEMLQKEYMERQGKTPLGLVDLFVFSTSFYLISIFLHLVKIPTHRHIVGKSCPKPHRLNHMGICSCGLYKQPGVPVKWKR

SEQ ID NO: 3805 - protein, 491 aa, Artificial Sequence
  derived and/or modified protein sequence (wt) from LASV(Mad39;Clade IV)__ANH09722__GPCstabilized
MGQIVTFFQEVPHVIEEVMNIVLIALSILAVLKGLYNVATCGLIGLVTFLLLCGRSCTTTLYKGVYELQALELNMETLNMTMPLSCTKNNSHHYIRVGNETGLELTLTNTSLINHKFCNLSDAHKKNLYDHALMSIISTFHLSIPNFNQYEAMSCDFNDGKISVQYNLSHTYAGDTANHCGTVANGVLQTFMRMAWGGSYIALDSGCGGWDCIMTSYQYLIIQNTTWEDHCQFSRPSPIGYLGLLSQRTRDIYISRRRRGTFTWTLSDSEGKDTPGGYCLTRWMLIEAELKCFGNTAVAKCNEKHDEEFCDMLRLFDFNKQAIQRLKAPAQMSIQLINKAVNALINDQLIMKNHLRDIMCIPYCNYSKYWYLNHTVTGKTSLPKCWLVSNGSYLNETHFSDDIEQQADNMITEMLQKEYMERQGKTPLGLVDLFVFSTSFYLISIFLHLVKIPTHRHVVGKPCPKPHRLNHMGICSCGFYKQPGVPVRWKR

SEQ ID NO: 3806 - protein, 491 aa, Artificial Sequence
  derived and/or modified protein sequence (wt) from LASV(Mad41;Clade IV)__ANH09724__GPCstabilized
MGQIVTFFQEVPHVIEEVMNIVLIALSILAVLKGLYNVATCGLIGLVTFLLLCGRSCTTTLYKGVYELQALELNMETLNMTMPLSCTKNDSHHYIMVGNETGLELTLTNTSIISHKFCNLSDAHKQNLYDHALMSIISTFHLSIPNFNQYEAMSCDFNGGKISVQYNLSHTYAGDAANHCGTVANGVLQTFMRMAWGGSYIALDSGCGGWDCIMTSYQYLIIQNTTWEDHCQFSRPSPIGYLGLLSQRTRDIYISRRRRGTFTWTLSDSEGKDTPGGYCLTRWMLIEAELKCFGNTAVAKCNEKHDEEFCDMLRLFDFNKQAIQRLKAPAQMSIQLINKAVNALINDQLIMKNHLRDIMCIPYCNYSKYWYLNHTVTGKTSLPKCWLVSNGSYLNETHFSDDIEQQADNMITEMLQKEYMERQGKTPLGLVDLFVFSTSFYLISIFLHLVKIPTHRHVVGKPCPKPHRLNHMGICSCGFYGQPGVPVRWKR

SEQ ID NO: 3807 - protein, 491 aa, Artificial Sequence
  derived and/or modified protein sequence (wt) from LASV(Mad63;Clade IV)__ANH09728__GPCstabilized
MGQIVTFFQEVPHVIEEVMNIVLIALSVLAVLKGLYNVATCGLIGLVTFLLLCGRSCTTTLYKGVYELQALELNMGTLNMTMPLSCTKNNSHHYIMVGNETGLELTLTNTSIINHKFCNLSDAHKKDLYDHALMSIISTFHLSVPNFNQYEAMSCDFNGGKISVQYNLSHAYAGDTANHCGTVANGVLQTFMRMAWGGSYIALDSGCGGWDCIMTSYQYLIIQNTTWEDHCQFSRPSPIGYLGLLSQRTRDIYISRRRRGTFTWTLSDSEGEYTPGGYCLTRWMLIEAELKCFGNTAVAKCNEKHDEEFCDMLRLFDFNKQAIQRLKAPAQMSIQLINKAVNALINDQLIMKNHLRDIMCIPYCNYSKYWYLNHTVTGKTSLPKCWLVSNGSYLNETHFSDDIEQQADNMITEMLQKEYMERQGKTPLGLVDLFVFSTSFYLISIFLHLVKIPTHRHVVGKPCPKPHRLNHMGICSCGFYKQPGVPVRWKR

SEQ ID NO: 3808 - protein, 491 aa, Artificial Sequence
  derived and/or modified protein sequence (wt) from LASV(Mad69;Clade IV)__ANH09730__GPCstabilized
MGQIVTFFQEVPHVIEEVMNIVLIALSVLAVLKGLYNVATCGLIGLVTFLLLCGRSCTTTLYKGVYELQALELNMETLNMTMPLSCTKNNSHHYIMVGNETGLELTLTNTSIINHKFCNLSDAHKKNLYDHALMSIISTFHLSIPNFNQYEAMSCDFNQGKISVQYNLSHAYAGDAANHCGTVANGVLQTFMRMAWGGSYIALDSGCGGWDCIMTSYQYLIIQNTTWENHCQFSRPSPIGYLGLLSQRTRDIYISRRRRGTFTWTLSDSEGKGTPGGYCLTRWMLIEAELKCFGNTAVAKCNEKHDEEFCDMLRLFDFNKQAIQRFKAPAQMSIQLINKAVNALINDQLIMKNHLRDIMCIPYCNYSKYWYLNHTVTGKTSLPKCWLVSNGSYLNETHFSDDIEQQADNMITEMLQKEYMERQGRTPLGLVDLFVFSTSFYLISIFLHLVKIPTHRHVVGKPCPKPHRLNHMGICSCGFYKQPGVPVRWKR

SEQ ID NO: 3809 - protein, 491 aa, Artificial Sequence
  derived and/or modified protein sequence (wt) from LASV(Mad83;Clade IV)__ANH09732__GPCstabilized
MGQIVTFFQEVPHVIEEVMNIVLIALSILAVLKGVYNVATCGLIGLVTFLLLSGRSCTTTIYKGVYELQALELNMETLNMTMPLSCTKNNSHHYIMVGNETGLELTLTNTSIINHKFCNLSDAHKKNLYDHALMSIISTFHLSIPNFNQYEAMSCDFNGGKISVQYNLSHTYAGDAANHCGTVANGVLQTFMRMAWGGSYIALDSGCGGWDCIMTSYQYLIIQNTTWENHCQFSRPSPIGYLGLLSQRTRDIYISRRRRGTFTWTLSDSEGKDTPGGYCLTRWMLIEAELKCFGNTAVAKCNEKHDEEFCDMLRLFDFNKQAIQRLKAPAQMSIQLINKAVNALINDQLIMKNHLRDIMCIPYCNYSKYWYLNHTVTGKTSLPKCWLVSNGSYLNETHFSDDIEQQADNMITEMLQKEYMERQGKTPLGLVDLFVFSTSFYLISIFLHLVKIPTHRHIVGKPCPKPHRLNHMGICSCGFYKQPGVPVRWKR

SEQ ID NO: 3810 - protein, 491 aa, Artificial Sequence
  derived and/or modified protein sequence (wt) from LASV(NL;Clade IV)__AAO59512__GPCstabilized
MGQIVTFFQEVPHVIEEVMNIVLIALSILAVLKGLYNFATCGLVGLVAFLLLCGRSCTSSLYKGVYELQTLELNMETLNMTMPLSCTKNNSHHYIRVGNETGLELTLTNTSIINHKFCNLSDAHKKNLYDHALMSIISTFHLSIPNFNQYEAMSCDFNGGKISVQYNLSHSYAVDAAKHCGTVANGVLQTFMRMAWGGSYIALDSGCGRWDCIMTSYQYLIIQNTTWEDHCQFSRPSPIGYLGLLSQRTRDIYISRRRRGTFTWTLSDSEGKDTPGGYCLTRWMLIEAELKCFGNTAVAKCNEKHDEEFCDMLRLFDFNKQAIQRLKTPAQMSIQLINKAVNALINDQLIMKNHLRDIMCIPYCNYSRYWYLNHTTTGKTSLPKCWLVSNGSYLNETRFSDDIEQQADNMITEMLQKEYMERQGKTPLGLVDLFVFSTSFYLISIFLHLVKIPTHRHIVGKSCPKPHRLNHMGICSCGLYKQPGVPVKWKR

SEQ ID NO: 3811 - protein, 491 aa, Artificial Sequence
  derived and/or modified protein sequence (wt) from LASV(Z0947-SLE-2011;Clade IV)__AIT17840__GPCstabilized
MGQIVTFFQEVPHVIEEVMNIVLIALSILAVLKGLYNFATCGLVGLVTFLLLCGRSCTISLYKGVYELQTLELNMETLNMTMPLSCTKNNSHHYIMVGNETGLELTLTNTSIINHKFCNLSDAHKKNLYDHALMSIISTFHLSIPNFNQYEAMSCDFNGGKISVQYNLSHSYAGDAANHCGTVANGVLQTFMRMAWGGSYIALDSGCDRWDCIMTSYQYLIIQNTTWEDHCQFSRPSPIGYLGLLSQRTRDIYISRRRRGTFTWTLSDSEGKDTPGGYCLTRWMLIEAELKCFGNTAVAKCNEKHDEEFCDMLRLFDFNKQAIQRLKAPAQMSIQLINKAVNALINDQLIMKNHLRDIMCIPYCNYSKYWYLNHTTTGKTSLPKCWLVSNGSYLNETHFSDDIEQQADNMITEMLQKEYMERQGKTPLGLVDLFVFSTSFYLISIFLHLVKIPTHRHIVGKPCPKPHRLNHMGICSCGLYKQPGVPVKWKR

SEQ ID NO: 3812 - protein, 491 aa, Artificial Sequence
  derived and/or modified protein sequence (wt) from LASV(Z0948-SLE-2011;Clade IV)__AIT17844__GPCstabilized
MGQIVTFFQEVPHVIEEVMNIVLIALSILAVLKGLYNFATCGLVGLVTFLLLCGRSCTISLYKGVYELQTLELNMETLNMTMPLSCTKNNSHHYIMVGNETGLELTLTNTSIINHKFCNLSDAHKKNLYDHALMSIISTFHLSIPNFNQYEAMSCDFNGGKISVQYNLSHSYAGDAANHCGTVANGVLQTFMRMAWGGSYIALDSGCDRWDCIMTSYQYLIIQNTTWEDHCQFSRPSPIGYLGLLSQRTRDIYISRRRRGTFTWTLSDSEGKDTPGGYCLTRWMLIEAELKCFGNTAVAKCNEKHDEEFCDMLRLFDFNKQAIQRLKAPAQMSIQLINRAVNALINDQLIMKNHLRDIMCIPYCNYSKYWYLNHTTTGKTSLPKCWLVSNGSYLNETHFSDDIEQQADNMITEMLQKEYMERQGKTPLGLVDLFVFSTSFYLISIFLHLVKIPTHRHIVGKPCPKPHRLNHMGICSCGLYKQPGVPVKWKR

SEQ ID NO: 3813 - protein, 491 aa, Artificial Sequence
  derived and/or modified protein sequence (wt) from LASV(Z148;Clade IV)__AAT49008__GPCstabilized
MGQIVTFFQEVPHVIEEVMNIVLIALSILAVLKGLYNVATCGLIGLVTFLFLCGRSCSTTLYKGVYELQTLELNMETLNMTMPLSCTKNNSHHYIMVGNETGLELTLTNTSIINHKFCNLSDAHKKNLYDHTLMSIISTFHLSIPNFNQYEAMSCDFNGGKISVQYNLSHSYAVDAANHCGTVANGVLQTFMRMAWGGSYIALDSGCGNWDCIMTSYQYLIIQNTTWEDHCQFSRPSPIGYLGLLSQRTRDIYISRRRRGTFTWTLSDSEGKDTPGGYCLTRWMLIEAELKCFGNTAVAKCNEKHDEEFCDMLRLFDFNKQAIQRLKAPAQMSIQLINKAVNALINDQLIMKNHLRDIMCIPYCNYSRYWYLNHTVTGKTSLPKCWLVSNGSYLNETHFSDDIEQQADNLITEMLQKEYMERQGKTPLGLVDLFVFSTSFYLISIFLHLVKIPTHRHIVGKPCPKPHRLNHMGICSCGVYKQPGVPVRWKR

SEQ ID NO: 3814 - protein, 491 aa, Artificial Sequence
  derived and/or modified protein sequence (wt) from LASV(Bamba-R114;Clade V)__AHC95555__GPCstabilized
MGQIVTFFQEVPHVIEEVMNIVLIALSILAVLKGLYNIATCGLIGLVTFLLLCGRSCSSNLYKGVYELQSLDLNMETLNMTMPLSCTKNNSHHYIRAGNETGLELTLTNTSLINHKFCNLSDAHKKNLYDHTLMSIISTFHLSIPNFNQYEAMSCDFNGGKISVQYNLSHAYAIDAAEHCGTVANGVLQTFMRMAWGGSYIALDSGCGNWDCIMTSYQYLIIQNTTWEDHCQFSRPSPIGYLGLLSQRTRDIYISRRRRGTFTWTLSDSEGNATPGGYCLTRWMLIEAELKCFGNTAVAKCNEKHDEEFCDMLRLFDFNKQAISRLKSPAQMSIQLINKAVNALINDQLIMKNHLRDIMCIPYCNYSKYWYLNHTITGRTSLPKCWLVSNGSYLNETHFSDDIEQQADNMITEMLQKEYMERQGKTPLGLVDLFVFSTSFYLISIFLHLVKIPTHRHIVGKPCPKPHRLNHMGICSCGLYKQPGVPLKWKR

SEQ ID NO: 3815 - protein, 491 aa, Artificial Sequence
  derived and/or modified protein sequence (wt) from LASV(Komina-R16;Clade V)__AHC95557__GPCstabilized
MGQIVTFFQEVPHVIEEVMNIVLIALSILAVLKGLYNIATCGLIGLVTFFLLCGRSCSSNLYKGVYELQSLDLNMETLNMTMPLSCTKNNSHHYIRVGNETGLELTLTNTSLLNHKFCNLSDAHKRNLYDHALMSIISTFHLSIPNFNQYEAMSCDFNGGKITVQYNLSHSYAGDTAKHCGTIANGVLQTFMRMAWGGSYIALDSGCGNWDCIMTSYQYLIIQNTTWEDHCQFSRPSPIGYLGLLSQRTRDIYISRRRRGTFTWTLSDSEGNATPGGYCLTRWMLIEAELKCFGNTAVAKCNEKHDEEFCDMLRLFDFNKQAISRLRSPAQMSIQLINKAVNALINDQLIMKNHLRDIMCIPYCNYSKYWYLNHTVTGRTSLPKCWLVSNGSYLNETHFSDDIEQQADNMITEMLQKEYMDRQGKTPLGLVDLFVFSTSFYLISIFLHLVKIPTHRHIVGKPCPKPHRLNRMGICSCGLYKQPGVPVKWKR

SEQ ID NO: 3816 - protein, 491 aa, Artificial Sequence
  derived and/or modified protein sequence (wt) from LASV(Ouoma-R123;Clade V)__AHC95559__GPCstabilized
MGQIITFFQEVPHVIEEVMNIVLIALSILAVLKGLYNIATCGLIGLVTFLLLCGRSCSSSLYKGVYELQSLDLNMETLNMTMPLSCTKNNSHHYIRVGNETGLELTLTNTSLINHKFCNLSDAHKKNLYDHALMSIISTFHLSIPNFNQYEAMSCDFNGGKISVQYNLSHAYAIDAASHCGTVANGVLQTFMRMAWGGSYIALDSGCGNWDCIMTSYQYLIIQNTTWEDHCQFSRPSPIGYLGLLSQRTRDIYISRRRRGTFTWTLSDSEGNATPGGYCLTRWMLIEAELKCFGNTAVAKCNEKHDEEFCDMLRLFDFNKQAISRLKSPAQMSIQLINKAVNALINDQLIMKNHLRDIMCIPYCNYSKYWYLNHTVTGKTSLPKCWLVSNGSYLNETHFSDDIEQQADNMITEMLQKEYMERQGKTPLGLVDLFVFSTSFYLISIFLHLVKIPTHRHIVGKPCPKPHRLNHMGICSCGLYKQPGVPVKWKR

SEQ ID NO: 3817 - protein, 491 aa, Artificial Sequence
  derived and/or modified protein sequence (wt) from LASV(Soromba-R;Clade V)__AHC95553__GPCstabilized
MGQIVTFFQEVPHVIEEVMNIVLIALSILAVLKGLYNIATCGLIGLVTFFLLCGRSCSSNLYKGVYELQSLDLNMETLNMTMPLSCTKNNSHHYIRVGNETGLELTLTNTSLLDHKFCNLSDAHKKNLYDHALMSIISTFHLSIPNFNQYEAMSCDFNGGKITVQYNLSHSYAGDAARHCGTIANGVLQTFMRMAWGGSYIALDSGCGNWDCIMTSYQYLIIQNTTWEDHCQFSRPSPIGYLSLLSQRTRDIYISRRRRGTFTWTLSDSEGNATPGGYCLTRWMLIEAELKCFGNTAVAKCNEKHDEEFCDMLRLFDFNKQAISRLRSPAQMSIQLINKAVNALINDQLIMKNHLRDIMCIPYCNYSKYWYLNHTVTGRTSLPKCWLVSNGSYLNETHFSDDIEQQADNMITEMLQKEYMDRQGKTPLGLVDLFVFSTSFYLISIFLHLVKIPTHRHIVGKPCPKPHRLNRMGICSCGLYKQPGVPVKWKR

SEQ ID NO: 3818 - protein, 490 aa, Artificial Sequence; identical to SEQ ID NO: 3572
  derived and/or modified protein sequence (wt) from LASV(Alzey;Clade VI)__SCA79105__GPCstabilized

SEQ ID NO: 3819 - protein, 490 aa, Artificial Sequence
  derived and/or modified protein sequence (wt) from LASV(Lassa/H.sapiens-wt/TGO/2016/201600568;Clade VI)__AVN98153__GPCstabilized
MGQIITFFQEVPHVIEEVMNIVLIALSLLAILKGVYNVATCGIIGLVTFLFLCGRSCSLIYKGSYELQTLELNMETLNMTMPLSCTKNSSHHYIRVGNETGLELTLTNTSIINHKFCNLSDAHKRNLYDHALMSILSTFHLSIPNFNQYEAMSCDFNGGKISVQYNLSHAYAVDAAEHCGTVANGVLQTFMRMAWGGSYIALDSGCGNWDCIMTSYQYLIIQNTTWEDHCQFSRPSPIGYLGLLSQRTRDIYISRRRRGTFTWTLSDSEGNETPGGYCLTRWMLIEAELKCFGNTAVAKCNEKHDEEFCDMLRLFDFNKQAIQRLKSPAQMSIQLINKAVNALINDQLIMKNHLRDMMCIPYCNYSKYWYLNHTSSGRASLPKCWLVSNGSYLNETHFSDDIEQQADNMITEMLQKEYIDRQGKTPLGLVDLFVFSTSFYLISIFLHLIKIPTHRHIVGKPCPKPHRLNHMGICSCGLYKQPGVPTRWKR

SEQ ID NO: 3820 - protein, 490 aa, Artificial Sequence
  derived and/or modified protein sequence (wt) from LASV(NIGERIA IKEJI;Clade II)__AMZ00373__GPCstabilized
MGQIITFFQEVPHVIEEVMNIVLIALSLLAILKGIYNVATCGLFGLISFLFLCGRSCSTMYKGVYELQTLELDMANLNMTMPLSCTKNNSHHYIMVGNETGLELTLTNQSIINHKFCNLSDAHKKNLYDHTLMSIISTFHLSIPNFNQYEAMSCDFNGGKISVQYNLSHSYAVDAANHCGTVANGVLQTFMRMAWGGSYIALDSGCGNWDCIMTSYQYLIIQNTTWEDHCQFSRPSPIGYLGLLSQRTRDIYISRRRRGTFTWTLSDSEGNDAPGGYCLTRWMLIEAELKCFGNTAIAKCNEKHDEEFCDMLRLFDFNKQAIKRLKAPAQMSIQLINKAVNALINDQLIMKNHLRDIMCIPYCNYSKYWYLNNTVTGKSSLPKCWLVSNGSYLNETHFSDDIEQQADNMITEMLQKEYMDRQGKTPLGLVDLFVFSTSFYLISIFLHLVKIPTHRHITGKPCPKPHRLNHMGICSCGLYKQPGVPVKWKR

SEQ ID NO: 3821 - RNA, 1476 nt, Artificial Sequence
  derived and/or modified protein sequence (wt) from LASV(Josiah;Clade IV)__NP_694870__GPCstabilized
augggacaaauagugacauucuuccaggaagugccucauguaauagaagaggugaugaacauuguucucauugcacugucuguacuagcagugcugaaaggucuguacaauuuugcaacguguggccuuguugguuuggucacuuuccuccuguugugugguaggucuugcacaaccagucuuuauaaagggguuuaugagcuucagacucuggaacuaaacauggagacacucaauaugaccaugccucucuccugcacaaagaacaacagucaucauuauauaauggugggcaaugagacaggacuagaacugaccuugaccaacacgagcauuauuaaucacaaauuuugcaaucugucugaugcccacaaaaagaaccucuaugaccacgcucuuaugagcauaaucucaacuuuccacuuguccauccccaacuucaaucaguaugaggcaaugagcugcgauuuuaaugggggaaagauuagugugcaguacaaccugagucacagcuaugcuggggaugcagccaaccauugugguacuguugcaaaugguguguuacagacuuuuaugaggauggcuuggggugggagcuacauugcucuugacucaggcugcggcaacugggacuguauuaugacuaguuaucaauaucugauaauccaaaauacaaccugggaagaucacugccaauucucgagaccaucucccaucgguuaucucgggcuccucucacaaaggacuagagauauuuauauuaguagaagacgccggggcacauucacauggacacugucagauucugaagguaaagacacaccagggggauauugucugaccagguggaugcuaauugaggcugaacuaaaaugcuucgggaacacagcuguggcaaaauguaaugagaagcaugaugaggaauuuugugacaugcugaggcuguuugacuucaacaaacaagccauucaaagguugaaagcucccgcacaaaugagcauucaguugaucaacaaagcaguaaaugcuuugauaaaugaccaacuuauaaugaagaaccaucuacgggacaucaugugcauuccauacuguaauuacagcaaguauugguaccucaaccacacaacuacugggagaacaucacugcccaaauguuggcuuguaucaaaugguucauacuugaacgagacccacuuuucugaugauauugaacaacaagcugacaauaugaucacugagauguuacagaaggaguauauggagaggcaggggaagacaccauugggucuaguugaccucuuuguguucaguacaaguuucuaucuuauuagcaucuuccuucaccuagucaaaauaccaacucauaggcauauuguaggcaagucgugucccaaaccucacagauugaaucauaugggcauuuguuccuguggacucuacaaacagccuggugugccugugaaauggaagagauga

SEQ ID NO: 3822 - RNA, 1473 nt, Artificial Sequence
  derived and/or modified protein sequence (wt) from LASV(LP;Clade I)__AAF86701__GPCstabilized
auggggcagauuauuacauucuuucaagaagugccacauguaauagaggaagucaugaacauugugcuaauugcgcuuucucuauuggcaaucuugaagggcuuguauaacaucgcuacaugugggauuauuggauugguugccuuuuuauucuuguguggcaagucuuguucccuaacccuuaaagggggauaugagcugcaaaccuuagaauuaaauauggagacccuaaacaugaccaugcccuuaucaugcaccaagaacagcagucaucauuacauaagagugggcaaugagacuggauuagaauugacuuuaacuaacaccagcauuauaaaucacaaauuuugcaacuuauccgaugcucacaaaaagaaucuuuaugaucaugcucucaugagcaucaucucaacauuccaucuauccauuccaaacuucaaucaguaugaagccaugaguugugauuucaauggagggaaaaucagugugcaauacaaccucucucauuccuaugcuggggaugcggccgaacacugugggacaguugccaacggaguguugcaaacauuuaugagaauggccugggguggaagauacauugcauuagacucaggaugcggaaacugggacuguauaaugaccagcuaccaguaccugauaauucaaaauacaacaugggaggaccacugccaauucucaagaccgucuccuaucggguaccuuggccuuuugucacaaaggacaagagauauauauauaaguaggaggcgccgggggaccuucaccuggacauugucagauucugagggcaaugaaacaccaggugguuauuguuuaaccagguggaugcuaauugaagcagaacucaaguguuuugggaauacagcuguggcaaaaugcaaugagaagcaugaugaggaguuuugugacaugcugagauuguuugauuucaacaagcaagcaauccguagguugaaggcucccgcccagaugaguauucaauuaauaaauaaagccgugaaugccuuaaucaaugaucaauuaaucaugaagaaccauuuaagagacaucaugugcauucccuacugcaauuacagcaaguauugguaccuuaaucauacuaguagcgggagaacaucacuaccaaaguguuggcuuauauccaaugggucauaucuaaaugaaacccaguucucugaugacauagaacagcaagccgacaauaugaucacagagaugcuucagaaagaauacauugaaagacaagggaaaacgcccuugggacuaguggacauuuucaucuuuagcacaagcuuuuaucugaucagcauuuucuugcauuuaauuaaaaucccuacacaucgacacaucguugggaaacccugucccaaaccccauagacuaaaucacaugggaguauguuccuguggacuguacaaacacccugguguuccaacaaaguggaagagauag

SEQ ID NO: 3823 - RNA, 1473 nt, Artificial Sequence
  derived and/or modified protein sequence (wt) from LASV(803213;Clade II)__AAF86703__GPCstabilized
auggggcaaaucauaacauucuuccaagaggugccucaugucauagaggaggucaugaacauuguccuaauugcccucagucuccuggcgauacuaaaggggauuuacaauguugcuaccuguggucucuuuggguugaucuccuuucuucucuuauguggcagaucauguucaguaaccuauaaagguguuuaugagcuacaaacucuagaacugaacauggcaaaccuuaauaugacgaugcccuugucuuguacgaagaacaacagccaucauuacaucaugguuggaaaugaaacaggccuagagcugaccuuaacaaacacaagcaucauuaaccacaaguuuugcaaccuuucugaugcacauaaaaagaaucucuaugaccaugcucugaugagcaucaucucaacuuuccacuuaucuauuccaaacuuuaaucaguaugaagcaaugaguugugacuucaauggagggaaaauaaguguucaguacaaccucagucacuccuuugcuguggaugcagccaaccacugugggaccauugccaaugguguucugcagaccuuuaugaggauggcuugggguggcaguuacauagcacuugauuccggaugcgggaacugggauuguauaaugacuuccuaucaauacuugauaauucaaaacaccacuugggaagaucacugccaguuuucucgcccaucuccuauugguuacuuaggacuauugucacagagaacuagagauaucuauaucagucgaagacgccggggaacuuucacuuggacccuuucugauucugaagguaaugaagcaccugguggguauugucuaacuagauggauguuaauugaagcagaacugaaaugcuuugggaacacagcaguugcaaagugcaacgaaaaacaugaugaagaauuuugugacauguugagauuguuugauuucaacaaacaagcuauaaagaggcugaaaacacccgcacagaugaguauucagcugauaaacaaggcagugaaugcauuaaucaaugaccaacugauuaugaagaaccaucuaagggacaucaugugcauuccuuauugcaacuacaguagauauugguaucuaaaucacacugugacagggaagacaucacugccaagauguuggcuugugucaaaugguuccuaccuaaacgaaacacauuuuucugaugacauugaacaacaagcagacaacaugauaacagaaauguugcagaaagaguacauggacaggcaggggaaaacaccuuuaggguuaguggaccuuuuugucuuuagcacuagcuuuuaccucauaagcaucuuucuccaucuggucaagaucccaacucacaggcacaucguggggaaaccuugcccuaagccacacagacucaaccacaugggcaucugcucauguggucuguauaaacaucccgguguuccaguaaaauggaagagauaa

SEQ ID NO: 3824 - RNA, 1473 nt, Artificial Sequence
  derived and/or modified protein sequence (wt) from LASV(GA391;Clade III)__CAA36645__GPCstabilized
augggacagauugugacauucuuccaagaaguuccucauguuauugaggaagugaugaauauuguccuuauugcacuauccauccuagcaauucugaagggacuauacaauguugccacguguggcuugauagggcuugucacauuccuucuacuuucaggaaggucaugcucacugaucuacaaagggacuuacgagcugcaaacccuugaguugaauauggagacucuuaauaugaccaugccgcuauccugcacaaagaacaacagucaucauuauauaaggguggggaaugagacaggacuugagcucaccuugaccaacaccagcauucuuaaucacaaauucuguaaccucucugaugcccacaaaaggaaucuuuaugaucacagccucaugaguaucaucucuaccuuucaucuguccauucccaacuucaaucaauaugaggcaaugagcugcgauuucaauggggggaaaaucacugugcaauacaaccugagucauagcuucgcaguggaugcagcaggucacugcggcacacuugcaaauggugucuuacaaacauuuaugagaauggcuuggggagggaguuauauugcucuugauucuggaugcgguaacugggacuguauaaugaccaguuaccaauaucuaaucauucagaauacaaccugggaugaccacugccaauuuuccagaccaucaccuauuggcuaccuugggcuucucucacaaagaacuagagacauauacauuagcagaaggcgccgggggacauucaccuggacacuaucagacucagagggaaaugaaacaccagggggauacugccuuacuagauggauguugauugaggccgaauuaaagugcuuuggaaacacugcaguagccaagugcaaugagaaacaugaugaagaauuuugugacaugcuaagguuguucgauuucaacaaacaggccauaaggaggcucaaaacacccgcccaaaugagcauacagcugaucaacaaggcugucaaugcuuuaauaaaugaucagcucaucaugaagaaccacuugagagacaucaugugcauaccauauuguaacuacagcagauauugguaccuuaaccacacaucaacaggaaagaccucacuaccaagguguuggcuuaucucaaauggaucauaucucaaugagaccaaguuuucagaugacaucgaacaacaagcugacaacaugauaacagagaugcuacaaaaggaauacauagauagacagggcaaaacuccacugggguuaguugaccuauuuguuuuuagcacaaguuucuaucugauaagcaucuuucuccaccuggucaaaauaccaacccauagacacauuguagguaaaccuugcccaaaaccccacaggcugaaccacaugggcaucugcuccuguggucuauacaaacagccaggugugccugucagauggaagagguga

SEQ ID NO: 3825 - RNA, 1476 nt, Artificial Sequence
  derived and/or modified protein sequence (wt) from LASV(AV;Clade V)__CCA30314__GPCstabilized
auggggcaaauagugacauucuuucaagaggugccucaugugauagaagaggugaugaacauuguucuuauagcauugucuauauuggcaguguugaaaggucucuacaacauugccacaugcggccucaucggcuugaucacuuuccucuuauuauguggaaggucuugcucauccaaccucuacaagggggucuaugaacuucaaucucuggaccugaacauggagacacucaacaugaccaugccccucuccugcacaaagaacaauagucaucacuacauaaggguuggcaaugacacagggcuggaacugaccuugaccaacacgagcauacucaaucacaaauucugcaaccuaucagaugcucacaagaaagaccuauaugaucacgcacucaugagcauaaucucaacuuuccaccugucuauacccaauuucaaccaauacgaagcaaugaguugugacuucaaugggggcaaaaucagugugcaguacaaucuaagccauucuuaugcuauagaugcagcuaaucauugcggcacagucgcgaauggcaucuugcagacuuucaugagaauggcauggggugggagcuauauugcucuugacucaggcugcggaaacugggacuguauuaugacuagcuaucaauaucugauuauucagaacacaaccugggaaaaucacugucaguucucaagaccaucuccuauugguuaucuuggucuccucucacagaggacuagagacauuuacauuagcaggaggcgccggggcacauucacguggacacugucagacucugaggguaaugcuacaccaggagguuauugucugaccagguggauguuaauugaagcugaguugaaaugcuuuggaaacacagcaguagcaaaguguaaugaaaagcaugaugaagaauuuugcgacaugcucagacuuuuugauuuuaauaagcaggcuauaaguagauugaaaucucccgcacaaaugagcauccaacugaucaacaaagcagugaaugcuuugaucaacgaucaauuaauuaugaagaaccacuugcgagacaucaugugcauuccauauuguaauuacagcaaguauugguaccucaaucauacaauaacuggcaaaaccucauuaccuaaauguuggcuuguaucuaaugguucauacuugaaugaaacccauuuuucugacgacaucgagcaacaagcugacaauaugaucacagagaugcuacaaaaggaauacauggagaggcaagggaaaacgccuuuggguuuaguugaucuguuuguguuuagcacaaguuuuuaucuaauuaguaucuuccuccgacuagucaagauuccaacccauagacacauugugggcaaaccauguccuaagccccacagguugaaccacaugggcauuuguucuugcggcuuauacaagcagccuggcguccccgugagauggaagagauag

SEQ ID NO: 3826 - RNA, 1473 nt, Artificial Sequence
  derived and/or modified protein sequence (wt) from LASV(Togo/2016/7082;Clade VI)__AMR44577__GPCstabilized
auggggcaaauaauaaccuucuuccaggagguuccucauguuauagaggaggugaugaacauuguucugauagcacucucacuccuagcuauccugaaaggggucuacaauguggcaacaugugggauaauugggcuugugaccuuccucuuucucuguggaagaucuuguucacugaucuacaaaggcaguuaugagcugcaaacauuggaguuaaauauggagacccuaaacaugaccaugccucugucaugcacuaaaaauaguagccaccauuauauucgaguugggaacgagacuggcuuagagcugacauugaccaacaccagcauuauaaaucacaaauucuguaaccugucagaugcucacaaacguaaucuguaugaccacgcacucaugagcauccuuuccacauuccaucuguccaucccaaacuucaaccaguaugaggcgaugaguugugacuucaauggaggcaaaaucagugugcaauauaaucucagccaugcuuaugcaguugaugcugccgaacacugcggaacaguugcaaauggugugcuacaaacauucaugaggauggcuuggggaggaaguuacauugcacuugacucugggugcggcaauugggacuguauuaugacaagcuaccaauacuuaaucauucagaauacaacaugggaagaucacugccaauuuucaagaccuucuccuauugguuaucucggcuuauugucacaaagaacaagagacauuuauaucaguaggaggcgccgggguacauucaccuggacacuuucugacucagagggaaaugagacaccaggcggauacuguuuaacaagauggaugcugauagaggcugagcuaaaauguuuuggaaacacagcuguugcaaaguguaaugagaagcaugaugaggaauucugcgacauguuaagguuguuugacuucaacaaacaggcaauucagaggcucaaaucacccgcacaaaugagcauccaguuaauaaauaaagcagugaaugcauugauaaaugaucagcucauuaugaagaaccacuuaagggauaugaugugcauaccguauugcaacuacaguaaguauugguaucucaaucacaccucaucagggagaacaucguugccuaaaugcuggcuuguuuccaauggaaguuaucugaaugagacccacuucucagaugauauugaacaacaggcagacaacaugauaacugaaauguuacaaaaggaauauaucgauaggcaggguaaaacaccuuuaggacuuguugaccuuuuuguuuucagcacgaguuuuuaccuuauaaguauauucuuacacuugauaaagauaccuacucauaggcacauaguuggaaagccaugccccaagccacaccgccucaaccacauggggaucugcucuuguggacuauacaagcagccuggugucccaaccagauggaagagauaa

SEQ ID NO: 3827 - RNA, 1473 nt, Artificial Sequence
  derived and/or modified protein sequence (wt) from LASV(KAK-428;Clade n.d. (VII))__ANH09740__GPCstabilized
augggucaaauagugaccuucuuccaggaaguaccucauguuauagaggaagugaugaacauaguucugauagcacuuucucucuuagccauccugaagggccucuacaauuuugccaccuguggaguaauuggacugauaacauuccuuuuacuuuguggaagauccuguucagcgaccuacaaaggccaauaugaacuccaaacuuuagaacuaaauauggagucccuaaacaugaccaugccacugucuugcacaaaaaacaacagucaucauuauaucagagcuggcaacaacacaggccuggaguugacccucaccaacaccagcauuauaucucauaaauucugcaaccuuucugaugcucacaagaagaaccuuuaugaccacacucuuaugaguauaauaacuaccuuucauuuguccaucccaaauuucaaccaguaugaggcaaugaguugugacuuuaacggugggaaaaucagcauacaguacaaccucagucacuccuacgcuggugaugcugcgcaacacuguggaacaguugcaaauggggugcugcaaaccuuuaugagaauggcuuggggagguaguuaucuggcccuugauucaggaugcagagguugggacugcauaauuuccaguuaccaauacuugaucauccaaaacacaacuugggaugaccauugccaguuuucaaggccauccccgaucggguaucuuggguuuguaucgcagaagaccagggacaucuauauaaguagaagacgccggggaacuuuuacauggacacuuucagacuccgagggacaugacaugccaggugguuacugcuugaccagauggaugcucauugaagcugauuuaaaguguuuuggaaacacagcugucgcuaaguguaaugagaaacaugacgaggaguucugugacauguggagguuguuugacuuuaauaagcaagccauucaaaggcucaaagcacccgcccagaugaacauccagcucauaaauaaagcugucaaugcucucauaaaugaccaauugaugaugaaaaaccauuuaagggauaucaugugcauucccuauugcaauuacaguaaauucugguaucucaauaacaccacgacugggagaaccucacugccaagaugcuggcugauuucaaauggguccuacuuaaaugagacucacuucucagaugauauugaacagcaagcugacaauaugauaacugagauguugcagaaagaauacauggacagacaaggaaaaacaccgcuaggacugguugaucucuuuguauucaguacaagcuuuuaccucauuaccauuuucuuacaucuugugaaaauaccaacccacagacacauaguuggcaagccgugcccuaaaccacacagacugaaucacaugggcaucugcuccugugggcucuacaaacagccuggugugccaguacgauggaagagauga

SEQ ID NO: 3828 - RNA, 1473 nt, Artificial Sequence
  derived and/or modified protein sequence (wt) from LASV(Acar 3080;Clade I)__AAT49014__GPCstabilized
auggggcagauuauuacauucuuucaagaagugccacauguaauagaggaagucaugaacauugugcuaauugcgcuuucucuauuggcaaucuugaagggcuuguauaacaucgcuacaugugggauuauuggauugguugccuuuuuauucuuguguggcaagucuuguucccuaacccuuaaagggggauaugagcugcaaaccuuagaauuaaauauggagacccuaaacaugaccaugcccuuaucaugcaccaagaacagcagucaucauuacauaagagugggcaaugagacuggauuagaauugacuuuaacuaacaccagcauuauaaaucacaaauuuugcaacuuauccgaugcucacaaaaagaaucuuuaugaucaugcucucaugagcaucaucucaacauuccaucuauccauuccaaacuucaaucaguaugaagccaugaguugugauuucaauggagggaaaaucagugugcaauacaaccucucucauuccuaugcuggggaugcggccgaacacugugggacaguugccaacggaguguugcaaacauuuaugagaauggccugggguggaagauacauugcauuagacucaggaugcggaaacugggacuguauaaugaccagcuaccaguaccugauaauucaaaauacaacaugggaggaccacugccaauucucaagaccgucuccuaucggguaccuuggccuuuugucacaaaggacaagagauauauauauaaguaggaggcgccgggggaccuucaccuggacauugucagauucugagggcaaugaaacaccaggugguuauuguuuaaccagguggaugcuaauugaagcagaacucaaguguuuugggaauacagcuguggcaaaaugcaaugagaagcaugaugaggaguuuugugacaugcugagauuguuugauuucaacaagcaagcaauccguagguugaaggcucccgcccagaugaguauucaauuaauaaauaaagccgugaaugccuuaaucaaugaucaauuaaucaugaagaaccauuuaagagacaucaugugcauucccuacugcaauuacagcaaguauugguaccuuaaucauacuaguagcgggagaacaucacuaccaaaguguuggcuuauauccaaugggucauaucuaaaugaaacccaguucucugaugacauagaacagcaagccgaccauaugaucacagagaugcuucagaaagaauacauugaaagacaagggaaaacgcccuugggacuaguggacauuuucaucuuuagcacaagcuuuuaucugaucagcauuuucuugcauuuaauuaaaaucccuacacaucgacacaucguugggaaacccugucccaaaccccauagacuaaaucacaugggaguauguuccuguggacuguacaaacacccugguguuccaacaaaguggaagagauag

SEQ ID NO: 3829 - RNA, 1473 nt, Artificial Sequence; identical to SEQ ID NO: 3822
  derived and/or modified protein sequence (wt) from LASV(Pinneo-NIG-1969;Clade I)__AIT17836__GPCstabilized

SEQ ID NO: 3830 - RNA, 1473 nt, Artificial Sequence
  derived and/or modified protein sequence (wt) from LASV(ISTH0009-NIG-2011;Clade II)__AIT17404__GPCstabilized
augggacaaaucauaacauuuuuccaggaaguaccucaugucauagaggaagugaugaacauuguccugauugcucucagccuucuggcaauacugaaggggaucuacaauguugccaccuguggccuauuuggacugguguccuuucuccucuuaugugggagaucaugcucaacaacuuauaaggguguuuaugagcuacaaacucuagagcuggacauggcaagccuuaauaugacaaugccccuaucuugcacaaagaacaacagucaccauuacaucauggucggaaaugagacuggcuuggagcugacuuuaacaaauacaaguauuaucaaccacaaguuuuguaaccuuucugaugcacauaaaaagaaucucuaugaccaugcuuuaaugaguaucaucucaaccuuccacuuaucuauuccuaauuuuaaucaguaugaagcaaugaguugugacuucaauggggggaagauaaguguucaguacaaccuuagccacgcuuaugcuguagaugcagccaaucacugugggacuaucgccaauggcguucuucagacuuuuaugaggauggcuugggguggcaguuacauagcacuugauuccggaugcgggaguugggauuguauaaugacuuccuaccaauauuugauaauccagaacaccacuugggaagaucacugccaguuuucucgcccauccccuaucgguuaucuggggcuacugucacaaaggaccagagacauuuacaucagucgaagacgccgggggacuuuuacuuggacucucucugauucugaagguaaugaaacaccggguggguacugucuaacaagauggaugcugauugaggccgaguugaagugcuuugggaacacagcaguugcgaaaugcaaugagaaacaugaugaagaguuuugugacauguuaagacuguuugauuucaacaaacaagcuauaaggaggcuaaagacacccgcacagaugaguauccaacugauaaacaaagcagugaaugcauugaucaaugaccagcuuauuaugaagaaucacuugagagauaucaugugcauuccuuacugcaauuacagcaaguacugguaucuaaaucacacuguaacagggaagacaucguugccaaggugcuggcuugugucaaaugguuccuaccugaaugagacacauuuuucugaugacauugaacaacaggcagacaacaugauaacagaacuguugcaaaaggaguacauggacaggcaagggaaaacacccuuaggguuaguagaucuuuuugucuucagcaccagcuuuuaucucauuagcaucuuccuccaccugaucaaaaucccaacccacagacauaucacagggaaacccugcccuaaaccacacagacuuaaccacaugggcauaugcucauguggucuauacaaacauccugguguaccagucaaguggaaaagauag

SEQ ID NO: 3831 - RNA, 1473 nt, Artificial Sequence
  derived and/or modified protein sequence (wt) from LASV(ISTH0012-NIG-2011;Clade II)__AIT17408__GPCstabilized
augggacaaaucauaacauuuuuccaggaagugccucaugucauagaagaagugaugaacauuguccugauugcucucagccuucuggcaauauugaaagggaucuacaauguugcuaccuguggccucuuuggauugguguccuuccuucucuuauguggaagaucaugcucaacaacuuacaaagguguuuaugaauuacaaacucuagagcuagacauggcaagccuuaauaugacaaugcccuuaucuugcacaaagaauaacagccaccauuacaucauggucggaaaugagacugguuuagagcugacucuaacaaauacaaguaucaucaaccacaaguucuguaaccuuucugaugcacauaaaaagaaucuuuaugaccaugcuuuaaugaguaucaucucaaccuuccacuuauccauucccaacuucaaucaguaugaagcaaugaguugugacuucaauggggggaagauaaguguucaguacaaccuuagccacacuuaugcuguagaugcagcuaaccacugugggacuguugcuaauggcguucuccagacuuucaugaggauggcuugggguggcaguuacauagcacuugacuccgggugcgggagcugggauugcauaaugacuuccuaccaauaucugauaauccagaacaccacuugggaagaucacugccaguuuucucgcccaucccccaucgguuaucuggggcugcugucacaaaggaccagggacauuuacaucagucgaagacgccgggggacuuuuacuuggacccucucugauucugaaggcaaugaaacaccggguggguauugucuaacaagauggaugcugauugaggccgaauugaagugcuuugggaacacagcaguugcgaaaugcaaugagaaacaugaugaggaguuuugugacauguuaagauuguuugacuuuaacaaacaagcuauaaggaggcugaagacacccgcgcagaugaguauccaacugauaaacaaagcagugaacgcacugaucaaugaccagcugauuaugaagaaucauuuaagagauaucaugugcauuccuuacugcaauuacagcaaguauugguauuuaaaucacacuguaacagggaagacaucguugccaagaugcuggcuugugucgaaugguuccuaccugaaugagacacauuuuucugaugacauugaacaacaagcagacaacaugauaacagaacugcugcagaaggaguacauggacaggcaaggaaaaacacccuuaggguuaguagaucuuuuugucuucagcaccaguuuuuaucucauuagcaucuuucuccaccuggucaaaaucccaacucacagacaugucauaggaaaacccugcccuaaaccacacagacucaaccacaugggcauaugcucauguggucuguacaaacauccuggugugccagucaaauggaaaagauag

SEQ ID NO: 3832 - RNA, 1473 nt, Artificial Sequence
  derived and/or modified protein sequence (wt) from LASV(ISTH0047-NIG-2011;Clade II)__AIT17412__GPCstabilized
auggggcaaaucauaacauuuuuccaggaagugccucaugucauugaggaggugaugaacauugucuuaauugcucucagccuucuagcaauacuaaaagggauuuacaauguugcuaccuguggccucuuuggguuggugucuuuucuucucuuauguggaaggucaugcucaacaacuuacaaggguguuuaugagcuucaaacucuggagcuggauauggcaagccuuaauaugacaaugcccuuauccugcacgaagaacaacagccaccacuacaucaugguuggaaaugagacuggcuuggagcugacuuuaacaaacacaaguaucauuaaccacaaguucugcaaccuuucugaugcacauaaaaagaaucucuaugaccaugcuuuaaugagcaucaucucaaccuuccaccuaucuaucccuaacuuuaaucaguaugaagcaaugaguugugacuucaauggaggaaagauaaguguucaguacaaccucagccaugcuuaugcuguggaugcagcuaaccauugugggaccauugccaauggaguccuucaaacuuuuaugaggauggccugggguggcaguuacauagcacuugauucuggaugcgggaguugggauuguauaaugacguccuaccaauauuugauaauccaaaacaccaguugggaagaucacugccaguuuucucgcccgucccccaucgguuaucuggggcuacugucacaaagaaccagggacauuuacaucagccgaaggcgccggggaacuuuuacuuggacucucucugacucugagggcaaugaaacaccggguggguacuguuuaacaagauggauguugauugaggccgaauuaaagugcuuugggaacacagcaguugcgaaaugcaaugagaaacaugaugaagaguuuugugacauguuaagauuguuugacuuuaacaaacaggcuauaaggaggcuaaagacacccgcacagaugaguauccaacuaauaaacaaagcagugaacgcacugaucaaugaccagcucauuaugaagaaucauuuaagagauaucaugugcauuccuuacugcaauuacagcaaguauugguauuuaaaccacacuguaacagggaagacaucguugccaagaugcuggcuuguaucaaaugguuccuaccugaaugaaacacauuuuucugaugacauugagcaacaagcagacaacaugauaacagaauuguuacagaaagaguacauugacaggcaagggaaaacaccuuuaggguugguggaucuuuuugucuucagcacuagcuucuaccuuauuagcaucuuccuccaccuggucaaaaucccaacccacagacaugucauagggaaacccugccccaagccacacagacucaaccacaugggcauaugcucauguggucuguacaaacauccugguguaccagucaaguggaaaagauag

SEQ ID NO: 3833 - RNA, 1473 nt, Artificial Sequence
  derived and/or modified protein sequence (wt) from LASV(ISTH0073-NIG-2011;Clade II)__AIT17416__GPCstabilized
auggggcaaaucauaacguuuuuccaggaagugccucaugucauugaggaggugaugaacauugucuuaauugcucucagccuucuagcaauacuaaaagggauuuacaauguugcuaccuguggccucuuuggguugguguccuuucuucuuuuauguggaaggucaugcucaacaacuuacaaggguguuuaugagcuucaaacucuggagcuggauauggcaagccuuaauaugacaaugcccuuauccugcacgaagaacaacagccaccacuacaucaugguuggaaaugagacuggcuuggagcugacuuuaacaaacacaaguaucaucaaccacaaguucugcaaccuuucugaugcacauagaaagaaucucuaugaccaugcuuuaaugagcaucaucucaaccuuccaccuauccaucccuaacuuuaaucaguaugaagcaaugaguugugacuucaauggaggaaagauaaguguucaguauaaccucagccaugcuuaugcuguggaugcagcuaaccauugugggaccauugccaacggaguccuucaaacuuuuaugaggauggccugggguggcaguuacauagcacuugauucuggaugcgggaguugggauuguauaaugacguccuaccaauauuugauaauccaaaacaccaguugggaagaucacugccaguuuucucgcccguccccuaucgguuaucuggggcugcugucacaaagaaccagggacauuuacaucagccgaaggcgccggggaacuuuuacuuggacucucucugacucugagggcaaugaaacaccggguggguauuguuuaacaagauggaugcugauugaggccgaauuaaagugcuuugggaacacagcaguugcgaaaugcaaugagaaacaugaugaagaguuuugugacauguuaagguuguuugacuuuaacaaacaggcuauaaggaggcuaaagacacccgcacagaugaguauccaacuaauaaacaaagcagugaacgcauugaucaaugaccagcucauuaugaagaaucauuuaagagauaucaugugcauuccuuacugcaauuacagcaaguauugguacuuaaaccacacugugacagggaagacaucguugccaagaugcuggcuuguaucaaaugguuccuaccugaaugaaacacauuuuucugaugacauugagcaacaagcagacaacaugauaacagaauuguuacagaaagaguacauugacaggcaagggaaaacacccuuaggguugguggaucuuuuugucuucagcacuagcuucuaccuuauuagcaucuuccuccaccuggucaaaaucccaacccacagacaugucauagggaaacccugccccaagccacacagacucaaccacaugggcauaugcucauguggucuguacaaacauccugguguaccagucaaguggaaaagauag

SEQ ID NO: 3834 - RNA, 1473 nt, Artificial Sequence
  derived and/or modified protein sequence (wt) from LASV(ISTH0230-NIG-2011;Clade II)__AIT17420__GPCstabilized
augggacaaaucauaacauuuuuccaggaaguaccccaugucauagaggaagugaugaacauuguccugauugcucucagccuucuggcaauacugaaggggaucuacaauguugccaccuguggccuauuuggacugguguccuuucuccucuuauguggaagaucaugcucaacaacuuauaaggguguuuaugagcuacaaacucuagagcuggacauggcaagccuuaauaugacaaugccccuaucuugcacaaagaacaacagucaccauuacaucauggucggaaaugagacuggcuuggagcugacuuuaacaaauacaaguauuaucaaccacaaguuuuguaaccuuucugaugcacauaaaaagaaucucuaugaccaugcucuaaugaguaucaucucaaccuuccacuugucuauuccuaauuuuaaucaguaugaagcaaugaguugugacuucaauggggggaagauaaguguucaguacaaccuuagccacacuuaugcuguagaugcagccaaucacugugggacuaucgccaauggcguucuucagacuuuuaugaggauggcuugggguggcaguuauauagcacuugauuccggaugcgggaguugggauuguauaaugacuuccuaccaauauuugauaauccagaacaccacuugggaagaucacugccaguuuucucgcccauccccuaucgguuaucuggggcuacugucacaaaggaccagagacauuuacaucagucgaagacgccgggggacuuuuacuuggacucucucugauucugaagguaaugaaacaccggguggguacugucuaacaagauggaugcugauugaggccgaguugaagugcuuugggaacacagcaguugcgaaaugcaaugagaaacaugaugaagaguuuugugacauguuaagacuguuugauuucaauaaacaagcuauaaggaggcuaaaaacacccgcacagaugaguauccaacugauaaacaaagcagugaaugcacugaucaaugaccagcuuauuaugaagaaucacuugagagauaucaugugcauuccuuacugcaauuacagcaaguacugguaucuaaaucacacuguaacagggaagacaucguugccaaggugcuggcuugugucaaaugguuccuaccugaaugagacacauuuuucugaugacauugaacaacaggcagacaacaugauaacagaacuguugcaaaaggaguacauggacaggcaagggaaaacacccuuaggguuaguagaucuuuuugucuucagcaccagcuuuuaucucauuagcaucuuccuccaccugaucaaaaucccaacccacagacauaucacagggaaacccugcccuaaaccacacagacuuaaccacaugggcauaugcucauguggucuauacaaacauccugguguaccagucaaguggaaaagauag

SEQ ID NO: 3835 - RNA, 1473 nt, Artificial Sequence
  derived and/or modified protein sequence (wt) from LASV(ISTH0531-NIG-2011;Clade II)__AIT17424__GPCstabilized
augggacaaaucauaacauuuuuccaggaaguaccccaugucauagaggaagugaugaacauuguccugaucgcucucagccuucuggcaauauugaaagggaucuacaauguugcuaccuguggccucuuuggauugguguccuuucuucucuuauguggaagaucauguucaacaacuuacaaggguguuuaugagcuacaaacucuagagcuagacaugacaaaccucaauaugacaaugcccuuaucuugcacgaaaaacaacagccaccauuacaucauggucggaaaugagacuggucuggagcugacuuugacaaauacaagcaucaucaaccacaaguuuuguaaccucucugaugcacauaaaaagaaucuuuauaaccaugcuuuaaugagcauuauuucaacuuuccacuuauccauucccaacuuuaaucaguaugaggcaaugaguugugacuucaauggagggaagauaaguguccaguacaaccuuagccacgcuuaugcuguagaugcagcuaaccacugugggaccauugccaauggcgugcuucagacuuuuaugaggauggcuugggguggcaguuacauagcacuugauuccggaugcgggaguugggauuguauaaugacuuccuaccaauauuugauaauccaaaacaccacuugggaagaucacugucaguuuucucgcccauccccuauugguuaucugggguuacugucacaaaggaccagggacauuuacaucagucgaagacgccgggggacuuuuacuuggacucucucugauucugaagguaaugaaacaccagguggguauugucuaacaagauggaugcugauugaggccgaguugaagugcuuugggaacacagcaguugcgaaauguaaugagaaacaugaugaagaguuuugugacauguugagauuguuugacuuuaacaaacaagcuauaaggaggcugaagacacccgcacagacgaauauccaacugauaaauaaagcagugaacgcacugaucaaugaccagcugaucaugaagaaucauuuaagagauaucaugugcauuccuuacugcaauuacagcaaguauugguacuuaaaucacacugugacagggaagacaucguugccaagaugcuggcuugugucaaaugguuccuacuugaaugagacacacuuuucugaugacauugaacaacaagcagacaauaugauaacagaacuguugcagaaggaguacauggacaggcaagggaaaacacccuuaggguugguagaucuuuuugucuucagcaccagcuuuuaucucauuagcaucuuccuccaccugguuaaaaucccaacccacagacacaucauagggaaaccuugcccuaaaccacacagacucaaccacaugggcauaugcucauguggucuguacaaacauccugguguaccagucaaguggaagagauag

SEQ ID NO: 3836 - RNA, 1473 nt, Artificial Sequence
  derived and/or modified protein sequence (wt) from LASV(ISTH0595-NIG-2011;Clade II)__AIT17428__GPCstabilized
augggacaaaucauaacauuuuuccaggaaguaccucaugucauagaggaagugaugaacauuguccugauugcucucagccuucuggcaauacugaaagggaucuacaauguugcuaccuguggccucuuuggauugguguccuuucuccucuuaugugggagaucaugcucaacaacuuacaaggguguuuaugagcuacaaacccuagagcuagacauggcgagccucaacaugacaaugcccuugucuugcacgaagaacaacucccaccacuacaucauggucggaaaugagaccggcuuggaguugacuuuaacaaauacaagcauuaucaaccacaaguuuuguaaccuuucugaugcacauaaaaagaaccuuuaugaccaugcuuugaugaguauuaucucaaccuuccacuuauccauuccuaacuuuaaccaguaugaggcaaugaguugugacuucaaugggggaaagauaaguguucaguacaaccuuagccacacuuaugcuguagaugcagcuaaccacugugggaccauugccaauggcguucuucagacuuuuaugaggauggcuugggguggcaguuauauagcacuugauuccggaugcgggagcugggauugcauaaugaccuccuaccaauauuugauaauccaaaacaccacuugggaagaucacugccaguuuucucgcccaucccccaucgguuaccuggggcuacugucacaaaggaccagggacauuuacaucagucgaagacgccgggggacuuuuacuuggacucucucugacucugaagguaaugaaacaccggguggguauugucuaacaagauggaugcugauugcggccgauuugaagugcuuugggaacacagcaguugcaaaaugcaaugagaagcaugaugaggaguuuugugacauguuaagauuguuugacuuuaacaaacaagcuauagagaggcugaagacacccgcacagaugaguauccagcugauaaacaaagcaguaaacgcacugaucaaugaccagcugaucaugaagaaucauuugagagauaucaugugcauuccuuacugcaauuacagcaaguauugguaucuaaaucacacuguaacagggaggacaucguugccaagaugcuggcuugugucaaaugguuccuaccugaaugagacacauuuuucugaugacauugaacaacaagcagacaacaugauaacagaacuguugcaaaaggaguacauggacaggcaagggaaaacaccuuuaggguuaguagaucuuuuugucuucagcaccagcuuuuaccucauuagcaucuuccuccaccugguuagaaucccaacccacagacaugucauagggaaacccugccccaaaccacacagacuuaaccauaugggcauaugcucauguggucuguacaaacauccuggugugccagucaaguggaaaagauag

SEQ ID NO: 3837 - RNA, 1473 nt, Artificial Sequence
  derived and/or modified protein sequence (wt) from LASV(ISTH0964-NIG-2011;Clade II)__AIT17430__GPCstabilized
augggacaaaucauaacauuuuuccaggagguaccucaugucauagaggaagugaugaacauugucuugauugcucucagccuucuggcaauacugaaagggaucuacaauguugccaccuguggccucuuuggauugguguccuuucuccucuuauguggaagaucaugcucaacaacuuauaaggguguuuaugagcuacaaacucuagagcuagacauggcaagucuuaauaugacaaugcccuuaucuugcacaaagaacaacagccaccauuacaucauggucggaaaugagacuggcuuggaguugacuuuaacaaauacaaguauuaucaaccacaaguuuuguaaccuuucugaugcacauaaaaagaaucucuaugaccaugcuuuaaugaguaucaucucaaccuuccacuuaucuauuccuaauuucaaucaguaugaagcaaugagcugugacuucaauggggggaggauaaguguucaguacaaccugagccacacuuaugcuguagaugcagccaagcacugugggacuaucgcuaauggcguucuucagacuuuuaugaggauggcuugggguggcaguuacauagcacuugauuccggaugcgggaguugggacuguauaaugacuuccuaccaauauuugauaauccaaaacaccacuugggaagaucacugccaguuuucucgcccauccccuauugguuaucuggggcuacuaucacaaaggaccagagacauuuauauuagucgaagacgccgggggacuuuuacuuggacucucucugauucugaggguaaugagacaccggguggguauugucuaacaagauggaugcugauugaggccgaguugaaguguuuugggaacacagcaguugcgaaaugcaaugagaaacaugaugaagaguucugugacauguugagacuguuugacuuuaauaaacaagcuauaaggaggcugaagacacccgcacagaugagcauccaacugauaaacaaagcaguaaacgcacugaucaaugaccagcuuauuaugaagaaucacuugagggauaucaugugcauuccuuacugcaauuacagcaaguacugguaucuaaaucauacuguaacagggaagacaucguugccaaggugcuggcuugugucaaaugguuccuaccugaaugagacacauuucucugaugacauugaacaacaagcagacaacaugauaacagaacuauugcaaaaggaguacauagacaggcaagggaaaacacccuuaggguuaguagaucuuuuugucuuuagcaccagcuuuuaucucauuagcaucuuccuccaccuggucaaaaucccaacccacagacauguuauagggaaaccuugcccuaaaccacacagacucaaccacaugggcauaugcucauguggucuuuacaaacauccugguguuccagucaaguggaaaagauag

SEQ ID NO: 3838 - RNA, 1473 nt, Artificial Sequence
  derived and/or modified protein sequence (wt) from LASV(ISTH1038-NIG-2011;Clade II)__AIT17438__GPCstabilized
augggacagaucauaacauuuuuccaggaaguaccucaugucauagaggaggugaugaacauuguucugauugcucucagccuucuggcaauacugaaggggaucuacaauguugcuaccuguggccucuuuggauuggugucuuuucuccuccuguguggaagaucaugcucaacaaccuacaaggguguuuaugagcuacaaacucuagagcuagacauggcaaaccuuaacaugacaaugccccugucuugcacgaagaacaacucccaccauuacaucaggguuggaaaugagacuggcuuggagcugaccuuaacaaauacaagcauuaucagccacaaguuuuguaaccuuucugaugcacauaaaaagaaucuuuaugaccaugcuuugaugaguaucaucucaaccuuccacuuauccauuccuaacuuuaaucaguaugaagcaaugaguugugacuucaaugggggaaagauaaguguucaguauaaccuuagucacaccuaugcuguggaugcagccaaccacugugggaccauugccaauggcguucuucagacuuuuaugaggauggcuugggguggcaguuauauagcacuugauuccggaugcgggagcugggauugcauaaugacuuccuaccaauauuugauaauccaaaacacuacuugggaagaucacugccaguuuucucgcccaucccccaucggcuaucuggggcugcugucacaaaggaccagggacauuuacaucagucgaagacgccgggggacuuuuacuuggacucucuccgacucugaaggcaaagaaacaccggguggguauugucuaacaagauggaugcugauugaggcugaguugaagugcuuugggaacacagcagucgcaaagugcaaugagaaacaugaugaagaguuuugugacauguugagauuauuugacuucaacaaacaagccauaaggagacugaaaacacccgcacaaaugaauauccaacugauaaacaaagcagugaacgcacugauuaaugaccagcugaucaugaagaaucacuugagggauaucaugugcauuccuuauuguaauuacagcaaauauugguaucuaaaucacacuguaacagggaagacaucguugccaagaugcuggcuugugucaaauggcuccuaccugaaugagacacauuuuucugaugacauugagcagcaagcagacaacaugauaacagaacuguugcaaaaggaguacauagacaggcaaggaaaaacacccuuaggguuaguagaucuuuuugucuucagcaccagcuucuaucucauuagcaucuuccuccacuugguuaaaaucccaacccacagacaugucauagggaaacccugccccaaaccacacagacucaaccaaaugggcauaugcucaugugguuuguacaaacaaccuggugugccagucaaguggaaaagauag

SEQ ID NO: 3839 - RNA, 1473 nt, Artificial Sequence
  derived and/or modified protein sequence (wt) from LASV(ISTH1048-NIG-2011;Clade II)__AIT17442__GPCstabilized
auggggcaaaucauaacauuuuuccaggaagugccucaugucauugaggaggugaugaacauugucuuaauugcucucagccuucuagcaauacuaaaagggauuuacaauguugcuaccuguggccucuuuggguugguguccuuucuucucuuauguggaaggucaugcucaacaacuuacaaggguguuuaugagcuucaaacucuggagcuggauauggcaagccuuaauaugacaaugcccuuauccugcacgaagaacaacagccaccacuacaucaugguuggaaaugagacuggcuuggagcugacuuuaacaaacacaaguaucaucaaccacaaguuuugcaaccuuucugaugcacauagaaagaaucucuaugaccaugcuuuaaugagcaucaucucaaccuuccaccuauccaucccuaacuuuaaucaguaugaagcaaugaguugugacuucaauggggggaagauaaguguucaguacaaccucagccaugcuuaugcuguggaugcagcuaaccauugugggaccauugccaauggaguccuucaaacuuuuaugaggauggcuugggguggcaguuacauagcacuugauucuggaugcgggaguugggauuguauaaugacguccuaccaauauuugauaauccaaaacaccaguugggaagaucacugccaguuuucucgcccguccccuaucgguuaucuggggcuacuuucacaaagaaccagggacauuuacaucagccgaagacgccggggaacuuuuacuuggacucucucugauucugagggcaaugaaacaccggguggauauuguuuaacaagauggaugcugauugaagccgaauugaagugcuuugggaacacagcaguugcgaaaugcaaugagaaacaugaugaagaguuuugugacauguuaagguuguuugacuuuaauaaacaggcuauaaggaggcuaaagacacccgcacagaugaguauccaacuaauaaacaaagcagugaaugcauugaucaaugaccagcucauuaugaagaaucauuuaagagauaucaugugcauuccuuacugcaauuacagcaaguauugguacuuaaaccacacuguaacagggaagacaucguugccaagguguuggcuuguaucaaaugguuccuaccugaaugaaacacauuuuucugaugacauugagcaacaagcagacaacaugauaacagaauuguuacagaaagaguacauugauaggcaagggaaaacacccuuaggguugguggaucuuuuugucuucagcacuagcuucuaccuuauuagcaucuuccuccaccugguuaaaaucccaacccacagacaugucauagggaaacccugccccaagccacacagaaucaaccacaugggcauaugcucauguggucuguacaaacauccugguguaccagucaaguggaaaagauag

SEQ ID NO: 3840 - RNA, 1473 nt, Artificial Sequence
  derived and/or modified protein sequence (wt) from LASV(ISTH1058-NIG-2011;Clade II)__AIT17446__GPCstabilized
auggggcaaaucauaacauuuuuccaggaagugccucaugucauagaagaagugaugaacauuguccugauugcccucagccuucuggcaauauugaaggggaucuacaauguugcuaccuguggccucuuuggauugguuuccuuucuucucuuauguggaagaucaugcucaacaacuuacaaagguguuuaugagcuacaaacucuagagcuagacauggcaagccuuaauaugacaaugcccuuaucuugcacaaagaauaacagccaccauuacaucauggucggaaaugagacuggcuuggagcugaccuuaacaaauacaaguaucauuaaccacaaguuuuguaaccuuucugaugcacauaaaaagaaucuuuacgaccaugcuuuaaugaguaucaucucaacuuuccauuuauccauuccuaauuuuaaucaguaugaagcaaugaguugugacuucaauggggggaagauaaguguucaguacaaccuuagccacacuuaugcuguagaugcagccagccacugugggaccguugccaauggcguucuucagacauucaugaggauggcuugggguggcaguuacauagcacuugauucugggugcgggaguugggauuguauaaugacuuccuaccaauauuugauaauccagaacaccaccugggaagaccacugccaguuuucucgcccaucccccaucgguuaucuggggcuacugucacaaaggaccagggacauuuacaucagucgaagacgccgggggacuuuuacuuggacccucucugauucugaaggcaaugaaacaccggguggguauugucuaacaagauggaugcugauugaggcugaguugaagugcuuugggaacacagcaguugcgaagugcaaugagaaacaugaugaagaguuuugugacauguuaagauuguuugauuuuaacaaacaagcuauaaggaggcugaagacacccgcacagaugaguauccaacugauaaacaaagcagugaacgcacugaucaacgaccaacugauuaugaagaaucauuuaagagacaucaugugcauuccuuacuguaauuacagcaaauauugguauuuaaaucacacuguaacagggaagacaucgcugccaagaugcuggcuugugucaaaugguuccuaccugaaugagacacauuuuucugaugacauugaacaacaagcagacaacaugauaacagaacuguugcagaaggaguacauggacaggcaagggaaaacacccuuaggguuaguagaucuuuuugucuucagcaccaguuuuuaucucauuagcauuuuccuccaccugguuaaaaucccaacucacagacaugucauagggaaacccugccccaaaccacacagacucaaccacaugggcauaugcucauguggucuguacaaacauccugguguaccagucaaauggaaaagauag

SEQ ID NO: 3841 - RNA, 1473 nt, Artificial Sequence
  derived and/or modified protein sequence (wt) from LASV(ISTH1064-NIG-2011;Clade II)__AIT17450__GPCstabilized
augggacaaaucauaacauuuuuccaggaaguaccucauguuauagaggaagugaugaacauuguccugauugcucucagccuucuggcaauauugaaagggaucuacaauguugcuacuuguggccucuuuggauuggugucuuuucuccucuuauguggaagaucaugcucaacaacuuacaaggguguuuaugagcuacaaacucuagaguuagacauggcaagccuuaauaugacaaugcccuuaucuugcacgaagaacaacagccaccauuacaucauggucggaaaugagacuggcuuggagcugacuuuaacaaauacaaguauuaucaaccacaaguuuuguaaccuuucugaugcacauaaaaagaaucuuuaugaccaugcuuuaaugagcaucaucucaaccuuccacuuauccauuccuaacuuuaaucaguaugaagcaaugaguugugacuucaauggagggaagauaaguguucaguacaaccuuagccacacuuaugcuguagaugcagccaaccacugugggacuaucgccaauggcguucuucagaccuuuaugaggauggccugggguggcaguuauauagcacuugauuccggaugcgggaguugggacugcauaaugacuuccuaccaauauuugauaauccaaaacaccacuugggaagaucacugccaguuuucccgcccauccccuaucgguuauuuggggcuacugucacaaaggaccagggacauuuacaucagucggagacgccgggggacuuuuacuuggacucucucugauucugaaggcaaugaaacaccgggcggguauugucugacaagauggaugcugauugaggccgaguugaagugcuucgggaacacagcaguugcgaaaugcaaugagaaacaugaugaagaguuuugugacauguuaagauuguuugacuuuaacaagcaagcuauaaggaggcugaagacacccgcacagaugaguauccaacugauaaacaaagcagugaacgcacugaucaaugaccagcugauuaugaagaaucauuugagagauaucaugugcauuccuuacugcaauuacagcaaguacugguaucuaaaucacacugugacagggaagacaucguugccgaggugcuggcuugugucaaaugguuccuaccugaaugaaacacauuuuucugaugacauugaacaacaagcagacaacaugauaacagaacuguugcaaaaggaguacauagacaggcaagggaaaacacccuuaggguuaguagaucucuuugucuucagcaccagcuuuuaucucauuagcaucuuccuccaccuggucaagaucccaacccacagacauaucauagggaaacccugcccuaaaccacacagacucaaccacaugggcauaugcucauguggucuauacaaacauccugguguaccaguuaaguggaaaagauag

SEQ ID NO: 3842 - RNA, 1473 nt, Artificial Sequence
  derived and/or modified protein sequence (wt) from LASV(ISTH1069-NIG-2011;Clade II)__AIT17454__GPCstabilized
augggacaaaucauaacauuuuuucaggaaguaccucaugucauagaggaagugaugaacauuguccugauugcuuucagccuucuggcaauacugaaagggaucuacaauguugcuaccuguggccucuuuggauuggugucuuuucuccucuuguguggaaggucaugcucaacaacuuacaaagguguuuaugagcuacaaacucuggagcuagacauggcaagccuuaauaugacaaugcccuuaucuugcacaaagaacaacagccaucauuacaucauggucggaaaugagacuggcuuagagcugacuuuaacaaauacaagcaucaucaaccacaaguuuuguaaccuuucugaugcacauaaaaggaaucuuuaugaccaugcuuuaaugaguaucaucucaaccuuccacuuauccauucccaacuuuaaucaguaugaggcaaugaguugugauuucaaugggggaaagauaaguguucaguacaaucuuagucacacuuaugcuguagaugcagcugggcacuguggaaccauugccaauggcguucuucagacuuuuaugaggauggcuugggguggcaguuacauagcacuugauucuggaugcgggaguugggauuguauaaugaccuccuaccaauauuugauaauccaaaacaccacuugggaagaucacugccaguuuucccgcccauccccuauagguuaucuagggcuacugucacaaagaacuagggacauuuacaucagucgaagacgccgggggacuuuuacuuggacucucucugauucugaagguaaugaaacaccggguggguauugucugacaagauggaugcugauugaggcugagcugaaaugcuuugggaacacagcaguugcgaaaugcaaugagaaacaugaugaagaguuuugugacauguuaagguuguuugacuuuaacaaacaagcuauaaggaggcuaaagacacccgcacagaugaguauccaacugauaaacaaagcagugaaugcacugaucaaugaccagcuaaucaugaagaaucauuugagagauaucaugugcauuccuuacugcaauuacagcaaguauugguaucuaaaucacacuauaacagggaagacaucguugccaagaugcuggcucgugucaaauggcuccuaccugaaugaaacgcauuuuucugaugacauugaacaacaagcagacaacaugauaacagaacuguugcagaaggaguacauggacaggcaagggaaaacacccuuaggguuaguagaucuuuuuguuuucagcaccagcuuuuaucucauuagcaucuuccuccaccugguuaaaaucccaacccauaggcacaucauaggaaaacccugcccuaaaccacacagacucaaccacaugggcauaugcucauguggucuguacaaacauccugguguaccggucagauggaaaagauag

SEQ ID NO: 3843 - RNA, 1473 nt, Artificial Sequence
  derived and/or modified protein sequence (wt) from LASV(ISTH1096-NIG-2012;Clade II)__AIT17458__GPCstabilized
augggacaaaucauaacauuuuuccaggaaguaccccaugucauagaagaagugaugaacauuguccugauugcucucagccuucuggcaauacugaaagggaucuacaauguugcuaccuguggccucuuuggauugguguccuuccuccucuuguguggaagaucaugcucaacaacuuacaaggguguuuaugagcuacaaacucuagagcuagacauggcaagccuuaauaugacaaugcccuuaucuugcacgaagaacaacucccaccauuacaucauggucggaaaugagacuggcuuggagcugacuuugacaaauacaagcauuaucaaccacaaguuuuguaaccuuucugaugcgcauaaaaagaaucuuuaugaccaugcuuugaugaguaucaucucaaccuuccauuuauccauuccuaacuuuaaucaguaugaggcaaugaguugugauuucaaugggggaaagauaaguguucaguacaaccuuagccacacuuaugcuauagaugcagccaaccacugugggaccauugccaauggcguccuucagacuuuuaugagaauggcuugggguggcaguuacauagcacuugauuccggaugcggaagcugggauugcauaaugacuaccuaccaauauuugauaauccaaaacaccacuugggaagaucacugccaguuuucucgcccaucccccaucgguuaucuggggcuacuaucacaaagaaccagagacauuuacauuagucgaagacgccgggggacuuucacuuggacucucucugacucugaagguaaugaaacaccggguggguauugucuaacaagauggaugcugauugaggccgaguugaagugcuuuggaaacacagcaguugcaaaaugcaaugagaaacaugaugaagaguuuugugacauguuaagauuguuugacuuuaacaaacaagcuauaaggaggcugaagacacccgcacagaugagcauccaacugauaaauaaagcggugaacgcacugaucaaugaccagcugaucaugaagaaucauuugagagacaucaugugcauuccuuacugcaauuacagcaaguauugguaucuaaaccacacuguaacagggaagacaucauugccaagaugcuggcuugugucaaaugguuccuaccugaaugagacacacuucucugaugacauugaacaacaagcagacaacaugauaacagaauuguugcaaaaggaguauauggacaggcaagggaaaacacccuuaggguuaguagaucuuuuugucuucagcacuagcuucuaucucaucagcaucuuccuccaccugguuaaaaucccaacccacagacaugucauagggaaacccugcccuaaaccacauagacucaaccacaugggcauaugcucauguggucuguacaaacauccuggcgugccagucaaguggaaaagauag

SEQ ID NO: 3844 - RNA, 1473 nt, Artificial Sequence
  derived and/or modified protein sequence (wt) from LASV(ISTH1107-NIG-2012;Clade II)__AIT17462__GPCstabilized
augggacaaauuauaacauucuuccaggaagugccucaugucauagaggaagugaugaacauugucuugauugcucucagccuucuggcaauacugaaagggaucuacaauguugccaccuguggccucuuugggcugguguccuuucuucucuuauguggaagaucauguucaacaacuuacaaggguguuuaugagcuacaaacucuggagcuggacauggcaagccuuaauaugacaaugcccuuaucuugcacgaagaacaacagccaccauuacaucauggucggaaaugaaacuggcuuggagcugacuuuaacaaacacaaguaucaucaaccacaaguucuguaaccuuucugacgcacauaaaaagaaccuuuaugaccaugcuuuaaugaguauuaucucaaccuuccacuuguccauucccaacuuuaaccaguaugaagcaaugaguugugacuucaaugggggaaagauaagugugcaguacaaccucagccaugcuuaugcuguggacgcagcuaaccacugugggaccauugccaauggaguucuucagacuuuuaugaggauggcuugggguggcaguuacauagcacuugauuccggaugcgggaguugggauuguauaaugacuuccuaccaguaucuaauaauccaaaacaccaccugggaagaucacugccaguuuucucguccaucccccaucgguuaucuggggcugcugucacaaagaaccagggacauuuacaucagucgaagacgccggggaacuuuuacuuggacucucucugacucugaagguaacgaaacaccagguggauauuguuuaacaagauggaugcugauugaggccgaguugaagugcuuugggaacacagcaguugcgaaaugcaaugagaaacaugaugaagaguuuugugauauguugagacuguuugacuuuaacaaacaagcuauaaggaggcuaaagacacccgcacagaugagcauucaacuaauaaacaaagcagugaacgcacugaucaaugaccagcuaauuaugaagaaucauuuaagagauauuaugugcauuccuuacugcaauuacagcaaguauugguauuuaaaucacacuguaacagggaagacaucauugccaaaaugcuggcuugugucaaaugguuccuaccugaaugagacacauuuuucugaugacauugaacaacaagcagacaacaugauaacagaauuguuacagaaggaguacauagacaggcaagggaaaacacccuuaggguugguggaucucuuuguuuucagcaccagcuuuuaucucauuagcaucuuccuccaccuggucaaaaucccaacccacagacaugucauagggaaacccugcccuaagccacacagacucaaccacaugggcauaugcucauguggucuauacaaacauccuggugugccaguuaaguggaaaagauag

SEQ ID NO: 3845 - RNA, 1473 nt, Artificial Sequence
  derived and/or modified protein sequence (wt) from LASV(ISTH1111-NIG-2011;Clade II)__AIT17466__GPCstabilized
augggacaaaucauaacauuuuuccaggaaguaccucaagucauagaggaagugaugaacauuguccugauugcucucagccuucuggcaauacugaaagggaucuacaauguugcuaccuguggccucuuuggauugguguccuuucuccuacugugcggaagaucaugcucgacaaccuacaagggcguuuaugagcuacaaacccuagagcuagacauggcaagccuuaauaugacaaugcccuuaucuugcacgaagaacaacagccaucauuacaucauggucggaaaugagaccggcuuagagcugacuuuaacaaaccaaaguauuaucaaccacaaguuuuguaaccuuucugaugcacauaaaaagaaucuuuaugaccaugcuuuaaugaguaucaucucaacuuuccacuuauccauucccaacuuuaaucaguaugaagcaaugaguugugacuucaauggaggaaagauaaguguucaguacaaccuuagccacacuuuugcuguagaugcagcuaaccacuguggaaccaucgccaaugguguucuucagacuuuuaugaggauggcuugggguggcaguuacauagcacuugauuccggaugcgggaguugggacugcauaaugacuuccuaccaauauuugauaauccaaaacaccacuugggaagaucacugccaauuuucucgcccauccccuaucgguuaucuggggcuacugucacaaaggaccagggauauuuacaucagccgaaggcgccgggggacuuuuacuuggacucucucugauucugaagguaaugaaacaccggguggguauugucuaacaagauggaugcugauugaggccgagcugaaguguuuugggaacacagcaguugcgaagugcaaugagaaacacgaugaagaguuuugugauauguuaagguuguuugacuuuaacaaacaagcuauaaggagacugaagacgcccgcacagaugaguauccaacuaauaaacaaagcaguaaacgcacuaaucaaugaccagcugaucaugaagaaucauuugagagauaucaugugcauucccuacugcaauuacagcaaauacugguauuuaaaucauacuauaacagggaagacaucacugccaagaugcuggcuugugucaaaugguuccuaccugaaugagacacauuuuucugaugacauugaacaacaagcagacaacaugauaacagaacuguugcaaaaggaguacauggacagacaagggaaaacacccuuaggguuaguagaucuuuuugucuucagcaccaguuuuuaucucauuagcaucuuccuccaccugguuaaaaucccaacccauagacaugucauagggaaacccugcccuaaaccacacagacucaaccacaugggcauaugcucauguggucuguacaaacauccugguguaccaguuaaguggaaaagauag

SEQ ID NO: 3846 - RNA, 1473 nt, Artificial Sequence
  derived and/or modified protein sequence (wt) from LASV(ISTH1121-NIG-2012;Clade II)__AIT17470__GPCstabilized
auggggcaaaucauaacauuuuuccaggaagugccucaugucauagaggaggugaugaacauugucuugauugcucucagccuucuagcaauacugaaagggaucuacaaugucgccaccuguggccuuuuuggguugguguccuuucuucuccuauguggaagaucaugcucaacaacuuacaaggguguuuaugagcuacaaacucuggaacuggacauggcaagccucaauaugacaaugcccuuauccugcacgaagaauaacagccaccacuacauuaugguuggaaaugagacuggcuuggagcuaacuuuaacaaacacaagcauuaucaaucauaaguuuuguaaccuuucugaugcacauagaaagaaucuuuaugaccaugcuuuaaugaguaucaucucaaccuuucauuuauccauucccaacuuuaaucaguaugaagcaaugaguugugacuuuaaugggggaaagauaaguguucaguacaaccucagccauaccuaugcuguggaugcagcaaaccacugugggaccauugccaaugguguucuacagacuuuuaugaggauggcuugggguggcagcuacauagcacuugauuccggaugcggaagcugggauuguauaaugacuuccuaccaguacuugauaauccaaaacaccacuugggaagaucacugccaguuuucccgcccgucccccaucgguuaucuggggcuacuaucacaaagaacuagagacaucuacaucagucgaagacgccggggaacuuucacuuggacucuuucugauucugaagguaaugaaacaccagguggguauuguuuaacaagauggaugcugauugaggccgaguugaaaugcuuugggaacacagcaguugcaaaguguaaugagaaacaugaugaagaguuuugugacauguugagauuguuugacuuuaacaaacaagcuauaaggagauugaagacacccgcacagaugagcauccaacugauaaacaaagcagugaacgcauuaauuaaugaccaguugaucaugaagaaccauuuaagagauaucaugugcauuccuuacugcaauuauagcaaguauugguauuuaaaucacacuguaacagggaaaacaucgcugccaagaugcuggcuugugucaaaugguuccuaccuaaaugagacacauuuuucugaugacauugaacaacaagcagacaacaugauaacagaauuguuacaaaaagaguacauagacaggcaagggaaaacaccuuugggguugguagaccuuuuuguuuucagcaccagcuuuuaucucaucagcaucuuccuccaccugguuaaaaucccaacccacagacaugucauagggaaacccuguccuaaaccacacagacucaaccacaugggcauaugcucauguggucuguauaaacaucccggugugccaguuaaguggaagagauag

SEQ ID NO: 3847 - RNA, 1473 nt, Artificial Sequence
  derived and/or modified protein sequence (wt) from LASV(ISTH1129-NIG-2012;Clade II)__AIT17474__GPCstabilized
augggacagaucauaacauuuuuccaggaaguaccucaugucauagaggaagugaugaacauuguccugauugcucucagccuucuggcaauauugaaagggaucuacaauguugcuaccuguggccucuuuggauugguguccuuucuccuccuauguggaaggucaugcucaacaacuuauaaggguguuuaugagcugcaaacucuagagcuagacauggcaagccucaauaugacaaugcccuuaucuugcacgaagaacaacagccaucauuacaucauggucggaaaugaaacuggcuuagagcuaaccuuaacaaauacaaguaucaucaaccacaaguucugcaaccuuucugaugcacauaaaaagaaucucuaugaucaugcucuaaugaguaucaucucaaccuuccacuuguccauucccaacuucaaucaguaugaggcaaugaguugugacuucaauggggggaagauaagcauucaguacaaccuuagccacacuuaugcuguagaugcagcuaaccacugugggaccauugccaauggcguucuucagacuuuuaugaggauggcuugggguggcaguuacauagcacuugauucuggaugcgggaguugggauuguauaaugacuuccuaccaauauuugauaauccaaaacaccacuugggaagaucacugccaguuuucccguccguccccuauagguuaucuggggcuacugucacagaggaccagggacaucuacaucagucgaagacgccgggggacuuuuacuuggacucucucugauucugaagguaaugaaacaccggguggguauugccuaacaagauggaugcugauugaggccgagcugaagugcuuugggaacacagcaguugcgaaaugcaaugagaaacaugaugaagaguuuugugacauguugagguuguuugacuuuaacaaacaagcuauaagaaggcugaagacacccgcacaaaugaguauccaacugauaaacaaagcagugaacgcauugaucaaugaccagcuaaucaugaagaaucauuugagagauauuaugugcauuccuuacugcaauuacagcaaguacugguaucuaaaucacacuauaacagggaagacaucguugccaagaugcuggcuugugucaaaugguuccuaccugaaugaaacacauuuuucugaugacauugaacaacaagcagacaacaugauaacagaacuguugcagaaggaguacauagacaggcaagggaaaacacccuuaggguuaguagaucuuuuugucuucaguacuagcuuuuaucucauuagcaucuuccuccaccugguuaaaaucccaacccacaggcauaucacagggaaacccugcccuaagccacacagacucaaccacaugggcauaugcucauguggucuguacaaacauccuggugugccaguuagauggaaaagauag

SEQ ID NO: 3848 - RNA, 1473 nt, Artificial Sequence
  derived and/or modified protein sequence (wt) from LASV(ISTH1137-NIG-2011;Clade II)__AIT17478__GPCstabilized
augggacaaaucauaacauuuuuccaggaaguaccucaugucauagaggaagugaugaacauugucuugauugcucucagccuucuggcaauacugaaaggaaucuacaauguugcuaccuguggccucuuuggauugguguccuuucuccucuuauguggaagaucaugcucaacaacuuacaaggguguuuaugagcuacaaacccuggaguuggacauggcaagccuuaauaugacaaugcccuuaucuugcacaaagaauaacagccaccauuacaucauggucggaaaugagacuggcuuggagcugacuuuaacaaauacaaguaucaucaaccacaaguuuuguaaccuuucugaugcacauaaaaagaaucuuuaugaucaugcuuugaugaguaucaucucaaccuuccacuuauccauuccuaacuucaaucaguaugaagcaaugaguugugacuuuaauggggggaagauaaguguucaguacaaccuuagccacacuuaugcuguagaugcagccgaccacugugggacuaucgccaauggcguucuucaaacuuuuaugaggauggcuugggguggcaguuacauagcacuugauuccggaugcgggaguugggacuguauaaugacuuccuaccaauauuugauaauccaaaacaccacuugggaagaucacugccaguuuucucgcccauccccuaucgguuaccuggggcuacugucacagaggaccagggacauuuacaucagucgaaggcgccgggggacuuuuacuuggacucucucugauucugaagguaaugaaacaccggguggguauugucuaacaagauggaugcugauugaggccgaguugaagugcuuugggaacacggcaguugcaaaaugcaaugagaaacaugaugaagaguuuugugacauguuaagauuguuugacuuuaacaaacaagccauaagcaggcugaagacacccgcacaaaugaguauccaacugauaaacaaagcagugaacgcauugaucaaugaccagcugauuaugaagaaucauuugagagacaucaugugcauuccuuacugcaauuacagcaaguacugguaucugaaucacacugugacagggaagacaucauugccaaggugcuggcuuguaucaaaugguuccuaccuaaacgaaacacacuuuucugaugacauugaacaacaagcagacaacaugauaacagaaauguugcaaaaggaguacauagacaggcaagggaaaacacccuuaggguuaguggaucuuuuugucuucagcaccagcuuuuaucucauuagcaucuuccuccaccugguuaaaaucccaacccacagacaugucauaggaaaacccugccccaaaccacacagacucaaccacaugggcauaugcucaugugguuuauacaaacauccugguguaccaguuaaguggaaaagauaa

SEQ ID NO: 3849 - RNA, 1473 nt, Artificial Sequence
  derived and/or modified protein sequence (wt) from LASV(ISTH2010-NIG-2012;Clade II)__AIT17482__GPCstabilized
augggacaaaucauaacauuuuuccaggaaguaccucaugucauagaggaagugaugaacauuguccugauugcucucagccuucuggcaauauugaaggggaucuacaauguugcuaccuguggccucuuuggauugguguccuuccuccucuuauguggaaggucauguucaacaacuuacaaggguguuuaugagcuacaaacucuggagcuagacauggcaagccuuaauaugacaaugcccuuaucuugcacgaagaacaacagccaccauuacaucauggucggaaaugaaacuggcuuggagcuaacuuuaacaaauacaaguaucaucaaccacaaauuuuguaaccucucugaugcacauaagaagaaucuuuaugaucaugcuuuaaugaguaucauuucaaccuuccacuuauccauuccuaacuuuaaucaguaugaagcaaugagcugugacuucaaugggggaaagauaaguguucaguacaaccuuagccacgcuuaugcuguagaugcagccaaccacugugggaccaucgccaauggcguucuucagacuuuuaugaggauggcuugggguggcagcuauauagcacuugauuccggaugcgggaguugggauuguauaaugacuuccuaccaauauuugauaauccaaaacaucacuugggaagaucacugccaguuuucucgcccauccccuaucgguuaccuagggcuacugucacaaaggaccagggacauuuacaucagucgaagacgccgggggacuuuuacuuggacucucucugauucugaagguaaugaaacaccggguggguauugccuaacaagauggaugcugauugaagccgaguugaaaugcuuugggaacacagcaguugcgaaaugcaaugagaaacaugaugaagaguuuugugacauguuaagauuguuugacuuuaacaaacaggcuauaaggaggcuaaagacacccgcacagaugaguauccaacugauaaacaaagcagugaacgcacugaucaaugaccagcugauuaugaagaaucauuugagagauaucaugugcauuccuuacugcaauuacagcaaguacugguaucuaaaucauacuguaacagggaagacaucguugccaaggugcuggcuugugucaaaugguuccuaccugaaugagacacauuuuucugaugacauugaacaacaggcagacaacaugauaacagaacugcugcaaaaggaguacauagacaggcaagggaaaacaccuuuaggguuaguagaucuuuuugucuucagcaccagcuuuuaucucauuagcaucuuccuccaccugguuaaaaucccaacccacagacaugucguaggaaaacccugcccuaaaccacacagacucaaccacaugggcauauguucauguggucuauacaaacauccuggugugccagucaaguggaaaagauag

SEQ ID NO: 3850 - RNA, 1473 nt, Artificial Sequence
  derived and/or modified protein sequence (wt) from LASV(ISTH2016-NIG-2012;Clade II)__AIT17486__GPCstabilized
augggacaaaucauaacauuuuuccaggaaguaccucaugucauagaggaagugaugaacauuguccugauugcccucagccuucuggcaauacugaaggggaucuacaauguugcuaccuguggccucuuuggauugguguccuuccuccucuuauguggaagaucauguucaacaacuuacaaggguguuuaugagcuacaaacucuggagcuagacauggcaagccuuaauaugacaaugcccuuaucuugcacgaagaacaacagccaccauuacaucauggucggaaaugagacuggcuuggagcugacuuuaacaaauacaaguaucaucaaccacaaauuuuguaaccucucugaugcacauaaaaagaaucuuuaugaucaugcuuuaaugaguaucauuucaaccuuccacuuauccauuccuaacuuuaaucaguaugaagcaaugaguugugacuucaauggggggaagauaaguguucaguacaaccuuagccacacuuaugcuguagaugcagccaaccacugugggacuaucgccaauggcguucuucagacuuuuaugaggauggcuugggguggcaguuauauagcacuugauuccggaugcgggaguugggacuguauaaugacuuccuaccaauauuugauaauccaaaacaccacuugggaagaucacugccaguuuucucgcccauccccugucgguuaccuggggcuacugucacaaaggaccagggacauuuacaucagucgaagacgccgggggacuuuuacuuggacucucucugauucugaagguaaugaaacaccggguggguauugucuaacaagauggaugcugauugaggccgaguugaaaugcuuugggaacacagcaguugcgaaaugcaaugagaaacaugaugaagaguuuugugacauguuaagauuguuugacuuuaacaaacaagcuauaaggaggcuaaagacacccgcacagaugaguauccagcugauaaacaaagcagugaacgcacugaucaaugaccagcugaucaugaagaaucauuugagagacaucaugugcauuccuuacugcaauuacagcaaguacugguaucuaaaucauacuguaacagggaagacaucguugccaaggugcuggcuugugucaaauggcuccuaccugaaugagacacauuuuucugaugacauugaacaacaagcagacaacaugauaacagaacugcugcaaaaggaguacauagacaggcaagggaaaacaccuuuaggguuaguagaucuuuuugucuucagcaccagcuuuuaucucauuagcaucuuccuccaccugguuaaaaucccaacccacagacaugucauaggaaaacccugcccuaaaccacacagacucaaccacaugggcauauguucauguggucuauacaaacauccuggugugccagucaaguggaaaagauag

SEQ ID NO: 3851 - RNA, 1473 nt, Artificial Sequence
  derived and/or modified protein sequence (wt) from LASV(ISTH2020-NIG-2012;Clade II)__AIT17490__GPCstabilized
augggacaaaucauaacauuuuuccaggaaguaccucaugucauagaagaagugaugaacauuguccugauuacccucagccuucuggcgauuuugaaagggaucuacaauguugccaccuguggccucuuuggauugguauccuuucuucucuuauguggaagaucaugcucaacaacuuacaaggguguuuaugagcuacaaacucuggagcuagacauggcaaaccuuaauaugacaaugcccuuaucuugcacaaagaauaacagccaccauuacaucauggucggaaaugagacugguuuagagcugacuuuaacaaauacaaguaucaucaaccauaaguucuguaaucuuucugaugcacauaaaaagaaucuuuaugaccaugcuuuaaugaguaucaucucaaccuuccacuuauccauucccaacuuuaaucaguaugaggcaaugagcugugacuucaauggggggaagauaaguguucaguacaaccuuagccacacuuuugcuguagaugcagcuaaccacugugggacuauugccaauggcguucuccagacuuucaugaggauggcuugggguggcaguuacauagcacuugauuccggaugcgggagcugggauugcauaaugacuuccuaccaauauuugauaauucagaacaccacuugggaagaucacugccaguuuucucgcccaucccccaucgguuaucuggggcugcugucacaaaggaccagggacauuuacaucagucgaagacgccgggggacuuuuacuuggacccucucugauucugaaggcaaugagacaccggguggguauugucuaacaagauggaugcugauugaagccgaauugaagugcuuugggaacacagcaguugcgaaaugcaaugagaaacaugaugaggaguuuugugacauguuaagauuguuugacuuuaacaaacaagcuauaaggaggcugaagacucccgcacagaugaguauccaacugauaaacaaagcagugaacgcauugaucaaugaccagcugauuaugaagaaucauuuaagggauaucaugugcauuccuuacugcaauuacagcaaguauugguauuuaaaucacacuguaacagggaagacaucguugccaagaugcuggcuugugucaaaugguuccuaccugaaugagacacauuuuucugaugacauugaacaacaagcagacaacaugauaacagaacuguugcagaaggaguacauggacaggcaagggaaaacacccuuaggguuaguagaucuuuuugucuucagcaccaguuuuuaucucauuagcaucuuucuccaccuaguuaaaaucccaacucacagacacaucauuggaaaacccuguccuaaaccacacagacucaaccacaugggcauaugcucauguggucuguacaaacauccugguguaccagucaaauggaaaagauag

SEQ ID NO: 3852 - RNA, 1473 nt, Artificial Sequence
  derived and/or modified protein sequence (wt) from LASV(ISTH2025-NIG-2012;Clade II)__AIT17494__GPCstabilized
auggggcaaaucauaacauuuuuccaggaagugccucaugucauugaggaggugaugaacauugucuuaauugcucucagccuucuagcaauacuaaaaggggucuacaauguugccaccuguggccucuuuggguugguaucuuuucuucucuuauguggaaggucaugcucaacaauuuacaaggguguuuaugagcuucaaacucuggagcuggauauggcaagccuuaauaugacaaugcccuuauccugcacgaagaacaacagccaccacuacaucaugguuggaaaugagacugguuuggagcugacuuuaacaaacacaaguaucaucaaccacaaguuuuguaaccuuucugaugcacauaaaaagaaucucuaugaccaugcuuuaaugagcaucaucucaaccuuccaccuauccaucccuaacuuuaaucaguaugaagcaaugaguugugacuucaaugggggaaagauaaguguucaguacaaccucagccauacuuaugcuguggaugcagccaaccauugugggaccauugccaauggaguccuucaaacuuuuaugaggauggcuugggguggcaguuacauagcacuugauucuggaugcgggaguugggauuguauaaugacguccuaccaauauuugauaauccaaaacaccaguugggaagaccacugccaguuuucucgcccguccccuaucgguuaucuggggcuacuuucacaaagaaccagggacauuuacaucagccgaagacgccggggaacuuuuacuuggacucucucugauucugagggcaaugaaacaccggguggguauuguuugacaagauggaugcugauugaagccgaauuaaagugcuuugggaacacagcaguugcgaaaugcaaugagaaacaugaugaagaguuuugugacauguuaagguuguuugacuuuaauaaacaggcuauaaggaggcuaaagacacccgcacagaugaguauccaacuaauaaacaaagcagugaacgcacugaucaaugaccagcucauuaugaagaaucauuuaagagauaucaugugcauuccuuacugcaauuacagcaaguauugguacuuaaaccacacuguaacagggaagacaucguugccaagaugcuggcuuguaucaaaugguucuuaccugaaugaaacacauuuuucugaugacauugagcagcaagcagacaacaugauaacagaauuguuacagaaagaguacauugauaggcaagggaaaacacccuuaggguugguggaucuuuuugucuucagcacuagcuucuaccuuauuagcaucuuccuccaccuggucaaaaucccaacccacagacacgucauagggaaacccugccccaagccacacagacucaaccacaugggcauaugcucauguggucuguacaaacauccugguguaccagucaaguggaaaagauag

SEQ ID NO: 3853 - RNA, 1473 nt, Artificial Sequence
  derived and/or modified protein sequence (wt) from LASV(ISTH2031-NIG-2012;Clade II)__AIT17498__GPCstabilized
auggggcaaauuauaacauuuuuccaggaagugccucaugucauagaggaagugaugaacauuguccugauugcucucagccuucuggcaauucugaaagggaucuacaauguugcuacauguggccuuuuuggacugguguccuuucuccucuuauguggaagaucaugcucaacaacuuacaaggguguuuaugagcugcagacucuagagcuagacauggcaagccuuaacaugacaaugcccuuaucuugcacgaagaauaacucccaccauuacaucauggucggaaaugagacuggcuuagaacugacuuuaacaaauacaaguauuaucaaccacaaguuuugcaaccucucugaugcacauaagaagaaucuuuaugaccaugcuuuaaugagcaucaucucaaccuuccacuuauccauuccuaacuuuaaucaguaugaagcgaugagcugugacuucaauggggggaagauaaguguacaguacaaccucagccacacuuacgcuguggaugcggcuaaccacugugggaccauugccaauggcguucuucagacuuuuaugaggauggcuugggguggcaguuacauagcacuugauuccggaugcgggaauugggauugcauaaugacuuccuaccaauauuugauaauccaaaacaccacuugggaagaucacugccaguuuucucguccaucccccaucgguuaucuggggcuacugucacaaaggaccagggacauuuacaucagucgaagacgccgggggacuuuuacuuggacucucucugauucugaagguaaugaaacaccggguggguauugucuaacaagauggaugcugauugagaccgaguugaagugcuuugggaacacagcaguugcaaaauguaaugagaaacaugaugaagaguuuugugacauguuaagauuguuugacuuuaacaaacaagcuauaaguaggcugaggucacccgcacagaugaguauccaacuaauaaacaaagcagugaaugcacugaucaaugaccagcugauuaugaagaaucauuuaagagauaucaugugcauuccuuauugcaauuacagcaaauauugguaucuaaaucacacugugacagggaagacaucguugccaaaaugcuggcuugugucaaaugguucuuaccugaaugaaacacauuuuucugaugacauugaacaacaagcagacaacaugauaacagaaauguugcaaaaggaguacauagauaggcaagggaaaacaccuuuaggguuaguagaucuuuuugucuucagcaccaguuuuuaccuuauuagcaucuuccuccaccugguuaaaaucccaacccacagacauaucacagggaaacccugccccaaaccacacagacucaaccacaugggcauaugcucauguggucuauacaaacauccuggugugccagucaaguggaaaagauaa

SEQ ID NO: 3854 - RNA, 1473 nt, Artificial Sequence
  derived and/or modified protein sequence (wt) from LASV(ISTH2037-NIG-2012;Clade II)__AIT17502__GPCstabilized
augggacaaauuauaacauuuuuccaggaaauaccucaugucauagaggaagugaugaacauuguccuaaucacccuuagccuucuggcaauacugaaagggaucuacaauguugcuaccuguggccuuuuuggacugguauccuuucuccucuuguguggaaaaucaugcucaacaaccuacaaaggugucuaugagcuacagacucuagaguuagacauggcaagccuuaauaugacaaugcccuugucuugcacgaagaacaacagccaucauuacaucauggucggaaaugagacugguuuggagcugacccugacaaauacaaguauuaucaaccacaaguuuuguaaccuuucugaugcacacaggaagaaccuuuacgaccauacuuuaaugaguaucaucucaaccuuccaccuguccauuccuaacuuuaaucaguaugaagcaaugagcugugauuucaauggggggaagauaaguguucaguacaaccuuagccacgcuuaugcuauagaugcagcuacccacugugggaccauugccaauggcguucuucagaccuucaugaggauggcuugggguggcaguuacauagcacuugauucaggaugcggggguugggauuguauaaugacuuccuaccaauauuugauaauccaaaacaccacuugggaagaucacugccaguuuucucgcccaucccccaucgguuaucuggggcuacugucacaaaggaccagggacauuuacaucagucgaaggcgccgggggacuuuuacuuggacccucucugauucugaagguaaugaaacaccggguggguauugucuaacaagauggaugcugauugaggccgaguugaaaugcuucgggaacacagcaguugcgaaaugcaaugagaaacaugaugaagaguuuugugacauguuaagguuguuugacuuuaacaagcaagcuauaaggagacugaaaacacccgcacagaugaguauacaacugauaaacaaagcagugaacgcacugauuaaugaccaacugaucaugaggaaucauuugagagauaucaugugcauuccuuacugcaauuacagcaaguauugguauuuaaaucacacuguaacagggaagacaucguugccaaaaugcuggcuugugucaaaugguuccuaccugaaugagacacauuuuucugaugacauugaacaacaagcagacaacaugauaacagaacuguugcaaaaggaguacauggacagacaagggaaaacacccuuaggguuaguagaucuuuuugucuucagcaccagcuuuuaucucauuagcaucuuccuccaucugguuaaaaucccaacucacagacaugucauagggaaacccugcccuaaaccacacagacucaaccacaugggcgugugcucauguggucuguacaaacauccugguguuccagucaaguggaaaagauaa

SEQ ID NO: 3855 - RNA, 1473 nt, Artificial Sequence
  derived and/or modified protein sequence (wt) from LASV(ISTH2042-NIG-2012;Clade II)__AIT17506__GPCstabilized
augggacaaaucauaacauuuuuccaggaaguaccucaugucauagaggaagugaugaacauuguccugauugcucucagccuucuggcaauacugaaggggaucuacaauguugcuaccuguggccucuuuggauugguguccuuccuccucuuauguggaagaucauguucaacaacuuacaaggguguuuaugaacuacaaacucuggagcuagacauggcaagccuuaauaugacaaugcccuuaucuugcacaaagaacaacagccaccauuacaucauggucggaaaugagacuggcuuggagcugacuuuaacuaauacaaguaucaucaaccacaaauuuuguaaccucucugaugcacauaaaaagaaucuuuaugaucaugcuuuaaugaguaucauuucaaccuuccacuuauccauuccuaacuuuaaucaguaugaagcaaugagcugugacuucaauggggggaagauaaguguucaguacaaccuuagccacgcuuaugcuguagaugcagccgaacacugugggacuaucgccaaugguguucuucagacuuuuaugaggauggcuugggguggcaguuauauagcacuugauuccggaugcgggaguugggacuguguaaugacuuccuaccaauauuugauaauccaaaacaccacuugggaagaucacugccaguuuucucgcccauccccuaucgguuaccuagggcuacugucacaaaggaccagggacauuuacaucagucgaagacgccgggggacuuucacuuggacucucucugauucugaagguaaugaaacaccggguggguauugucuaacaagauggaugcuaauugaggccgaguugaaaugcuuugggaacacagcaguugcgaaaugcaaugagaaacaugaugaagaguuuugugacauguuaagauuguuugacuuuaacaaacaagcuauagagaggcuaaagacacccgcacagaugaguauccagcugauaaauaaagcagugaacgcacuaaucaaugaccagcugauuaugaagaaucauuugagagauaucaugugcauuccuuacugcaauuacagcaaguacugguaucuaaaucauacuguaacagggaagacaucguugccaaggugcuggcuugugucaaaugguuccuaccugaaugagacacauuuuucugaugacauugaacaacaagcagacaauaugauaacagaaaugcugcaaaaggaguacauagacaggcaggggaaaacaccuuuaggguuaguagaucuuuuugucuucagcaccagcuuuuaucucauuagcaucuuccuccaccugguuaaaaucccaacccacagacaugucauaggaaaacccugcccuaaaccacacagacuuaaccacaugggcauauguucauguggucuauacaaacauccuggugugccagucaaguggaaaagauag

SEQ ID NO: 3856 - RNA, 1473 nt, Artificial Sequence
  derived and/or modified protein sequence (wt) from LASV(ISTH2046-NIG-2012;Clade II)__AIT17510__GPCstabilized
augggacaaaucauaacauucuuccaggaaguaccccaugucauagaagaagugaugaacauuguccugauugcccucagccuucuggcaauauugaaagggaucuacaaugucgcuaccuguggccucuuuggauugguguccuuccuucucuuauguggaagaucaugcucaacaacuuacaaagguguuuaugagcuacaaacucuagagcuagacauggcaagccuuaacaugacaaugcccuuauccugcacaaagaacaacagccaccauuacaucauggucggaaaugagacuggcuuagagcugacuuuaacaaauacaaguaucaucaaccacaaguucuguaaccuuucugaugcacauaaaaagaaucuuuaugaccaugcuuuaaugaguauuaucucaaccuuccacuuauccauuccuaacuuuaaucaguaugaagcaaugaguugugacuucaauggggggaaaauaaguguucaguacaaccuuagccacacuuaugcuguagaugcagcuaaccacugugggacuauugccaauggcguucuccagacuuucaugaggauggcuugggguggcaguuacauagcacuugauuccggaugcgggagcugggauugcauaaugacuuccuaccaauauuugauaauccagaacaccaccugggaagaucacugccaguuuucucgcccaucccccaucgguuaucuggggcugcugucacaaaggaccaaggacauuuacaucagucgaagacgccgggggacuuuuacuuggacccucucugauucugaaggcaaugaaacaccggguggguauugucuaacaagauggaugcugauugaggccgaauugaagugcuuugggaacacagcaguugcgaaaugcaaugagaaacaugaugaggaguuuugugacauguuaagauuguuugacuuuaacaaacaggcuauaaggaggcugaagacacccgcacagaugaguauccaacugauaaacaaagcagugaacgcacugaucaaugaccagcugauuaugaagaaucauuuaagagacaucaugugcauuccuuacugcaauuacagcaaguauugguauuuaaaucacacugugacagggaagacaucguugccaagaugcuggcuugugucaaaugguuccuaccugaaugagacacauuuuucugaugacauugaacaacaagcagacaacaugauaacagaacuguugcagaaggaguacauagacaggcaagggaaaacacccuuaggguuaguagaucuuuuugucuucagcaccaguuuuuaucuuauuagcauuuuccuccaccuaguuaaaaucccaacucacagacauguuauaggaaagcccugcccuaaaccacacagacucaaccacaugggcauaugcucuuguggucuguacaaacauccugguguaccagucaaauggaaaagauag

SEQ ID NO: 3857 - RNA, 1473 nt, Artificial Sequence
  derived and/or modified protein sequence (wt) from LASV(ISTH2050-NIG-2012;Clade II)__AIT17514__GPCstabilized
augggacaaaucauaacauuuuuccaggaagugccucaugucauagaggaagugaugaacauugucuugauugcucucagccuucuggcaguucugaaaggaaucuacaauguugcuacauguggccuuuuuggacugguguccuuucuccucuuauguggaagaucauguucaacaacuuacaaggguguuuaugagcuacaaacucuagagcuagauauggcaagccuuaacaugacaaugcccuuaucuugcaccaagaacaacucucaccauuacaucauggucggaaaugagacuggcuuggagcugacuuuaacaaauacaaguauuaucaaccacaaguuuuguaaccucucugacgcacauaaaaagaaucuuuaugaccaugcuuuaaugaguaucaucucaaccuuccacuuauccauuccuaacuuuaaucaguaugaagcaaugagcugugacuucaauggggggaagauaagugugcaguacaaccucagccacaccuaugcuguggaugcagcuaaccacugugggaccauugccaauggcguucuucagacuuuuaugaggauggcuuggggcggcaguuacauagcacuugauuccggaugcgggaguugggauugcauaaugacuuccuaccaauauuugauaauccagaacaccacuugggaagaucacugccaguuuucucgcccaucccccaucgguuauuugggacuacugucacaaaggaccagggacauuuacaucagucgaagacgccgggggacuuuuacuuggacucucucugauucugaagguaaugaaacaccagguggguauuguuuaacaagauggaugcugauugaggccgaguugaagugcuucgggaacacagcaguugcaaagugcaaugaaaaacaugaugaagaguuuugugacauguuaagauuguuugacuuuaacaaacaagccauaagaagguugaagacacccgcacagaugaguauccaacugauaaacaaagcagugaaugcacugaucaaugaccagcugauuaugaagaaucauuugagagauaucaugugcauuccuuacugcaauuacaguaaguauugguaucuaaaucacacuguaacagggaagacaucguugccaagaugcuggcuugugucaaauggcucuuaccugaaugaaacacauuuuucugaugacauugaacaacaggcagacaauaugauaacagaacuguugcaaaaggaguacauagacaggcaagggaaaacacccuuaggguuaguagaucuuuuugucuucagcaccaguuuuuaucuuauuagcaucuuccuccaccuaguuaaaaucccaacccacagacauguuauagggaaacccugccccaaaccacacagacucaaccacaugggcauaugcucauguggucuguacaggcauccuggugugccaguuaaguggaaaagauag

SEQ ID NO: 3858 - RNA, 1473 nt, Artificial Sequence
  derived and/or modified protein sequence (wt) from LASV(ISTH2057-NIG-2012;Clade II)__AIT17518__GPCstabilized
auggggcaaaucauaacauuuuuccaggaaguaccucaugucauagaggaagugaugaacauuguccugauugcucucagucuucuggcaauacuaaaggggaucuacaauguugcuacuuguggccucuuuggauugguguccuuucuccucuuaugugggagaucaugcucaacaacuuacaaggguguuuaugagcuacaaacucuagagcuagacauggcaagccuuaacaugacaaugcccuugucuugcacaaagaacaacucccaccauuacaucaugguuggaaaugagacuggcuuggagcugaccuuaacaaauacaagcaucaucaaccacaaguuuuguaaccuuucugaugcacauaaaaagaaucuuuaugaccaugccuugaugaguaucaucucaaccuuccacuuauccauuccuaacuuuaaucaguaugaagcaaugaguugugacuucaaugggggaaagauaaguguucaguacaaccuuagccacgccuaugcuguagaugcagccaaccacuguggaaccauugccaauggcguccuucagacuuuuaugaggauggcuugggguggcaguuacauagcacuugauuccggaugcgggagcugggauugcauaaugacuuccuaccaauauuugauaauccaaaacaccacuugggaagaucacugccaauuuucccgcccaucccccaucgguuaucugggguugcugucacaaaggaccagggacauuuacaucaguagaagacgccgggggacuuuuacuuggacucucuccgacucugaagguaaugaaacaccggguggguauugucuaacaagauggaugcuaauugaagccgaguugaagugcuuugggaacacggcaguugcaaaaugcaaugagaaacaugaugaagaguuuugugacauguuaagauuguuugacuucaacaaacaagcuauaaggagacugaaaacacccgcacagaugaguauccaacugauaaacaaagcagugaacgcacugaucaaugaccagcugauuaugaagaaucacuugagggauaucaugugcaucccuuacugcaauuacaguaaauauugguaucuaaaucacacugugacagggaagacaucguugccaagaugcuggcuugugucaaaugguuccuaccugaaugagacacauuuuucugaugacauugaacaacaagcagacaacaugauaacagaacuguugcaaaaggaguacauggacaggcaaggaaaaacacccuuaggguuaguagaucuuuuugucuucaguaccagcuucuaucucauuagcaucuuccuccacuugguuaaaaucccaacccacagacaugucauaggaaaacccugcccuaaaccacacagacucaaccacaugggcauaugcucauguggucuguacaaacauccuggugugccagucaaauggaaaagauag

SEQ ID NO: 3859 - RNA, 1473 nt, Artificial Sequence
  derived and/or modified protein sequence (wt) from LASV(ISTH2064-NIG-2012;Clade II)__AIT17524__GPCstabilized
augggacaaaucauaacauuuuuccaggaaguaccucaugucauagaggaagugaugaacauuguccugauugcucucagccuucuggcaauacugaaagggaucuacaauguugcuaccuguggccucuucggauugguguccuuccuccucuuauguggaagaucaugcucaacaacuuacaaggguguuuaugagcuacaaacucuggagcuagacauggcaagccuuaauaugacaaugcccuuaucuugcacgaagaauaacucccaccauuacaucauggucggaaaugagacuggcuuggagcugaccuugacaaauacaagcauuaucaaccacaaguuuuguaaccuuucugaugcccauaaaaagaaucuuuaugaccaugcuuuaaugaguaucaucucaaccuuccacuuguccauuccuaacuuuaaucaguaugaagcaaugaguugugauuucaaugggggaaagauaaguguucaguacaaccuuagccacacuuaugcuauagaugcagccaaccacugugggaccauugccaauggcguucuucagacuuucaugagaauggcuugggguggcaguuacauagcacuugauuccggaugcgggagcugggauugcauaaugacuuccuaccaauauuugauaauccaaaauaccacaugggaagaucacugccaguuuucucgcccaucccccaucgguuaucuggggcuacuaucacaaagaaccagagacauuuacauuagucgaagacgccgggggacuuucacuuggacucucucugacucugaagguaaugaaacaccggguggguauugucuaacaagauggaugcugauugaggccgaguugaagugcuuuggaaacacagcaguugcaaaaugcaaugaaaaacaugaugaagaguuuugugauauguugagauuguuugauuucaacaagcaagcuauaaggaggcuaaagacacccgcacagaugaguauccaacugauaaacaaagcggugaacgcacugaucaaugaccagcuaaucaugaagaaucauuugagagauaucaugugcauuccuuacugcaauuacagcaaguauugguaucuaaaucacacuguaacagggaagacaucguugccaagaugcuggcuugugucgaaugguucuuaccugaaugagacacauuuuucugaugacauugagcaacaagcagacaacaugauaacagaaauguugcaaaaggaguacauggacaggcaagggaaaacacccuuaggguuaguagaucuuuuugucuucagcaccagcuuuuaucucauuagcaucuuccuccaccuaguuaaaauuccaacccacagacaugucauagggaaacccugcccuaaaccacacagacucaaccacaugggcauauguucauguggucuguacaagcauccuggcgugccagucaaguggaaaagauag

SEQ ID NO: 3860 - RNA, 1473 nt, Artificial Sequence
  derived and/or modified protein sequence (wt) from LASV(ISTH2065-NIG-2012;Clade II)__AIT17528__GPCstabilized
auggggcaaaucauaacauucuuccaagaggugccucaugucauagaggaggucaugaacaucguccuaaucgcccucagucuccuggcgaugcugaaagggauuuacaauauugcuaccuguggucucuuuggguugaucuccuuucuucucuuauguggcagaucauguucaacaaccuauaaaggugucuaugaguuacaagcucuagagcuggacauggcaaaccucaacaugacaaugcccuuguccugcacgaagaacaauagccaccauuauaucaugguuggaaaugaaacaggcuuggagcugaccuuaacaaauacaagcaucauaaaccacaaguuuugcaaucucucugaugcacauaaaaagaaucucuaugaccaugccuugaugagcaucaucucaaccuuccacuuauccauuccaaacuucaaucaguaugaagcaaugagcugugacuuuaauggagggaaaauaaguguucaguacaaccucagucacacuuaugcuggggaugcagccaagcauugcgggaccauugccaaugguguacugcagacuuucaugaggauggcuugggguggcaguuacauagcacuugauuccggaugcggaaacugggauuguauaaugacuuccuaucaauacuugauaauucaaaacaccacuugggaggaucacugccaguuuucccgcccaucuccaauugguuaccugggacuauugucacagagaacuagagauaucuacauuagucgaagacgccggggaaccuucaccuggacccuuucugauuccgaaggcaacgaaacaccugguggguacugucuaacuagauggauguuaauugaagcagaacugaagugcuuugggaacacagcagucgcaaagugcaacgagaaacaugaugaagaauuuugugacauguugagguuguuugauuucaacaaacaagcuauaaggaggcuaaaaacacccgcacagaugaguauucagcugauaaacaaggcagugaaugcauuaaucaaugaccaauuaaucaugaaaaaccacuuaagggacaucaugugcauuccuuauugcaauuacaguaaauauugguaucuaaaucacucugugacagggagaacaucacugccaagauguuggcuuguaucaaaugguuccuaccuaaaugaaacacaauuuucugaugacauugaacaacaggcagacaacaugauaacagaaauguugcagaaagaguauauagacaggcagggaaaaacacccuuaggguugguugaccuuuuugucuucagcacuagcuuuuaucucauaagcaucuuucuccaccugaucaagaucccaacucacagacacaucguagggaaacccuguccuaagccgcacaggcuuaaccauaugggcauuugcucauguggucuauacaaacauccugguaucccagucaaauggaagagauag

SEQ ID NO: 3861 - RNA, 1473 nt, Artificial Sequence
  derived and/or modified protein sequence (wt) from LASV(ISTH2094-NIG-2012;Clade II)__AIT17538__GPCstabilized
augggacaaauaauaacauucuuucaggagguuccucauguuauagaagaggugaugaauauuguccugauugcucucagccuccuggcaauacugaaggggauuuacaauauugccacuuguggccucuuugggcugaucuccuuucuucuucuguguggaagaucaugcucaacaaccuacaaaggugucuaugagcuacaaacccuggagcuggauauggcaaaccucaacaugaccaugccucuaucuugcacaaaaaacaacagccaucacuauaucaugguugggaaugagacaggccuagaacugaccuuaacaaacacaaguauaaucaaucauaaguucugcaaccuuucugaugcacacaaaaagaaucuuuaugaucaugccuugaugagcaucauuucaacuuuccacuuauccauuccgaacuucaaucaguaugaagcaaugaguugugacuuuaaugaagggaaaauaagugugcaauacaaucucagucauaguuaugcuauagaugcagccggccacugugggaccauugccaacgguguccuacagacuuucaugagaauggcuuggggcggcaguuacauagcacuugauucuggaugcgggaacugggauugcauaaugacuuccuaucaguacuugauuauccagaacaccaccugggaagaucacugucaauuuucccgcccauccccuauuggguaccuaggacugcugucacagagaacuagagauauuuauauuagucggagacgccggggaacuuucaccuggacucucucugacucugagggcaaugaagcacccgguggauacugccuuacuagauggaugcuaauugaagcugaacugaagugcuuugggaacacagccauugcaaaguguaaugagaagcacgaugaggaauucugugauauguugagacuuuuugacuucaacaaacaagccauaaaaaggcuaaaagcacccgcacagaugagcauccauuugauaaauaaagcaguaaaugcacuaaucaaugaccaguugaucaugaagaaccacuugagggauaucaugugcauuccuuauugcaauuacagcaaguacugguaucuaaaccacacugugacagggaagacaucauugccgaaguguuggcuuguuucaaaugguucuuaccugaaugagacacauuucuccgaugauauugaacagcaagcagauaacaugauaacagaacuguugcaaaaggaguauauggacaggcaggggaaaacaccauuaggguuaguggaucuuuuugucuucagcaccagcuuuuaucucauaaguauuuuccuccacuuggucaaaauucccacccauagacacauuguggggagacccugccccaaaccacacaggcucaaccacaugggcauaugcucaugugguuuguacaaacauccugguguaccagucaaguggaagagauag

SEQ ID NO: 3862 - RNA, 1473 nt, Artificial Sequence
  derived and/or modified protein sequence (wt) from LASV(ISTH2129-NIG-2012;Clade II)__AIT17544__GPCstabilized
augggacaaaucauaacauuuuuccaggaaguaccucaugucauagaggaggugaugaacauuguccugauugcucucagccuucuggcaauacugaaaggaaucuacaauguugcuaccuguggccucuuuggacugguauccuuucuccucuuauguggaagaucgugcucaacaaccuauaaagguguuuaugagcuacaaacucuagagcuggacaugggaagccuuaauaugacaaugccccuaucuuguacgaagaacaacagccaucauuacaucauggucggaaaugagacuggcuuggagcugacuuuaacaaauacaaguauuaucaaccacaaguuuuguaaccuuucugaugcacauaagaagaaucuuuaugaccaugcgcuaaugaguaucaucucaaccuuccacuuauccauuccuaacuuuaaucaguaugaagcaaugaguugugacuucaauggggggaagauaaguguucaauacaaucuuagccacucuuaugcuguggaugcagccaaccacugugggaccauugccaauggcguucuucaaacuuuuaugaggauggcuugggguggcaguuacauagcacuugauuccggaugcgggaguugggauuguauaaugacuuccuaccaauauuuaauaauccaaaacaccacuugggaagaucacugccaguuuucucgcccauccccuaucgguuaucuggggcuacugucacaaaggaccagggacauuuacaucagucgaagacgccgggggacuuuuaccuggacccucucugauucugaagguaaugaaacaccggguggguauugucuaacaagauggaugcugauugaggccgaguugaagugcuuugggaacacagcaguugcgaagugcaaugaaaaacaugaugaagaguucugugacaugcuaagauuauuugacuuuaacaaacaagcuauaaggaggcugaaaacacccgcacagaugaguauccaacugauaaacaaagccguaaacgcacugaucaacgaccagcugauuaugaagaaucauuugagagacauuaugugcauuccuuacugcaauuacagcaaguauugguaucuaaaucacacuguaacagggaagacaucauugccaagaugcuggcuugugucaaaugguuccuaccuuaaugagacacacuuuucugaugacauugaacaacaagcagauaacaugauaacagaacuguugcaaaaggaguacauggacaggcaagggaaaacucccuuaggguuaguagaucuuuuugucuucagcaccagcuuuuaccucauuagcaucuuccuccaccuggucaaaaucccaacccacagacauaucauagggaaacccugcccuaaaccacacaggcucaaccacaugggcauaugcucauguggucuguacaagcauccugguguaccagucaaguggaaaagauag

SEQ ID NO: 3863 - RNA, 1473 nt, Artificial Sequence
  derived and/or modified protein sequence (wt) from LASV(ISTH2217-NIG-2012;Clade II)__AIT17548__GPCstabilized
augggacaaaucauaacauuuuuccaggaaguaccucaugucauagaggaagugaugaacauuguccugauugcucucagccuucuggcgauacugaaagggaucuacaauguugcuaccuguggccucuuuggauugguguccuuucucuucuuauguggaagaucaugcucaacaacuuacaaggguguuuaugaacugcaaacucuagagcuagacauggcaagccucaauaugacaaugccccuaucuugcacaaagaacaacagccaccauuacaucauggucggaaaugagacuggcuuggagcugacuuuaacaaauacaaguauuaucaaccacaaguuuuguaaccuuucugaugcacauaaaaggaaucuuuaugaccaugcuuuaaugagcaucaucucaaccuuccacuuaucuauuccuaauuuuaaucaguaugaagcaaugaguugugacuucaauggggggaagauaaguguucaguacaaccuuagucacgcuuaugcuggagaugcagccaagcacugugggacuauugccaauggcguucuucagacuuuuaugaggauggccugggguggcaguuauauagcacuugauuccggaugcgggaguugggauuguauaaugaccuccuaccaauauuugauaauccaaaacaccacuugggaagaucacugccaguuuucucgcccguccccuaucgguuaucuggggcuacugucacaaaggaccagggacauuuacaucagucgaagacgccgggggacuuuuacuuggacucucucugauucugaagguaaugaaacgccggguggguauugucuaacaagauggaugcugauugaggccgaguugaagugcuuugggaacacagcaguugcgaaauguaaugagaaacaugaugaagaguuuugugacauguuaagacuguuugacuuuaacaaacaagcuaucaggaggcugaggacacccgcacagaugaguauccaacugauaaacaaagcagugaacgcacugaucaaugaccagcuuauuaugaagaaucacuugagagacauuaugugcauuccuuacugcaauuacagcaaguacugguaucuaaaucacaccguaacagggaagacaucguugccaaagugcuggcuugugucaaaugguuccuaccugaaugagacacauuuuucugaugacauugaacaacaagcagacaacaugauaacagaaauguugcaaaaggaguacauugacaggcaagggaaaacacccuuaggguuaguagaucuuuuugucuucagcacuaguuuuuaucucauuagcaucuuccuccaccuggucaaaaucccaacucacagacaugucauaggaaaacccugcccuaaaccacacagacucaaccacaugggcauaugcucauguggucuguacaaacauccugguguaccagucaaguggaaaagauaa

SEQ ID NO: 3864 - RNA, 1473 nt, Artificial Sequence
  derived and/or modified protein sequence (wt) from LASV(ISTH2271-NIG-2012;Clade II)__AIT17552__GPCstabilized
auggggcaaaucauaacguuuuuccaggaagugccucaugucauagaggaggugaugaacauugucuugauugcucucagccuucuggcaauacugaaagggaucuacaaugucgccaccuguggccucuuuggguugguguccuuucuucuccuauguggaagaucaugcucaacaacuuacaaggguguuuaugagcuacaaacucuagaacuagacauggcaagccucaauaugacaaugcccuuauccugcacgaagaauaacagccaccauuacauuauggucggaaaugagacuggcuuggagcuaaccuuaacaaacacaagcauuaucaaucauaaguuuuguaaccuuucugaugcacauaaaaagaaccuuuaugaccaugcuuuaaugaguaucaucucaaccuuucauuuauccauucccaacuuuaaccaguaugaagcaaugaguugugacuucaaugggggaaagauaaguguucaguacaaccucagccaugcuuaugcugugaaugcagcuaaccacugugggaccauugccaaugguguucuacagacuuuuaugaggauggcuugggguggcagcuacauagcacuugauuccggaugcggaagcugggacuguauaaugacuuccuaccaguauuugauaauccaaaacaccacuugggaagaucacugccaguuuucucgcccguccccuaucgguuaucuggggcuacuaucacaaagaacuagagacaucuauauaagucgaagacgccggggaacuuucacuuggacucuuucugauucugaagguaaugaaacaccagguggguauuguuuaacaagauggaugcugauugaggccgaguugaaaugcuuugggaacacagcaguugcaaaguguaaugagaaacaugaugaagaguuuugugacauguuaagauuguuugacuuuaacaaacaagcuauaaggagguugaagacacccgcacagaugagcauccaacugauaaacaaagcagugaacgcacuaauuaaugaccaguugaucaugaagaaccauuuaagggauauuaugugcauuccuuacuguaauuacagcaaguauugguauuugaaucacacuguaacagggaaaacaucgcugccaagaugcuggcuugugucaaaugguuccuaccuaaaugagacacacuuuucugaugacauugaacaacaagcagacaacaugauaacagaauuguuacagaaagaguacauggacagacaaggaaaaacaccuuugggguugguagaucuuuuugucuucagcaccagcuuuuaucucaucagcauuuuccuccaccugguuaaaaucccaacccacagacaugucauagggaaacccugcccuaaaccacacagacucaaccacaugggcauaugcucaugugguuuguauaaacaucccggugugccagucaaguggaagaaauag

SEQ ID NO: 3865 - RNA, 1473 nt, Artificial Sequence
  derived and/or modified protein sequence (wt) from LASV(ISTH2304-NIG-2012;Clade II)__AIT17556__GPCstabilized
augggacaaaucauaacauuuuuccaggaaguaccucaugucauagaggaagugaugaacauuguccugauugcucucagccuucuggcaauauugaaagggaucuacaauguugcuaccuguggccucuuuggauugguguccuuucuccuccuauguggaaggucauguucaacaacuuacaaggguguuuaugagcugcaaacucuagagcuagacauggcaagccucaauaugacaaugcccuuaucuugcacgaagaacaacagccaucauuacaucauggucggaaaugaaacuggcuuagagcuaacuuuaacaaauacaagcaucaucaaccacaaguucugcaaccuuucugaugcacauaaaaagaaucucuaugaucaugcucuaaugaguaucaucucaaccuuccacuuguccauuccuaacuucaaucaguaugaggcaaugaguugugacuucaauggggggaagauaaguguucaguacaaccuuagccacacuuaugcuguagaugcagcuaaccacugugggaccauugccaauggcguucuucagacuuuuaugaggauggcuugggguggcagcuacauagcacuugauucuggaugcgggaguugggauuguauaaugacuuccuaccaauauuugauaauccaaaacaccacuugggaagaucacugccaguuuucccguccguccccuauagguuaucuggggcuacuaucacaaaggaccagggacaucuacaucagucgaagacgccgggggacuuuuacuuggacucucucugauucugaagguaaugaaacaccggguggguauugucuaacaagauggaugcugauugaggccgagcugaagugcuuugggaacacagcaguugcgaaaugcaaugagaaacaugaugaagaguuuugugacauguugagguuguuugacuuuaacaaacaagcuauaagaaggcugaagacacccgcacaaaugaguauccaacugauaaacaaagcagugaacgcauugaucaaugaccagcuaaucaugaagaaucauuugagagauauuaugugcauuccuuacugcaauuacagcaaguacugguaucuaaaucacacuauaacagggaagacaucguugccaagaugcuggcuugugucaaaugguuccuaccugaaugaaacacauuuuucugaugacauugaacaacaagcagacaacaugauaacagaacuguugcagaaggaguacauagacaggcaagggaaaacacccuuaggguuaguagaucuuuuugucuucaguacuagcuuuuaucucauuagcaucuuccuccaccugguuaaaaucccaacccacaggcauaucacagggaaacccugccccaaaccacacagacucaaccacaugggcauaugcucaugugguuuguacaaacauccuggugugccaguuagauggaaaagauag

SEQ ID NO: 3866 - RNA, 1473 nt, Artificial Sequence
  derived and/or modified protein sequence (wt) from LASV(ISTH2312-NIG-2012;Clade II)__AIT17560__GPCstabilized
augggacaaaucauaacauuuuuccaggagguaccucaugucauagaggaagugaugaacauuguucugauugcucucagccuucuggcaguacugaaagggauuuacaauguugcuaccuguggccucuuuggauugguguccuuucuccucuugugcggaagaucaugcucaacaacuuacaaggguguuuaugagcuacaaacccuagaguuggacauggcaagccuuaauaugacaaugcccuuaucuugcacgacgaacaacagccaccauuacaucauggucggaaaugagacagguuuggagcucacuuuaacaaauacaaguauuaucaaccauaaguuuuguaaccuuucugaugcacauaaaaagaaucuuuaugaccaugcucuaaugaguaucaucucaaccuuccauuuauccauuccuaacuuuaaucaguaugaagcaaugaguugugacuucaauggggggaagauaaguguucaguacaaccuuagucacgcuuaugcuggagaggcagccaaucacugugggaccaucgccaauggcguucuucagacuuuuaugaggauggcuugggguggcaguuacauagcacuugauuccggaugcgggaguugggauuguauaaugacuuccuacaaauauuugauaauccaaaacacuacuuggggagaucacugccaguuuucucgcccauccccuaucgguuaucuggggcuacugucacaaaggaccagggacauuuacaucagucgaagacgccgggggacuuuuaccuggacucuuucugauucugaggguaaugaaacaccggguggguauugucuaacaagauggaugcugauugaggccgaauugaagugcuuugggaauacagcaguugcgaaaugcaaugagaaacaugaugaagaguuuugugacauguuaagauuauuugacuucaacaaacaagcuauaaggaagcugaagacacccgcacagaugagcauccaacugauaaacaaagcagugaacgcauugaucaaugaccaacugaucaugaagaaucauuugagagauaucaugugcauuccuuacuguaauuacagcagguacugguaucuaaaucacacuguaacagggaggacgucauugccaaggugcuggcuuguaucaaaugguuccuaucugaacgagacacacuuuucugaugacauugaacaacaagcagacaacaugauuacagaacuguugcaaaaggaguacauagauaggcaggggaaaacacccuuaggguuaguggaucuuuuugucuucagcaccagcuuuuaucucauuagcaucuuccuccaccuggucaaaaucccaacccacagacauaucauagggaaaccuuguccuaaaccacacagacucaaccacaugggcauaugcucauguggucuauacaaacauccugguguaccagucaaguggaagagauag

SEQ ID NO: 3867 - RNA, 1473 nt, Artificial Sequence
  derived and/or modified protein sequence (wt) from LASV(ISTH2316-NIG-2012;Clade II)__AIT17564__GPCstabilized
auggggcaaaucauaacauuuuuccaggaagugccucaugucaucgaggaagugaugaacauuguccuaauugcucucagccuucuagcaauacuaaaagggauuuacaauguugcuaccuguggccucuuuggguugcuguccuuccuucucuuauguggaaggucaugcucaacaacuuacaaggguguuuaugagcuucaaacucuggagcuggauauggcaagccucaauaugacaaugcccuuauccuguacgaagaacaacagccaccacuacaucaugguuggaaaugagacuggcuuggagcugacuuuaacaaacacgaguaucaucaaccacaaguucugcaaccuuucugaugcacauaaaaaggaucucuaugaccaugcuuuaaugagcaucaucucaaccuuccaccuauccaucccuaacuuuaaucaguaugaagcaaugaguugugacuucaaugggggaaagauaaguguucaguacaaccucagccaugcuuaugcuguggaugcagcuaagcauugugggaccauugccaauggaguccuucaaacuuuuaugaggauggcuugggguggcaguuacauagcacuugauucuggaugcgggaguugggauuguauaaugacguccuaccaauauuugauaauccaaaacaccaguugggaggaucacugccaguuuucucgcccguccccuaucgguuaucuggggcuacugucacaaagaaccagggacaucuacaucagccgaagacgccggggaacuuuuacuuggacucucucugauucugagggcaaugaaacaccggguggguauuguuuaacaagauggaugcugauugaagccgaauuaaagugcuuugggaacacagcaguugcgaaaugcaaugagaagcaugaugaagaguuuugugacauguuaagguuauuugacuuuaacaagcaggcuauaaagagguuaaagacacccgcacagaugaguauccaacuaauaaacaaagcagugaacgcacugaucaaugaccagcucauuaugaagaaccauuugagagauaucaugugcauuccuuacugcaauuacagcaaguauugguauuuaaaccacacuguaacagggaagacaucguugccaagaugcuggcuuguaucaaaugguuccuaccugaaugaaacacauuuuucugaugacauugagcaacaagcagacaacaugauaacagaauuguuacagaaagaguacauugacaggcaagggaaaacacccuuaggguugguggaucuuuuugucuucagcacuagcuucuaccuuauuagcaucuuccuccaccugguuaaaaucccaacccacagacaugucauagggaaacccugccccaagccacacagacucaaccacaugggcauaugcucauguggucuauacaaacauccugguguaccagucaaguggaaaagauag

SEQ ID NO: 3868 - RNA, 1473 nt, Artificial Sequence
  derived and/or modified protein sequence (wt) from LASV(ISTH2358-NIG-2012;Clade II)__AIT17572__GPCstabilized
augggacaaaucauaacauuuuuccaggaaguaccucaugucauagaggaaguuaugaacauuguccugauugcucucagccuucuggcaauacugaaagggaucuacaauguugcuaccuguggccucuuuggacugguguccuuucuucucuuauguggaagaucaugcucaacaacuuacaaggguguuuaugagcuacaaacucuagagcuagacauggcaaaccuuaauaugacaaugcccuuauccugcacgaaaaacaacagccaccauuacaucauggucggaaaugagacuggucuggagcugacuuuaacaaauacaaguaucaucaaccacaaguuuuguaaccuuucugaugcacauaaaaagaaucuuuaugaccaugcuuuaaugaguauuaucucaacuuuccacuuauccauuccuaacuuuaaucaguaugaagcaaugaguugugacuucaauggggggaagauaaguguccaguacaaccuuagccacaauuaugcuguagaugcagcuaaucacugugggacuauugccaauggcguacuucagacuuuuaugaggauggcuuggggugguaguuacauagcacuugauuccggaugcgggaauugggauugcauuaugacuuccuaccaauauuuaauaauccaaaauaccacuugggaagaucacugucaguuuucucgcccauccccuauugguuaucugggguuacugucacaaaggaccagggacauuuacauuagucgaagacgccgggggacuuucacuuggacucucucugauucugaagguaaugauaugccggguggguauugucuaacaagauggaugcugauugaggccgaguugaagugcuuugggaacacagcaguugcgaaaugcaaugagaaacaugaugaagaguuuugugacauguuaagauuguuugacuuuaacaaacaagccauaaggagguugaagacacccgcacagaugaauauccaacugauaaacaaagcagugaacgcacugaucaaugaccagcugaucaugaagaaucauuuaagagauaucaugugcauuccuuacugcaauuacagcaaguauugguacuugaaucacacuguaacagggaaaacaucguugccaagauguuggcuugugucaaaugguuccuacuugaaugagacacauuuuucugaugacauugaacaacaagcagacaauaugauaacagaacuguugcaaaaggaguacauggacaggcaagggaaaacacccuuaggguuaguagaucuuuuugucuucagcaccagcuuuuaucucauuaguaucuuccuucaccugguuaaaaucccaacccacagacauaucauagggaaacccugcccuaaaccacacagacucaaccacaugggcauaugcucauguggucuguacaaacauccugguguaccagucaaguggaaaagauag

SEQ ID NO: 3869 - RNA, 1473 nt, Artificial Sequence
  derived and/or modified protein sequence (wt) from LASV(ISTH2376-NIG-2012;Clade II)__AIT17576__GPCstabilized
auggggcaaauuauaacauuuuuccaagaaguaccucaugucauagaggaagugaugaacauuguccugauugcucucagccuucuggcaauucugaaagggaucuacaauguugcuacauguggccuuuuuggacuggugucuuuucuccucuuauguggaagaucaugcucaacaacuuacaaggguguuuaugagcuacagacucuagagcuagacauggcuagccuuaacaugacaaugcccuuaucuugcacgaagaacaacucccaccauuacaucauggucggaaaugagacuggcuuggagcugacuuuaacaaauacaaguauuaucaaccacaaguuuugcaaccucucugaugcacauaagaagaaucuuuaugaccaugcuuuaaugaguaucaucucaaccuuccacuuauccauucccaacuuuaaucaauaugaagcgaugagcugugacuucaauggggggaagauaagugugcaguacaaccucagccacacuuacgcuguggaugcggcuaaccacugugggaccauugccaauggcguucuucagacuuuuaugaggauggcuugggguggcaguuacauagcacuugauuccggaugcgggaauugggauugcauaaugacuuccuaccaauauuugauaauccaaaacaccacuugggaagaucacugccaguuuucucguccaucccccaucgguuaucuggggcuacugucacaaaggaccagggacauuuauaucagucgaagacgccgggggacuuucacuuggacucucucugauuccgaagguaaugaaacaccggguggguauugucuaacaagauggaugcugauugaggccgaguugaagugcuuugggaacacagcaguugcaaaauguaaugagaaacaugaugaagaguuuugugacauguuaagauuguuugacuuuaacaaacaagcuauaaguaggcugaagacacccgcacagaugaguauccaacugauaaacaaagcaguaaaugcacugaucaaugaccagcugauuaugaagaaucauuugagagauaucaugugcauuccuuauugcaauuacagcaaauauugguaucuaaaucacacuguaacagggaagacaucguugccaagaugcuggcuugugucaaaugguuccuaccugaaugaaacacauuuuucugaugacauugaacaacaagcagacaacaugauaacagaaauguugcaaaaggaguacauagauaggcaagggaaaacacccuuaggguuaguagaucuuuuugucuucagcaccaguuuuuaccuuauuagcaucuuccuccaccugguuaaaaucccaacccacagacacaucacagggaaacccugccccaaaccacacagacucaaccacaugggcauaugcucauguggucuauacaaacauccuggugugccagucaaguggaaaagauag

SEQ ID NO: 3870 - RNA, 1473 nt, Artificial Sequence
  derived and/or modified protein sequence (wt) from LASV(Lassa virus/H.sapiens-wt/NGA/2015/ISTH_0543;Clade II)__AVO03639__GPCstabilized
augggacaaaucauaacauuuuuccaggaagugccucaugucauagaggaaguaaugaacauuguccugauugcucucagccuucuggcaauauugaaggggaucuacaauguagccaccuguggccuuuuuggacugguguccuuucuccucuuauguggaagaucaugcucaacaacuuauaagggugucuacgagcuacaaacucuagagcuggacauggcaaaccuuaauaugacaaugccccuaucuugcacaaagaacaacagucaccauuacaucauggucggaaaugaaacuggcuuggagcugacuuuaacaaauacaaguauuaucaaccacaaguuuugcaaccuuucugaugcacauaaaaagaaucucuaugaccaugcuuuaaugaguaucaucucaaccuuccacuuaucuauuccuaauuuuaaucaguaugaagcaaugaguugugacuucaauggagggaagauaaguguucaguacaaccuuagccacacuuaugcuguagaugcagccaaucacugugggacuaucgccaauggcguucuucagacuuuuaugaggauggcuugggguggcaguuacauagcacuugauucuggaugcgggaguugggauuguauaaugacuuccuaccaauaucugguaauccagaacaccacuugggaagaucacugccaauuuucucgcccauccccuaucgguuaucuggggcuacugucacaaaggaccagagacauuuacaucagucgaagacgccgggggacuuucacuuggacucucucugauucugaagguaaugaaacaccggguggguacugucuaacaagauggaugcugauugaggccgaguugaagugcuuugggaacacagcaguugcgaaaugcaaugagaaacaugaugaagaguuuugugacauguuaagacuguucgauuuuaacaaacaagcuauaaggaggcugaagacacccgcacagaugaguauccaacuaauaaacaaagcagugaaugcauugaucaaugaccagcuuauuaugaagaaucacuuaagagauaucaugugcauuccuuacugcaauuacagcaaguacugguaucuaaaucacacugugacagggaagacaucguugccaaggugcuggcuuguaucaaaugguuccuaccugaaugagacacauuuuucugaugauauugaacaacaggcagacaacaugauaacagaacuguugcaaaaggaauacauagacaggcaagggaaaacacccuuaggguuaguagaucuuuuugucuucagcaccagcuuuuaucucauuagcauuuuccuccaccuggucaaaaucccaacucacagacauaucacagggaaacccugcccuaaaccacacagacuuaaccacaugggcauaugcucauguggucuauacaaacauccugguguaccagucaaguggaaaagauag

SEQ ID NO: 3871 - RNA, 1473 nt, Artificial Sequence
  derived and/or modified protein sequence (wt) from LASV(Lassa virus/H.sapiens-wt/NGA/2015/ISTH_0547;Clade II)__AVO03583__GPCstabilized
augggacaaaucauaacauucuuccaggaaguaccucaugucauagaggaagugaugaacauuguccugaucgcucuuagccuucuggcaauacugaaagggaucuacaauguugcuaccuguggucucuuuggauugguguccuuucuccucuuauguggaagaucaugcucaacaacuuacaagggcguuuaugaguuacaaacucuagaacuagacauggcaagccuuaauaugacaaugcccuugucuugcacgaagaacaacucccaccauuacaucauggucggaaaugagacuggccuggagcugacuuuaacaaacacaagcauuaucaaccacaaguuuuguaaccuuucugaugcacauaaaaagaaucucuaugaccaugcucuaaugaguaucaucucaaccuuccacuuauccauucccaacuuuaaucaauaugaagcaaugaguugugacuucaauggggguaaaauaaguguucaguacaaccuuagccacacuuaugcuguagaugcagcuaaccacuguggaaccauugccaauggcguucuucagacuuuuaugaggauggcuugggguggcaguuacauagcacuugauuccggaugcgggagcugggauugcauaaugacuuccuaucaauauuugauaauccaaaacaccacuugggaagaucacugccaguuuucucgcccgucccccaucgguuaucuagggcugcugucacaaaggaccagggacauuuacaucagucgaagacgccgggggacuuuuacuuggacucucucugacucugaaggaaaugaaacaccggguggguauugucuaacaagauggaugcugauugaggccgaguugaagugcuuugggaacacagcaguugcaaaaugcaaugaaaaacaugaugaagaguuuugugacauguuaagauuguuugacuuuaacaaacaagccauaaggagguugaagacacccgcacagaugaguauucaacugauaaacaaagcagugaacgcacugaucaaugaccagcuaauuaugaagaaucauuugagagauaucaugugcauuccuuacugcaauuacagcaaguauugguaccugaaucacacuguaacagggaagacaucguugccaagaugcuggcuugugucaaaugguuccuacuugaaugagacacauuuuucugaugacauugaacaacaagcagacaacaugauaacagaacuguugcaaaaggaguacauagaaagacaagggaaaacacccuuaggguuaguagaucuuuuugucuucagcaccagcuuuuaucucauuagcaucuuccuccaccugguuaaaaucccaacccacagacauaucacagggaaacccugccccaaaccacacagacucaaccauaugggcauaugcucauguggucuguacaaacauccuggugugccagucaaguggaaaagauag

SEQ ID NO: 3872 - RNA, 1473 nt, Artificial Sequence
  derived and/or modified protein sequence (wt) from LASV(Lassa virus/H.sapiens-wt/NGA/2015/ISTH_0574;Clade II)__AVO03657__GPCstabilized
augggacaaaucauaacauuuuuccaggaaguaccucaugucauagaggaagugaugaacauuguucugauugcucuuagccuucuggcaauacugaaagggaucuacaauguugccaccuguggccucuuuggauugguggccuuucuccucuuguguggaagaucaugcucgacaaccuacaagggcguuuaugagcuacaaacuuuagagcuagacauggcaagccucaauaugacaaugccuuuaucuugcacgaagaacaacagccaucauuacaucauggucggaaaugagacuggcuuggagcugacuuuaacaaauacaaguauuaucaaccacaaguuuuguaaccuuucugaugcacauaaaaagaaucuuuaugaccaugcuuuaaugaguaucaucucaaccuuccacuuauccauucccaacuucaaucaguaugaagcgaugaguugugacuucaauggaggaaagauaaguguucaguacaaccuuagccacacuuaugcuguagaugcagcuaaccacuguggaaccauuaccaaugguguucuucagacuuuuaugaggauggcuugggguggcaguuacauagcacuugauuccggaugcgggaguugggacugcauaaugacuuccuaccaauauuugauaauccaaaacaccacuugggaagaucacugccaauuuucucgcccauccccuaucgguuaucuggggcuacugucacaaaggaccagggauauuuacaucagccgaaggcgccggggaacuuuuacuuggacucucucugauucugaagguaaugaaacaccagguggguauugucuaacaagauggaugcugauugaggccgagcugaagugcuuugggaacacagcaguugcgaagugcaaugagaaacacgaugaagaguuuugugacauguuaagguuguuugacuuuaacaaacaagcuauaaggaggcugaagacgcccgcacagaugaguauccaacugauaaacaaagcagugaacgcacuaaucaaugaccagcugaucaugaagaaucauuuaagagauaucaugugcauucccuacugcaauuacagcaaauacugguaucuaaaucauacugugacagggagaacaucacugccaaggugcuggcuugugucaaaugguuccuaccugaaugagacacauuucucugaugacauugaacaacaagcagacaacaugauaacagaacuguugcaaaaggaguacauggacaggcaagggaaaacacccuuaggguuaguagaucuuuuugucuucagcaccagcuuuuaucucauuagcaucuuccuccaccugauuaaaaucccaacccauagacaugucauagggaaacccugcccuaaaccacacagacucaaccacaugggcauaugcucauguggucuguacaaacauccugguguaccaguuaaguggaaaagauag

SEQ ID NO: 3873 - RNA, 1473 nt, Artificial Sequence
  derived and/or modified protein sequence (wt) from LASV(Lassa virus/H.sapiens-wt/NGA/2015/ISTH_0681;Clade II)__AVO03617__GPCstabilized
augggacaaaucauaacauuuuuccaggaaguaccucaugucauagaggaggugaugaacauuguccugauugcucucagccuucuggcaauacugaaagggaucuacaauguugcuaccuguggccucuuuggauugguguccuuccuccucuuauguggaagaucaugcucaacaacuuacaaggguguuuaugagcuacaaacucuggagcuagacauggcaagccuuaauaugacaaugcccuuaucuugcacgaagaauaacucccaccauuacaucauggucggaaaugagacuggcuuggagcugaccuuaacaaauacaagcauuaucaaccacaaguuuuguaaccuuucugaugcccauaaaaagaaucuuuaugaccaugcuuuaaugaguaucaucucaaccuuccacuuguccauuccuaacuuuaaccaguaugaagcaaugaguugugauuucaaugggggaaagauaaguguucaguacaaccuuagccacacuuaugcugaaggugcagccaaccacugugggaccauugccaauggcguucuucagacuuucaugagaauggcuugggguggcaguuacauagcacuugauuccggaugcgggagcugggauugcauaaugacuuccuaccaauauuugauaauccaaaacaccacaugggaagaucacugccaguuuucucgcccaucccccaucgguuaucuggggcuacuaucacaaagaaccagagacauuuacauuagucgaagacgccgggggacuuucacuuggacucucucugacucugaagguaaugaaacaccggguggguauugucuaacaagauggaugcugauugaggccgaguugaagugcuuuggaaacacagcaguugcaaaaugcaaugaaaaacaugaugaagaguuuugugauauguugagauuguuugauuucaacaaacaagcuauaaugaggcuaaagacacccgcacagaugaguauccaacugauaaacaaagcggugaacgcacugaucaaugaccagcuaaucaugaagaaucauuugagagauaucaugugcauuccuuacugcaauuacagcaaguauugguaucuaaaucacacuguaacagggaagacaucguugccaagaugcuggcuugugucgaaugguucuuacuugaaugagacacauuuuucugaugacauugaacaacaagcagacaacaugauaacagaaauguugcaaaaggaguacauggacaggcaagggaaaacacccuuaggguuaguagaucuuuuugucuucagcaccagcuuuuaucucauuagcaucuuccuccaccuaguuaaaauuccaacccacagacaugucauagggaaacccugcccuaagccacacagacucaaccacaugggcauauguucauguggucuguacaagcauccuggcgugccagucaaguggaaaagauag

SEQ ID NO: 3874 - RNA, 1473 nt, Artificial Sequence
  derived and/or modified protein sequence (wt) from LASV(Lassa virus/H.sapiens-wt/NGA/2015/ISTH_0682;Clade II)__AVO03625__GPCstabilized
augggacaaaucauaacauuuuuccaggaaguaccucaugucauagaggaagugaugaacauuguccuaauugcucucagccuucuggcaauacugaaagggaucuacaauguugcuaccuguggccucuuuggauuggugucuuuucuccucuuguguggaagaucauguucaacaaccuacaagggcguuuaugagcuacaaaccuuagagcuggacauggcgagccuuaauaugacaaugcccuuaucuugcacaaagaacaacagccaucauuacaucauggucggaaaugagacuggcuuggagcugacuuuaacaaacacaaguauuaucaaccacaaguuuuguaaccuuucugaugcacauaagaagaaccuuuaugaccaugcuuuaaugaguaucaucucaaccuuccacuuguccauuccuaacuuuaaucaguaugaagcaaugagcugugacuucaauggcggaaagauaaguguccaguacaaccuuagccacgccuaugcuguagaugcagcuaaucacuguggaaccauugccaaugguguucuucagacuuuuaugaggauggcuugggguggcaguuacauagcacuugauucuggaugcgggaguugggacugcauaaugacuuccuaccauuaucugauaauccaaaacaccacuugggaagaucacugccaauuuucucgcccaucuccuaucgguuaucugggguuacugucacaaaggaccagggauauuuacaucagccgaaggcgccgggggacuuuuacuuggacucucucugauucugaaggcaaugaaacaccggguggguauugucuaacaagauggaugcugauugaggccgagcugaagugcuuugggaauacagcaguugcgaagugcaaugagaaacacgaugaagaguuuugugacauguuaaggcuguuugacuuuaacaaacaagccauaaggaggcugaagacgcccgcacagaugaguauccaacugauaaacaaagcaguaaacgcacuaaucaaugaccagcugaucaugaagaaucauuugagagauaucaugugcauucccuacugcaauuacagcaaauacugguaucugaaucauacugugacagggaagacaucauugccaagaugcuggcuugugucaaaugguuccuaccugaaugagacacauuuuucugaugacauugaacaacaagcagacaacaugauaacagaacuguugcaaaaggaguacauagacaggcaagggaaaacacccuuaggguuaguagaccuuuuugucuucagcaccaguuuuuaucucauuagcaucuuccuccaccugguuaaaaucccaacccacagacaugucauagggaaacccugcccuaaaccacacagacucaaccacaugggcauaugcucauguggucuguacaaacauccugguguaccaguuaaguggaaaagauag

SEQ ID NO: 3875 - RNA, 1473 nt, Artificial Sequence
  derived and/or modified protein sequence (wt) from LASV(Lassa virus/H.sapiens-wt/NGA/2015/ISTH_0687;Clade II)__AVO03581__GPCstabilized
auggggcaaaucauaacauuuuuccaggaaguaccucaugucauagaggaagugaugaacauuguccugauugcucucagccuucuggcaauacugaaagggaucuacaauguugcuaccuguggccucuuuggauugguguccuuucuccucuuauguggaagaucaugcucaacaacuuacaaggguguuuaugagcuacaaacuuuagagcuagacaugacaaaucuuaauaugacaaugcccuugucuugcacgaagaacaacucccaccauuacaucauggucggaaaugagacuggccuggagcugacuuuaacaaauacaagcaucaucaaccacaaguuuuguaaccuuucugaugcacauaaaaagaaucuuuauaaccaugcuuuaaugaguaucaucucgacuuuccacuuauccauuccuaacuuuaaucaguaugaagcaaugaguugugacuucaaugggggaaagauaaguguucaguacaaccuuagccacacuuaugcuguagaugcagcuaaccacugugggaccguugccaauggcguucuucagacuuuuaugaggauggcuuggggugguaguuacauagcacuugauuccgggugcgggggcugggauugcauaaugacuuccuaccaauacuugauaauccaaaacaccacuugggaagaucacugccaguuuucucgcccaucccccaucgguuaucuggggcugcugucacaaaggaccagagacauuuacaucagccgaagacgccggggaacuuucacuuggacucucuccgacucugaaggcaaugaaacaccggguggauauugucuaacaagauggaugcugauugaggccgaauugaagugcuuugggaacacagcaguugcaaaaugcaaugagaaacaugaugaagaauuuugugacauguuaagauuguuugauuuuaacaaacaagcuauaaggaagcugaaggcacccgcacagaugaguauccaacugauaaacaaagcagugaacgcacugaucaaugaccagcugauuaugaaaaaucauuugagagacauuaugugcauuccuuacugcaauuacagcaaguauugguaucuaaaucacacuguuacagggaagacaucguuaccaaaaugcuggcuugugucaaaugguucuuaccugaaugagacacacuuuucugaugacauugaacaacaagcagacaauaugauaacagaacuguugcaaaaggaguacauggacagacaagggaaaacacccuuaggguuaguagaccuuuuugucuucagcaccagcuuuuaccucaucagcaucuuccuccaccugguuaaaaucccaacccacagacauaucauagggaaacccugcccuaaaccacacagacucaaccacaugggcauauguucauguggucuguauaaacauccuggugugccagucaaguggaaaagauag

SEQ ID NO: 3876 - RNA, 1473 nt, Artificial Sequence
  derived and/or modified protein sequence (wt) from LASV(Lassa virus/H.sapiens-wt/NGA/2015/ISTH_0736;Clade II)__AVO03573__GPCstabilized
augggacaaauuauaacauucuuccaggaaguaccucaugucauagaggaagugaugaacauuguccugauugcucucagccuucuggcaguacugaaggggaucuacaauguugcuaccuguggccucuuuggauugguguccuuucuccucuuauguggaagaucaugcucaacaacuuacaaggguguuuaugagcuacaaacucuagaguuggacauggcaagccuuaacaugacaaugcccuuaucuugcacgaagaacaacagccaccauuacaucauggucggaaaugagacuggcuuagagcugaccuuaacaaacacaaguauuaucaaccacaaguucugcaaccuuucugaugcacacaaaaagaaucuuuaugaccaugcuuuaaugaguaucaucucaaccuuccacuuauccauuccuaacuucaaucaguaugaagcaaugaguugugacuucaauggggggaagauaaguguucaguacaaccuaagccauacucaugcuguagacgcagccaaucacugugggacuauugccaaugguguucuucagacuuuuaugaggauggcuugggguggcaguuacauagcacuugauuccggaugcgggaguugggauuguauaaugacuuccuaccaauauuugauaauccaaaacaccacuugggaagaucacugccaguucucucgcccauccccuauugguuaucuggggcuacugucacaaaggaccagggacauuuauaucagucgaagacgccgggggacuuuuacuuggacucucucugauucugaagguaaugaaacaccggguggguauugucuaacaagauggauguugauugaggccgaguugaagugcuuugggaacacagcaguugcgaaaugcaaugagaagcaugaugaagaguuuugugacauguuaagauuguuugacuuuaacaaacaggcuauaaggaggcugaagacacccgcacagaugagcauccaacugauaaacaaagcagugaacgcacugaucaaugaucagcugaucaugaagaaccauuugagagauaucaugugcauuccuuacugcaauuacagcagguacugguaucuaaaucacacuguaacagggaagacaucguugccaagguguuggcuugugucaaaugguuccuaccugaaugagacacacuuuucugaugacauugaacagcaagcagacaacaugauaacagaacuguugcaaaaggaguacauagacaggcaagggagaacacccuuaggguugguagaucuuuuugucuucagcaccagcuuuuaucucauuagcaucuuccuccaccuagucaaaaucccaacucacagacauguuauagggaaaccuugcccuaaaccacacagacucaaccacaugggcauaugcucauguggucuauacaaacauccugguguaccagucaaguggaaaagauag

SEQ ID NO: 3877 - RNA, 1473 nt, Artificial Sequence
  derived and/or modified protein sequence (wt) from LASV(Lassa virus/H.sapiens-wt/NGA/2015/ISTH_0789;Clade II)__AVO03551__GPCstabilized
augggacaaauagugacauucuuucaagaaguuccucauguuauugaggagaucaugaacauuguccucaucacuuugucccugcuugcaauucucaagggaguauauaaccuugccacauguggucucaucggucugaucacauuccucuuucuuugugggaggucguguucaacaaucuacaaagggagcuaucaauuucagacacuugaacuaaacauggagacacucaacaugaccaugccccuguccuguacaaaaaauagcagucaccacuauauaagagugagcaaugaaacaggacuugaauugaccuugaccaacacaagcaucauaaaccacaaguuuugcaaucucucugaugcacauaaaaagaaucucuaugaucacacccucaugagcaucaucuccacuuuccacuuguccauucccaauuucaaucaguacgaagcaaugagcugugacuucaauggaggcaagaucaguguccaauacaaucuuagucacaguuaugcaguggaugcagccaaucacuguggcacuguggcaaauggagugcugcagaccuuuaugagaauggccuggggugggagcuacaucgcacuugacucgggcugcggaaauugggacuguauaaugacaagcuaucaauaccuaaucauucaaaauacaacaugggaagaccacugucaguucucaagaccaucuccuauugguuaucuuggacuucuaucacaaagaaccagagauauuuacaucagcaggagacgccggggaacauucacauggacacuaucagauucugaggguaaagaaacuccaggagguuacuguuugacuagauggaugcuaauagaagcugagcugaaguguuucgggaacacugcaguggcuaagugcaaugaaaaacaugaugaggaauuuugugacauguugaggcuuuuugauuucaacaaacaggccauucagagguugaaggcucccgcccaaaugagcauucaacuuaucaacaaggcaguaaacgcucuuauaaaugaccagcuuauaaugaagaaccaucucagggauaucaugugcauaccauauuguaauuacaguaaauacugguaccucaaucacacauccacgggcagaaccucacuaccaaaauguuggcuugugucaaacggguccuaucucaaugagacucauuuuucagaugacauagagcaacaagcugacaacaugauaacagagauguuacagaaagaauacauugauaggcaaggaaaaacuccacuuggacuaguugacuuguuuguguucagcaccaguuucuaucucaucaguauuuuccuucacuuggucaaaauuccaacucauaggcacauuguaggcaagucaugucccaaaccccauaggcugaaccauaugggcauuugcucuuguggauuguacaaacgaccagggguaccugugaaauggaagagauga

SEQ ID NO: 3878 - RNA, 1473 nt, Artificial Sequence
  derived and/or modified protein sequence (wt) from LASV(Lassa virus/H.sapiens-wt/NGA/2015/ISTH_0821;Clade II)__AVO03641__GPCstabilized
augggacaaaucauaacauuuuuccaggaaguaccucaugucauagaggaagugaugaacauuguccugauugcucucagccuucuggcaauacugaaaggaaucuacaauguugcuaccuguggccucuuuggauugguguccuuucuccucuuauguggaagaucaugcucaacaacuuacaaggguguuuaugagcuacaaacccuggagcuagacauggcaagccuuaauaugacaaugcccuuaucuugcacaaagaauaacagucaccauuacaucauggucggaaaugagacuggcuuggagcugacuuuaacaaauacaaguaucaucaaccacaaguuuuguaaccuuucugaugcacauaaaaagaaucuuuaugaucacacuuugaugaguaucaucucaaccuuccacuuauccauuccuaacuucaaucaguaugaagcaaugaguugugacuucaauggggggaagauaaguguucaguacaaccuuagccacacuuaugcuguagaugcagccaaccacugugggaccaucgccaauggcguucuucaaacuuuuaugaggauggcuugggguggcaguuacauagcacuugauucuggaugcggaaauugggacuguauaaugacuuccuaccaauauuugauaauccagaacaccacuugggaagaucacugccaguuuucucgcccauccccuaucgguuaccuggggcuacugucacagaggaccagggacaucuacaucagucgaagacgccgggggacuuuuacuuggacucucucugauucugaggguaaugaaacaccagguggguauugucuaacaagauggaugcugauugaggccgaguugaagugcuuugggaacacagcaguugcaaaaugcaaugagaaacaugaugaagaguuuugugacauguuaagauuguuugacuuuaacaaacaagccauaagcaggcugaagacacccgcacaaaugaguauccaacugauaaacaaagcagugaacgcacugaucaaugaccagcugauuaugaagaaucauuugagagauaucaugugcauuccuuacugcaauuacagcaaguacugguaucugaaucacacugugacagggaagacaucauugccaagguguuggcuuguaucaaaugguuccuaccuaaaugaaacacacuuuucugaugacauugaacaacaagcagacaacaugauaacagaaauguugcaaaaggaguacauagacagacaagggaagacacccuuaggguuaguggaucuuuuugucuucagcaccagcuucuaucucauuagcaucuuccuccaccugguuaaaaucccaacccacagacaugucauaggaaaacccugccccaaaccacacagacucaaccacaugggcauaugcucaugugguuuauacaaacauccugguguaccagucaaguggaaaagauaa

SEQ ID NO: 3879 - RNA, 1473 nt, Artificial Sequence
  derived and/or modified protein sequence (wt) from LASV(Lassa virus/H.sapiens-wt/NGA/2015/ISTH_0831;Clade II)__AVO03545__GPCstabilized
augggucagauagugacauucuuucaggaaguuccucaugucauugaggaaauuaugaacauuguccucaucacuuuaucucugcuugcaaucuugaaagguguguacaauuuggccacguguggccuuauuggucugauaacauuccuuuuccucuguggaaggucauguucgaugaccuacaaagggaguuaucaacuugaaacccuugaacugaacauggagacacuuaacaugaccaugccucuguccugcacaaaaaauaccagucaccacuacauaaggguggguaaugaaacagggcuugagcugacuuuaaccaauacaagcauuauaaaccacaaguucugcaaucucucugaugcccacaaaaagaaucucuacgaccacucucucaugagcauugucaguaccuuucaccuguccaucccuaacuucaaucaguaugaagcuaugaguugugacuucaauggagguaagaucaguauccaauacaauuuaagccacgccuaugcaggagaugcagccaaacauuguggcaccuuggcaaauggugugcuacaaaccuucaugaggauggcuuggggugggaguuacauugcacuugacucagguugcggaaacugggauuguauaaugacuagcuaccaauacuuaaucauucagaauacaacuugggaugaccauugucaguuuucgagaccaucacccauuggcuaucuuggacuucucucucaaaggaccagagaaauuuacauuaguagaagacgccggggaacauuuacauggacauuaucagauucugaaggcaaugaagcuccaggggguuacugcuuaacuagauggauguuaauugaagccgaacugaaauguuuugggaauacugcaguggcuaaaugcaaugagaagcaugaugaggaauuuugugacaugcugaggcuuuuugauuuuaacaaacaagccauucagagauugaagacucccgcucaaaugaguauucagcuuauuaacaaagcugucaaugcccucauaaaugaccaacuuauaaugaaaaaucaucucagggacauuaugugcauaccauauugcaacuauagcaaauauugguaucuuaaucauacgacuacggguagaacuucacuaccaagaugcuggcuuguaucaaacggguccuaucucaaugagacucauuucucagacgacauagaacaacaggcugacaauaugauaacagaaauguugcagaaagaguacaucgauagacaaggaaagaccccauuaggccugguugacuuguuuguguucagcacaagcuucuacuugaucagcauuuuucuacacuuggucaagauaccaacucauagacacauuguagguaaaucaugccccaagccucacaggcugaaccauaugggcauuugcucuugugggcuauauaaacagccaggagugccugugagguggaagagauga

SEQ ID NO: 3880 - RNA, 1473 nt, Artificial Sequence
  derived and/or modified protein sequence (wt) from LASV(Lassa virus/H.sapiens-wt/NGA/2016/ISTH_0009;Clade II)__AVO03571__GPCstabilized
augggacaaaucauaacauuuuuccaggaaguaccucaugucauagaggaagugaugaacauuguccugauugcucucagccuucuggcaauacugaaggggaucuacaauguugccaccuguggccuccuuggacugguguccuuucuccucuuauguggaaggucaugcucaacaacuuauaaggguguuuaugagcuacaaacucuagagcuggacauggcaagccuuaauaugacaaugccccugucuugcacaaagaacaacagucaccauuacaucauggucggaaaugagacuggcuuggagcugacuuuaacaaauacaaguauuaucaaccacaaguuuuguaaccuuucugaugcacauaaaaagaaucucuaugaccaugcucuaaugaguaucaucucaaccuuccacuuaucuauuccuaauuuuaaccaguaugaagcaaugaguugugacuucaauggggggaggauaaguguucaguacaaccuuagccacucuuaugcuguagaugcagccaaucacugugggacuaucgccaauggcguucuucagacuuucaugaggauggcuugggguggcaguuacauagcacuugauuccggaugcgggaguugggauuguauaaugacuuccuaccaauacuugauaauccagaacaccacuugggaagaucacugccaguuuucucgcccauccccuaucgguuauuuggggcuacugucacagaggaccagagacauuuacaucagucgaagacgccgggggacuuuuacuuggacucucucugauucugaagguaaugaaacaccggguggguacugucuaacaagauggaugcugauugaggccgaguugaagugcuuugggaacacagcaguugcgaaaugcaaugagaaacaugaugaagaguucugugacauguuaagacuguuugauuuuaauaaacaagccauaaggaggcugaagacacccgcacagaugaguauccaacugauaaacaaagcagugaaugcauugaucaaugaccagcuuauuaugaagaaccacuugagagauaucaugugcauuccuuacugcaauuacagcaaguacugguaucuaaaucacacuguaacagggaagacaucguugccaaggugcuggcuugugucaaaugguuccuaccugaaugagacacauuuuuccgaugacauugaacaacaggcagacaacaugauaacagaauuguugcagaaggaguacauagacaggcaagggaaaacacccuugggguuaguagaucuuuuugucuucagcaccagcuuuuaucucauuagcaucuuccuccaccuggucaaaauuccaacccacagacauaucacagggaaacccugccccaaaccacacagacuuaaccacaugggcauaugcucauguggucuauacaaccauccuggugugccagucaaguggaaaagauag

SEQ ID NO: 3881 - RNA, 1473 nt, Artificial Sequence
  derived and/or modified protein sequence (wt) from LASV(Lassa virus/H.sapiens-wt/NGA/2016/ISTH_0017;Clade II)__AVO03567__GPCstabilized
augggacaaaucauaacauuuuuccaggaaguaccucaugucauagaggaagugaugaacauuguccugauugcucucagccuucuggcaauacugaaagggaucuacaauguugcuaccuguggccucuuuggguugguguccuuccuccucuuaugugggagaucaugcucaacaacuuacaaggguguuuaugagcuacaaacucuagagcuagacauggcaagccuuaauaugacaaugcccuuaucuugcacgaagaacaauucccaccauuacaucauggucggaaaugagacuggcuuggagcugacuuuaacaaauacaagcauuaucaaccacaaguuuuguaaccuuucugaugcacauaaaaagaaucuuuaugaccaugccuuaaugagcaucauuucaaccuuccacuuauccauuccuaacuuuaaucaguaugaagcaaugaguugugacuucaaugggggaaaaauaaguguucaguacaaccuuagccauacuuaugcuauagaugcagcuaaccacugugggaccauugccaauggcguucuucagacuuuuaugaggauggcuugggguggcaguuacauagcacuugauuccggaugcggcagcugggacugcauuaugacuuccuaccaauauuugauaauccagaacaccacuugggaagaucacugccaguuuucucgcccaucccccaucgguuaucuggggcuacugucacaaaggaccagagacauuuacaucagucgaagacgccgggggacuuuuacauggacccucucugacucugaagguaaugaaacaccagguggguacugucuaacgagauggaugcugauugaggccgaguugaagugcuuugggaacacagcaguugcaaaaugcaaugagaaacaugaugaagaguuuugugauauguuaagauuauuugacuuuaacaaacaagcuauaaggaggcugaagacacccgcgcagaugaguauccaacugauaaacaaagcagugaacgcacugaucaaugaccagcugauuaugaagaaucauuuaagagauaucaugugcauuccuuacugcaauuacagcaaguauugguaucuaaaucacacuguaacagggaagacaucauuaccaagaugcuggcuugugucgaaugguuccuaccugaaugagacacauuuuucugaugacauugaacaacaagcagauaacaugauaacagaacuuuugcaaaaggaauauauggauaggcaagggaaaacacccuuaggguuaguagaucuuuuugucuucagcaccagcuuuuaucucauuagcaucuuccuccaccuggucagaaucccaacucacagacaugucauagggaaacccugcccuaaaccacacagacucaaccacaugggcauaugcucauguggucuguacaaacauccuggugugccagucaaauggaaaagauag

SEQ ID NO: 3882 - RNA, 1473 nt, Artificial Sequence
  derived and/or modified protein sequence (wt) from LASV(Lassa virus/H.sapiens-wt/NGA/2016/ISTH_0035;Clade II)__AVO03619__GPCstabilized
augggacaaaucauaacauucuuccaggaaguaccucaugucauagaggaagugaugaacauuguccugauugcucucagccuucuagcaauacuaaaagggaucuacaauguugcuacuuguggccucuuuggauugguguccuuccuccucuuauguggaagaucaugcucaaugacuuacaaggguguuuaugagcuacaaacucuagagcuagacauggcaagccucaacaugacaaugcccuuaucuugcacgaagaacaacucccaccauuacaucauggucggaaaugagaccggcuuggagcugacuuuaacaaauacaaguaucaucaaccacaaguuuugcaaccuuucugacgcacauaaaaagaaucuuuaugaccaugcuuuaaugaguaucauuucaaccuuccacuuguccaucccuaacuuuaaucaguaugaagcaaugagcugcgacuucaaugggggaaagauaaguguucaauacaaccuuagccacacuuaugcuguagaugcagcuaaccacugugggacuauugccaauggaguucuucagacuuuuaugaggauggcuugggguggcaguuacauagcacuugacuccggaugcgggagcugggauugcauaaugacuuccuaccaauauuugauaauccaaaacaccacuugggaggaucacugccaguuuucucgcccaucccccaucgguuaucugggacugcugucacaaaggaccagggacauuuacaucagucgaaggcgccgggggacuuuuacuuggacucucucugauucugaagguaaugaaacaccggguggguauugucuaacaagauggaugcugauugaggccgaguugaagugcuuugggaacacagcaguugcaaaaugcaaugagaaacaugaugaagaguuuugugacauguuaagauuguuugacuuuaauaaacaagcaauaaggaggcugaagacacccgcacagaugaguauccaacuaauaaacaaagcagugaacgcacugaucaaugaucaacugauuaugaagaaucauuugagagauaucaugugcauucccuacugcaauuacagcaaguauugguaucuaaaucacacuauaacagggaagacaucguugccaagaugcuggcuugugucaaauggcuccuaucugaaugagacacauuuuucugaugacauugaacaacaagcagacaacaugauaacugaacuguuacagaaggaauacauggacagacaagggaaaacaccccuaggguugguggaucuuuuugucuuuagcaccagcuuuuaucucauuaguauuuuccuucaucugguuaaaauuccaacccacagacaugucauagggaaacccugcccuaaaccacacagacucaaccacaugggcauaugcucauguggucuguacaaacauccuggugugccaguuaaguggaaaagauag

SEQ ID NO: 3883 - RNA, 1473 nt, Artificial Sequence
  derived and/or modified protein sequence (wt) from LASV(Lassa virus/H.sapiens-wt/NGA/2016/ISTH_0104;Clade II)__AVO03631__GPCstabilized
auggggcaagucauaacauucuuccaagaggugccucaugucauagaggagguuaugaacauuguccuaauugcccuuagucuccuagcaauacugaaagggauuuacaauguugcuaccuguggucucuuuggguugaucuccuuccuucuccuauguggcagaucauguucaacaaccuauaaagguguuuacgagcuacaaacucuggagcugaauaugcaaaaccuuaauaugacaaugcccuugucuugcacgaagaacagcagccaucauuauaucaugguuggaaaugaaacaggccuggaacuaacccuaacaaacacaagcaucauuaaucacaaguuuugcaaccuuucugaugcgcauaaaaagaaucucuaugaccaugcuuuaaugaguaucaucucaaccuuccauuuauccauuccaaacuucaaucaguaugaagcaaugaguugugacuucaauggagggaaaauaaguguucaguacaaccucagucacacuuaugcuauagaugcagccaaccacugugggaccguugcuaacgguguucugcagaccuuuaugaggauggcuugggguggcaguuacauagcacuugauucuggaugcgggaacugggauuguauaaugacuuccuaucaauacuugauaauucaaaacaccacuugggaagaucacugccaguucucucgcccauccccuauugguuacuugggacuauugucacagagaacuagagauaucuauaucagccgaagacgccggggaaccuucacuuggacccuuucugauucugaggguaaugaagcaccugguggauauugucuaacuagauggauguuaauugaagcggaacugaaaugcuucgggaacacagcaguugcaaagugcaacgagaagcaugaugaagaguuuugugacauguugagacuguuugauuucaacaaacaagcuauaaagaggcugaaaacacccgcgcagaugagcauucagcugauaaacaaggcagugaaugcacuaaucaaugaccagcugauuaugaagaaccaccuaagggacaucaugugcauuccuuauugcaauuacaguaaguacugguaucuaaaccacacugugacagggagaacaucacugccgagauguuggcuugugucaaauggauccuaccugaacgacacacaauuuucugaugacauugaacaacaagcagacaacaugauaacugagauguugcaaaaagaguacauggacaggcaggggaaaacaccuuuaggguuaguggaccuuuuugucuuuagcacuagcuuuuaccucauaagcaucuuccuccaccuggucaagaucccaacucacagacacauuguggggagaccuuguccuaagccgcacaggcucaaccauaugggcauuugcucauguggucuauacaaacaucccggugucccagucaaauggaagagauaa

SEQ ID NO: 3884 - RNA, 1476 nt, Artificial Sequence
  derived and/or modified protein sequence (wt) from LASV(Lassa virus/H.sapiens-wt/NGA/2016/ISTH_0133;Clade II)__AVO03635__GPCstabilized
auggggcagauaauaacauucuuccaagagguaccucaugucauagaagaggugaugaacauuguuuuaauugcccucagucuucuagcaguacugaaggcgaucuacaauguugcuaccuguggagucuuugggcugaucucauuucuucuucuguguggaagaucaugcucaacaacuuacaagggagucuaugaacuacaaacucuggaguuagacauggcaaaccuuaauaugacgaugcccuuauccuguacaaagaacaacagccaucauuacauuaugguugggaaugaaacaggcuuagagcugaccuugacgaauacaagcaucaucaaccacaaguuuuguaaucuuucugaugcacauaaaaagaaccuuuaugaccauagucuaaugagcaucauuucaacuuuccaccuguccauuccaaacuucaaucaguaugaagcaaugaguugugacuucaacgggggcaaaauuagugugcaauacaaccucagucauucuuacgcuguggaugcagccaaacauugugguaccauugcuaaugguguccugcagaccuuuaugaggauggccugggguggcagcuacauagcacuugauucuggaaagugcggcugggauuguauaaugacuuccuaucaauaucugauaauucaaaacaccaccugggaagaucacugccaguuuucccguccaucuccuauugguuaucugggacuacuuucacagagaaccagggacauuuauaucagccgaaggcuucgccggaccuuuaccuggacccuuucugacucugaaggcaaugaugcaccugguggguacugccuaacuagguggaugcugauugaagccgaacugaaguguuucgggaauacagccauugcaaaguguaacgagaaacaugacgaggaauuuugugacaugcuaagauuguucgacuuuaauaggcaagccauaaagagguugaagacagaaccccaaaugagcauccaauuaauaaacaaggcagugaaugcacuaauuaaugaucagcuaaucaugaagaaccacuugagagacauuaugggaugcccuuauuguaauuacaguaaauacugguauuugaaccacacuauaacagggaaaacaucauugccaagaugcuggcucguuucaaacgguucuuacuuaaacgaaacacauuuuucugaugacauugaacaacaagcagauaacaugauaacagaacuacugcaaaaggaauacauggacagacaagggaaaacaccuuuaggacugguggaccuuuuugucuuuaguacuagcuuuuaucucauaagcaucuuucuucacuuagucaaaaucccaacucauaggcauauugugggaaaaccuuguccuaaaccacacagacuuaaucacaugggcauaugcucauguggucuauauaaacaucccggcgucccagucaaguggaagagacaguga

SEQ ID NO: 3885 - RNA, 1473 nt, Artificial Sequence
  derived and/or modified protein sequence (wt) from LASV(Lassa virus/H.sapiens-wt/NGA/2016/ISTH_0141;Clade II)__AVO03649__GPCstabilized
augggacaaaucauaacauucuuccaggaaguaccucaugucauagaggaaguuaugaacauuguccugaucacucucagccuucuggcaauacugaaagggaucuacaauguugcuaccuguggccucuuuggauugguguccuuucuccucuuauguggaagaucauguucaacaauuuacaagggugucuaugagcuacaaacuuuagagcuagacauggcaagccuuaauaugacaaugcccuugucuugcacgaagaacaauucccaccauuacaucauggucgggaacgagacuggccuggagcugacuuuaacaaauacaagcauuaucaaccacaaguuuugcaaccuuucugaugcacacaaaaagaaucuuuaugaccaugcuuuaaugaguaucauuucaacuuuccacuuauccauuccuaacuuuaaucaguaugaagcaaugaguugugauuucaaugggggaaagauaaguguucaguacaaccuuagccacacuuaugcuguagaugcagcugaacacugugggacuauugccaauggcguucuucagacuuuuaugaggauggcuugggguggcaguuauauagcacuugauucuggaugcgggagcugggauugcauaaugacuuccuaccaauauuuaauaauccaaaacaccacuugggaagaucacugccaguuuucucgcccaucccccaucgguuaucugggguugcugucacagaggaccagggacauuuacaucagucgaagacgccggggaacuuuuacuuggacucucucugacucugaagguaaugaaacaccggguggguauugucuaacgagauggaugcugauugaggccgaguugaaguguuuugggaacacagcaguugcaaaaugcaaugagaaacaugaugaagaauuuugugacauguuaagacuguuugacuuuaacaaacaagcuauaaggagacugaagacacccgcacagaugagcauccaacugauaaacaaagcagugaacgcacugaucaaugaccaacugauuaugaagaaucauuugagagauauuaugugcauuccuuacugcaauuacagcaaguauugguaucuaaaucacacuguaacaggaaagacaucgcuaccgagaugcuggcuugugucaaaugguuccuaucugaaugagacacguuucucugaugauauugaacaacaagcagacaacaugauaacagaacucuugcaaaaggaguacauagacaggcaggggaaaacacccuuaggguugguagaccuuuuugucuucagcaccagcuuuuaucucauuagcaucuuccuucaccuggucaagaucccaacccacagacauaucauagggaaacccugcccuaaaccacacagacucaaccauaugggcauauguucauguggucuguacaaacauccugguauaccagucaaguggaaaagauag

SEQ ID NO: 3886 - RNA, 1473 nt, Artificial Sequence
  derived and/or modified protein sequence (wt) from LASV(Lassa virus/H.sapiens-wt/NGA/2016/ISTH_0146;Clade II)__AVO03633__GPCstabilized
augggacaaaucauaacauucuuccaggaaguaccucaugucauagaggaagugaugaacauugucuugauugcucucagccuucuggcaauacugaaagggaucuacaauguugcuaccuguggccucuuuggauugguguccuuucuccucuuauguggaagaucauguucaacaacuuacaaggguguuuaugagcuacaaacucuagagcuagacauggcaagccuuaauaugacaaugcccuuaucuuguacaaagaacaacucccaccauuacaucauggucggaaaugagacuggcuuggagcugacucuaacaaauacaagcauuaucaaccacaaguucugcaaccuuucugaugcacauaaaaagaaucuuuaugaccaugcuuuaaugaguaucaucucaaccuuucacuugucuauuccaaacuuuaaucaguaugaagcaaugaguugugauuucaauggagggaagauaaguguucaguacaaccuuagccacacuuaugcuguagaugcagcuaaccacugugggacuauugccaauggcguucuucagacuuuuaugaggauggcuugggguggcaguuacauagcacuugauuccggaugcgggagcugggauugcauaaugacuuccuaccaauauuugauaauccaaaacaccacuugggaagaccacugccaguuuucucgcccaucccccaucgguuaucuggggcuacugucacaaaggaccagggacauuuacaucagucgaagacgccgggggacuuuuacuuggacucucucugauucugaagguaaugaaacaccggguggguauugucuaacaagauggaugcugauugaggccgaauugaagugcuuuggaaacacagcaguugcgaaaugcaaugaaaaacaugaugaagaguuuugugacauguuaagauuguuugacuuuaacaagcaagcuauaaggaggcugaagacacccgcacagaugaguauccaacugauaaauaaagcagugaacgcacugaucaaugaccagcugauuaugaagaaucauuuaagagauaucaugugcauuccuuacugcaauuacagcaaguauugguaucuaaaucacacuguaacagggaagacaucgcuaccaagaugcuggcuugugucaaaugguuccuaucuaaaugaaacacauuucucugaugacauugaacaacaagcagacaacaugauaacugaacuguugcaaaaggaguacauggacaggcaagggaagacacccuuaggguuaguggaucuuuuugucuucagcaccagcuuuuaucuuauuagcaucuuccuucacuugguuaaaaucccaacccacagacacguuauagggaaacccugcccuaaaccacacagacucaaccacaugggcauaugcucauguggucuauacaaacauccugguguaccagucaaauggaaaagauaa

SEQ ID NO: 3887 - RNA, 1473 nt, Artificial Sequence
  derived and/or modified protein sequence (wt) from LASV(Lassa virus/H.sapiens-wt/NGA/2016/ISTH_0187;Clade II)__AVO03549__GPCstabilized
augggacagauugugacauucuuccaagaagucccucauguuauugaggaggugaugaacaucguucucauagcauuaucuguuuuagcaauuuuaaaggggcucuacaacuuugccacaugcggcuugauaggccuuguaacauuccuccuacuuucugggaggucauguucaauggucuacaaaggaguuuaugaacuacaaacccuugaauugaacauggagacauuaaauaugacuaugccauuguccugcacaaaaaacaacagccaucauuacauccgugugggaaaugauacugggcuugaacucacccugaccaacaauacuuuacucaaccauaaguuuugcaaccucucagaugcucacaagaaaaaucucuaugaucaugcccucaugagcaucauuucuaccuuccaucuguccauccccaacuucaaccaguaugaagcaaugaguugugacuucaauggcggacggauaacagugcaauacaaccuaagucacaguuacgcaguugaugcagcaaaccacugcggcacaguggcaaauggugugcugcagacauuuaugagaauggcuuggggaggcagcuacauugcccuugauucuagaugcgggaacugggacuguauaaugaccaguuaucaauacuuaauuauccagaauacaacuugggaagaccacugccaguucuccagaccaucucccauuggcuaucucgggcuccucucacaaagaaccagggauauuuacauuaguaggagacgccgggguacguucacuuggacgcucucugacucugaagggaaugagacaccaggaggauacugccucaccagguggauguuaauugaggcugagcugaaguguuuuggaaacacagcaguugccaaguguaaugaaaaacaugaugaagaguuuugugacaugcuaagacuauuugacuuuaacaagcaagccauaaggaggcuaaaggcacccgcccaaaugaguauacaauugaucaacaaagcagucaaugccuuaauaaaugaucagcugauuaugaagaaucaucugagagauauuaugugcauaccauacugcaauuauaguaaguauugguaccucaaucacacaucaacagggaagacuucauugccuagauguuggcuuguuucaaacgggucauaccucaaugaaacucacuuuucugaugacauugaacaacaggcugacaacaugauaacugagauguugcaaaaggaauacuuagacagacaaggaaaaaccccuuuagggcuaguugauauuuuugucuuuagcacaaguuuuuaucugaucagcauuuuccuccaucugaucaaaauacccacccauaggcauauuguggggaaaccuugccccaaaccccacaggcuaaaucacaugggcaucuguucuugugguuuauacaaacagccgggggugccugucagauggaagagauaa

SEQ ID NO: 3888 - RNA, 1473 nt, Artificial Sequence
  derived and/or modified protein sequence (wt) from LASV(Lassa virus/H.sapiens-wt/NGA/2016/ISTH_0199;Clade II)__AVO03653__GPCstabilized
augggacaaaucauaacauuuuuccaggaaguaccucaugucauagaggaagugaugaacauugucuugauugcucucagccuucuggcaauacugaaaggaaucuacaauguugccaccuguggccucuuuggauugguguccuuucuccucuuauguggaagaucaugcucaacaacuuacaaggguguuuaugagcuacaaacccuggagcuagacauggcaagccuuaauaugacaaugcccuuaucuugcacaaagaauaacagucaccauuacaucauggucggaaaugagacuggcuuggagcugacuuugacaaauacaaguaucaucaaccacaaguuuuguaaccuuucugaugcacauaaaaagaaucuuuaugaucacgcuuugaugaguaucaucucaaccuuccacuuauccauuccuaacuucaaucaguaugaagcaaugaguugugacuucaauggggggaagauaaguguucaguacaaccuuagccacacuuaugcuguagaugcagccaaccacugugggaccaucgccaauggcguucuucaaacuuuuaugaggauggcuugggguggcaguuacauagcacuugauucuggaugcggaaauugggacuguauaaugacuuccuaccaauauuugauaauccagaacaccacuugggaagaucacugccaguuuucucgcccauccccuaucgguuaccuggggcuacugucacagaggaccagggacaucuacaucagucgaagacgccgggggacuuuuacuuggacucucucugauucugaagguaaugaaacaccagguggguauugucuaacaagauggaugcugauugaggccgaguugaagugcuuugggaacacagcaguugcaaaaugcaaugagaaacaugaugaagaguuuugugacauguuaagauuguuugacuuuaacaaacaagccauaagcaggcugaagacacccgcacaaaugaguauccaacugauaaacaaagcagugaacgcacugaucaaugaccagcugauuaugaagaaucauuugagagauaucaugugcauuccuuacugcaauuacagcaaguacugguaucugaaucacacuguaacagggaagacaucauugccaaggugcuggcuuguaucaaaugguuccuaccuaaaugaaacacacuuuucugaugauauugaacaacaagcagacaacaugauaacagaaauguugcaaaaggaguacauagacaggcaagggaagacacccuugggguuaguggaucuuuuugucuucagcaccagcuuuuaccucauuagcaucuuccuccaccugguuaaaaucccaacccacagacaugucauaggaaaacccugccccaaaccacacagacucaaccauaugggcauaugcucaugugguuuauacaaacauccugguguaccagucaaguggaaaagauaa

SEQ ID NO: 3889 - RNA, 1473 nt, Artificial Sequence
  derived and/or modified protein sequence (wt) from LASV(Lassa virus/H.sapiens-wt/NGA/2016/ISTH_0419;Clade II)__AVO03539__GPCstabilized
augggacaaauagugacauucuuucaagaagucccucauguuauugaggaagucaugaacauuguccucauugcuuugucccuacuugcaauucucaaggggauauacaacuuugcuacaugcggccuuauuggccugaucacauuccucuuucuuuguggaaggucguguucggcgaucuacaagggaagcuaucaacuccagacaauugagcuaaacauggaaacacucaacaugacuaugccccuaucuuguacaaagaacagcagccaccacuacauaagagugggcaaugagacaggauuggaauuaaccuuaacuaacauaaguaucauugaccauaaauuuugcaaucucucugaugcacacaaaaagaaucucuaugaccacgcccucaugaguaucauuuccacuuuccauuuauccauccccaauuucaaucaguaugaggcaaugagcugugacuucaauggaggcaagaucaguguccaguauaaucugagucauacuuaugcaguggaugcagcuaaucauugcggcacuguggcaaauggugugcugcagacuuucaugagaauggccuggggugggagcuacaucgcgcuugauucaggcugcggaaauugggacugcauaaugacaagcuaccaauacuuaaucauucaaaauacgacaugggaggaccacugucaguucucaagaccaucuccuauugguuaucuuggacuucuaucacagagaaccagagauauuuacaucagcagaagacgccggggaacauucacauggacacuaucagacucugaaggcaaagaaaccccaggaggcuacugcuuaacuagauggauguuaaucgaagcugaacuaaaguguuucggaaacacugcaguagcuaaaugcaaugagaaacaugaugaggaauuuugugauauguugaggcuuuuugacuucaacaaacaagccauucagagguugaaggcucccgcccagaugagcauccaacuuaucaacaaggcagucaacgcucuuauaaaugaccagcugauaaugaaaaaccaccucagggauaucaugugcauaccauauugcaacuacaguaaauacugguaucuuaaucacacguccacagguaggacuucacuaccaagauguuggcuugugucaaacggauccuaccucaaugagacccauuuuucagaugauauagagcaacaagccgacaacaugauaacggagauguugcagaaggaauacauugauaggcaagggaagaccccacuuggauuaguugacuuauuuguauucagcacuaguuucuaccuuaucagcaucuuccuucauuugaucaaaaucccaacccauaggcacauugugggcaaaucaugccccaaaccucauaggcuaaaccacaugggcaucugcuccuguggacuguacaaacagccagguguaccugugaaauggaagagauga

SEQ ID NO: 3890 - RNA, 1473 nt, Artificial Sequence
  derived and/or modified protein sequence (wt) from LASV(Lassa virus/H.sapiens-wt/NGA/2016/ISTH_0447;Clade II)__AVO03559__GPCstabilized
augggacaaaucauaacauucuuccaggaagugccucaugucauagaggaagugaugaacauuguccugauugcucucagccuucuggcaauauugaaagggaucuacaauauugcuaccuguggccucuuuggguugguguccuuccuccucuuauguggaagaucaugcucaacaacauacaaggguguuuacgaacuacaaacccuagagcuagacauggcaagccuuaauaugacaaugccccugucuugcacgaagaacaauucccaccauuacaucauggucggaaaugagacuggcuuagaauugacuuuaacaaauacaagcauuaucaaccacaaguuuugcaaccuuucugaugcacauaaaaagaaucuuuaugaccacacuuuaaugaguaucaucucaaccuuccacuuauccauuccuaacuuuaaucaguaugaggcaaugaguugugauuucaaugggggaaagauaaguguucaguacaaccuuagccacgcuuaugcuguagaugcagccaaccacugugggaccauugccaauggcguucuccagacuuuuaugaggauggcuugggguggcaguuacauagcacuugauucuggaugcgggaacugggauugcauaaugacuuccuaccaguauuuaauaauccaaaacaccacuugggaagaucauugucaguuuucucgcccaucccccaucgguuaucuggggcugcugucgcaaaggaccagggacauuuacaucagucgaagacgccgggggacuuuuacuuggacucucucugacucugaagguaaugaaacaccggguggauauugucuaacaagauggauguugauugaggcugaguugaagugcuuugggaacacagcaguugcaaaauguaaugagaaacaugaugaggaguuuugugacauguugagauuguuugacuuuaacaaacaagcuauaaggaggcugaagacacccgcgcagaugagcauccaacugauaaacaaagcagugaacgcacugaucaaugaccagcugauuaugaagaaccauuugagggauaucaugugcauuccuuacugcaauuacagcaaauauugguaucuaaaucacacugugacagggaagacaucauugccaagaugcuggcuuguaucaaaugguuccuaccugaaugagacacauuuuucugaugacauugaacaacaagcagacaacaugauaacagaauuguugcaaaaggaguacauagacaggcaaggaaaaacacccuuaggguuaguagaucuuuuugucuucagcaccagcuuuuaucucauuagcaucuuccuccaccugguuaaaaucccaacccacagacauguuguagggaaacccugccccaaaccacauagacucaaucacaugggcauaugcucaugugguuuguacaaacauccuggugugccagucaaguggaaaagauag

SEQ ID NO: 3891 - RNA, 1473 nt, Artificial Sequence
  derived and/or modified protein sequence (wt) from LASV(Lassa virus/H.sapiens-wt/NGA/2016/ISTH_0543;Clade II)__AVO03595__GPCstabilized
auggggcaaauaauaacauucuuucaggaaguuccucaugucauagaagaggugaugaauauuguccugauugcucucagccuccuggcgauacugaaggggauuuacaauauugcuacuuguggccucuucgggcugaucuccuuucuucuucuguguggaagaucaugcucaacaaccuacaaaggugucuaugagcuacaaaccuuggagcuggauauggcaaaccucaacaugaccaugccucuaucuuguacaaaaaacaacagccaucacuauaucaugguugggaaugagacaggccuagaacugaccuugacaaacacaaguauaaucaaucacaaguucugcaaccuuucugaugcacacaaaaagaaucuuuaugaucaugccuugaugagcaucauuucaacuuuccacuuauccauuccgaacuucaaucaguaugaagcaaugaguugugacuuuaauggagggaagauaagugugcaauacaaucucagucauaguuaugcuguagaugcagccggccacugugggaccauugccaacgguguccuacagacuuucaugagaauggcuuggggcggcaguuacauagcacuugauucuggaugcgggaacugggauugcauaaugacuuccuaucaguauuugguuauccaaaacaccaccugggaagaucacugucaauuuucccgcccauccccuauuggauaccuaggacugcugucacaaagaacuagagauauuuacauuagucggagacgccggggaaccuucaccuggacucucucugacucugagggcaaugaagcaccggguggauacugccuuacuagauggaugcuaauugaagcugaauugaagugcuuugggaacacagccauugcaaaguguaaugagaagcacgaugaggaauucugugauauguugagacuuuuugacuucaacaaacaagccauaagaaggcuaaaagcacccgcacagaugagcauccaguugauaaauaaagcaguaaaugcacugaucaaugaccaguugaucaugaagaaccacuugagggauaucaugugcauuccuuauugcaauuacagcaaguacugguaucuaaaccacacugugacagggaagacaucauugccaaaguguuggcuuguuucaaaugguucuuaccuaaaugagacacauuucuccgaugauauugaacagcaagcagauaacaugauaacagaacugcugcaaaaggaguacauggacaggcaggggaaaacacccuuaggguuaguggaucuuuuuguuuucagcacuagcuuuuaucucauaaguauuuuccuccaccuggucaaaauuccgacccauagacacauuguggggagacccugccccaaaccacacagacucaaccacaugggcauaugcucaugugguuuguacaaacauccugguguaccugucaaguggaagagauag

SEQ ID NO: 3892 - RNA, 1473 nt, Artificial Sequence
  derived and/or modified protein sequence (wt) from LASV(Lassa virus/H.sapiens-wt/NGA/2016/ISTH_0565;Clade II)__AVO03637__GPCstabilized
augggacaaauaguaacauucuuucaggaagucccucaugucauagaagaggugaugaauauuguccugauugcucucagucuccuggcgauacugaaggggauuuacaauguugccacuuguggccucuuuggacuaaucuccuuccuucuucuguguggaagaucaugcucaacaaccuacaaaggugucuaugagcuacaaacucuggaguuggacauggcaaaccucaacaugacuaugccucuaucuuguacaaaaaacagcagccaucacuauaucaugguugggaaugaaacaggccuagaacugaccuugacaaacacaagcauaaucaaucacaaguuuugcaaccucucugaugcacacaagaagaaucuuuaugaucaugccuugaugagcaucauuucaacuuuccacuuauccauuccgaacuucaaucaguaugaagcaaugaguugugacuuuaauggagggaaaauaagugugcaauacaaucucagucauacuuaugcuguagaugcagccaaccacugugggaccauugccaacgguguccuacagacuuuuaugagaauggcuuggggcggcaguuacauagcacuugacucugggugcgggaauugggauugcauaaugacuuccuaucaguacuugauuauccagaacaccaccugggaagaucacugucaauuuucccgcccguccccuauuggauacuuaggacuguuaucacagagaacuagagauauuuacauuagucggagacgccggggaacuuucaccuggacucucucugacucugagggcaaugaggcacccgguggauacugccuuacuagauggaugcuaauugaagcugaauugaagugcuuugggaacacagccauugcgaaguguaaugagaagcacgaugaggaauuuugugauauguugagacuuuuugacuuuaacaaacaagccauaaaaaggcuuaaaucacccgcacagaugagcauccaauugauaaauaaagcaguaaaugcacuaaucaaugaucaguuaaucaugaagaaccacuugagggauaucaugugcauuccuuauugcaauuacagcagguacugguauuugaaccacacugugacagggaagacaucauugccaagguguuggcucauuucaaaugguucuuaccuaaaugagacacauuucuccgaugauauugaacagcaagcagauaacaugauaacagagcuguugcaaaaggaguauauggacaggcaggggaaaacacccuuaggguuaguggaucuuuuuguuuucagcacuagcuuuuaucucauaagcauuuuccuucacuuggucaaaaucccgacccauaggcacauuguggggagaccuugccccaagccacacagacucaaccacaugggcauaugcucguguggucuguacaaacauccugguguaccagucaaguggaagagauag

SEQ ID NO: 3893 - RNA, 1473 nt, Artificial Sequence
  derived and/or modified protein sequence (wt) from LASV(Lassa virus/H.sapiens-wt/NGA/2016/ISTH_0572;Clade II)__AVO03611__GPCstabilized
augggacaaaucauaacauuuuuccaggaaguaccucaugucauagaggaagugaugaacauuguucugauugcucuuagccuucuggcaauacugaaagggaucuacaauguugccaccuguggccucuuuggauugguggccuuucuccucuuguguggaagaucaugcucgacaaccuacaagggcguuuaugagcuacaaaccuuagagcuagacauggcaagccucaauaugacaaugccuuuaucuugcacgaagaacaacagccaucauuacaucauggucggaaaugagacuggcuuggagcugacuuuaacaaauacaaguauuaucaaccacaaguuuuguaaccuuucugaugcacauaaaaagaaucuuuaugaccaugcuuuaaugaguaucaucucaaccuuccacuuauccauucccaacuuuaaucagcaugaagcgaugaguugugacuucaauggaggaaagauaaguguucaguacaaccuuagccacacuuaugcuguagaugcagcuaaccacuguggaaccauugccaaugguguucuucagacuuuuaugaggauggcuugggguggcaguuacauagcacuugauuccggaugcgggaguugggacugcauaaugacuuccuaucaauauuugauaauccaaaacaccacuugggaagaucacugccaauuuucucgcccauccccuaucgguuaucuggggcuacugucacaaaggaccagggauauuuacaucagccgaaggcgccggggaacuuuuacuuggacucucucugauucugaagguaaugaaacaccagguggguauugucuaacaagauggaugcugauugaggccgagcugaagugcuuugggaacacagcaguugcgaagugcaaugagaaacacgaugaagaguuuugugacauguuaagguuguuugacuuuaacaaacaagcuauaaggaggcugaagacgcccgcacagaugaguauccaacugauaaacaaagcagugaacgcacuaaucaaugaccagcugaucaugaagaaucauuuaagagauaucaugugcauucccuacugcaauuacagcaaauacugguaucuaaaucauacugugacagggagaacaucacugccaaggugcuggcuugugucaaaugguuccuaccugaaugagacacauuucucugaugacauugaacaacaagcagacaacaugauaacagaacuguugcaaaaggaguacauggacaggcaagggaaaacacccuuaggguuaguagaucuuuuugucuucagcaccagcuuuuaucucauuagcaucuuccuccaccugauuaaaaucccaacccauagacaugucauagggaaacccugcccuaaaccacacagacucaaccacaugggcauaugcucauguggucuguacaaacauccugguguaccaguuaaguggaaaagauag

SEQ ID NO: 3894 - RNA, 1473 nt, Artificial Sequence
  derived and/or modified protein sequence (wt) from LASV(Lassa virus/H.sapiens-wt/NGA/2016/ISTH_0610;Clade II)__AVO03585__GPCstabilized
auggggcaaaucauaacauuuuuucaggaagugccucaugucauagaagaagugaugaacauuguccugauugcccuuagccuucuggcaauauugaaaggggucuacaauguugcuacuuguggccucuuuggacugguguccuuucuucucuuauguggaagaucaugcuccacaacuuacaaagguguuuaugagcuacaaacucuagagcuagacauggcaagccuuaauaugacaaugcccuuaucuuguacaaagaauaauagccaccauuacaucauggucggaaaugaaacuggcuuagagcugacuuuaacaaauacaaguaucaucaaccacaaguuuuguaaccuuucugaugcacauaaaaagaaucuuuaugaccaugcuuuaaugagcaucaucucaaccuuccacuuauccauuccuaacuuuaaucaguaugaggcaaugaguugugacuucaauggggggaagauaaguguucaguacaaccuuagccacacuuaugcuguagaugcagccaaccacugugggacuauugccaauggcguucuucagacuuucaugaggauggcuugggguggcagcuacauagcacuugauuccggaugcgggaguugggauuguauaaugacuuccuaccaauauuugauaauccagaacaccacuugggaagaucacugccaguuuucucgcccaucccccaucgguuaucugggacuacugucacaaagaaccagggauauuuacaucagucgaagacgccgggggacuuuuacuuggacccucucugauucugaaggcaaugaaacuccagguggguauugucugacaagguggauguuaauugaggccgaguugaagugcuuugggaacacagcaguugcgaaaugcaaugagaaacaugaugaagaguuuugugacaugcuaagauuguuugacuuuaacaaacaagcuauaaggaggcugaaagcacccgcacagaugaguauccaacuaauaaacaaagcagugaacgcacugauuaaugaccagcugauaaugaagaaucauuuaagagauaucaugugcauuccuuacugcaauuacaguaaguauugguauuugaaucacacuguaacagggaggacaucguuaccaagaugcuggcuugugucaaaugguuccuaccugaaugagacacauuuuucugaugacauugaacaacaagcagacaacaugauaacagaacuguugcagaaggaguacauagauaggcaagggaaaacaccuuuaggguuaguagaucuuuuugucuucagcaccaguuuuuaucucaucaguaucuuccuccaccugguuaaaaucccaacccacagacauaucauagggaaacccugcccuaaaccacauagacucaaccacaugggcauaugcucauguggucuguacaagcauccuggugugccagucaaguggaaaagauag

SEQ ID NO: 3895 - RNA, 1473 nt, Artificial Sequence
  derived and/or modified protein sequence (wt) from LASV(Lassa virus/H.sapiens-wt/NGA/2016/ISTH_0621;Clade II)__AVO03543__GPCstabilized
augggacaaauaguaacauucuuucaagaaaucccucauguuguugaggaaaucaugaauauuguccucaucaccuugucucuacuugcaauuuuaaagggguuauacaacuuugccacauguggucuuauuggcuugaucacauuccuuuuccucuguggaaggucauguucaacaauauacaaagggaguuaccaacuccaagcacuugagcuaaauauggaaacacucaacaugaccaugccucuauccugcacaaaaaacaacagucaccauuauauaagggugggcaaugaaacaggacucgaacugaccuuaaccaauacgagcaucauagaccauaaguucugcaaucuuucugaugcacacaaacggaaucucuaugaucacacccucaugagcaucaucuccacuuuccauuuguccaucccuaauuucaaccaguaugaagcaaugaguugugauuucaauggagguaagaucagugugcaauacaauuuaagucacaguuaugcaggagaugcugcuaggcauugcggcacuguggcaaauggcguccuacaaaccuuuaugagaauggccuggggugggaguuacauugcacuugacucaggcugcggaaacugggacuguauaaugacaaguuaucaauacuuaaucauccagaauacaacuugggagaaccacugucaguucucgaggccaucuccuauugguuaucuuggacuucucucacaaagaaccagagacauuuacaucagcagaaggcgccggggaacguucacauggacacugucagauucugaggguaaagaaaccccuggagguuacuguuugaccagauggauguuaauugaagcugaacugaaauguuuuggcaacacugcaguagccaagugcaaugagaaacaugaugaagaguucugugauauguuaaggcuuuuugacuucaacaagcaagcuauucagaggcuaaagacucccgcccagaugaguauucagcucauuaacaaggcagucaaugcccuuauaaaugaucagcuuauaaugaaaaaccaucuuagggacaucaugugcauaccauacugcaauuauagcaaauacugguaccucaaucacacaaccacaggcaaaacuucacuaccaaaauguuggcuugugucaaauggauccuaucucaaugaaacucauuuuucagaugacauagagcagcaagcugauaacaugauaacagaaaugcugcagaaggaauacauugauaggcaagggaaaacuccauuaggacugguugaccucuuuguguuuaguacuagcuucuaucuuaucagcauuuuccugcauuuaaucaagauaccaacucauaggcacauugugggcaagucgugcccuaaaccccacaggcuaaaccacaugggcauuugcuccugugggcuuuacaaacaaccaggggugcuugugaaguggaagagauaa

SEQ ID NO: 3896 - RNA, 1473 nt, Artificial Sequence
  derived and/or modified protein sequence (wt) from LASV(Lassa virus/H.sapiens-wt/NGA/2016/ISTH_0701;Clade II)__AVO03629__GPCstabilized
augggacaaaucauaacauuuuuccaggaaguaccucauguuauagaggaagugaugaacauuguccugauugcucucagccuucuggcaauacugaaggggaucuacaauguugccaccuguggccucuuuggauugguguccuuccuccucuuauguggaagaucauguucaacaacuuacaaggguguuuaugagcuacaaacucuggagcuagacauggcaagccuuaauaugacaaugcccuuaucuugcacgaagaacaacagccaccauuacaucauggucggaaaugagacuggcuuggagcugacuuuaacaaauacaaguaucauuggccacaaauuuuguaaccucucugaugcacauaaaaagaaucuuuaugaucaugcuuuaaugaguaucauuucaaccuuccacuuauccauuccuaacuuuaaucaguaugaagcaaugagcugugauuucaaugggggaaagauaaguguucaguacaaccuuagccacgcuuaugcuguagaugcagccaaccacugugggaccaucgccaauggcguucuucagacuuuuaugaggauggcuugggguggcaguuauauagcacuugauuccggaugcgggaguugggacuguauaaugacuuccuaccaauauuugauaauccaaaacaccacuugggaagaucacugccaguuuucucgcccauccccuauugguuaccuggggcuauugucacagaggaccagggacauuuacaucagucgaagacgccgggggacuuuuacuuggacucucucugauucugaagguaaugaaacaccggguggguauugucuaacaagauggaugcugauugaggccgaguugaaaugcuuugggaacacagcaguugcgaaaugcaaugagaaacaugaugaagaguuuugugacauguuaagauuguuugacuuuaauaaacaagcuauaaggaggcuaaagacgcccgcacagaugaguauccagcugauaaacaaagcagugaacgcacugaucaaugaccagcugauuaugaagaaucauuugagagauaucaugugcauuccuuacugcaauuacagcaaguacugguaucuaaaucauacuguaacagggaagacaucguugccaaggugcuggcuugugucaaaugguuccuaccugaaugagacacauuuuucugaugacauugaacaacaagcagacaauaugauaacagaacugcugcaaaaggaguacauagacaggcaaggaaaaacaccuuuaggguuaguagaucuuuuugucuucagcaccagcuuuuaucucauuagcaucuuucuccaccugguuaaaaucccaacccacagacaugucauaggaaaacccugcccuaaaccacacagacuuaaccacaugggcauauguucauguggucuauacaaacauccuggugugccagucaaguggaaaagauag

SEQ ID NO: 3897 - RNA, 1473 nt, Artificial Sequence
  derived and/or modified protein sequence (wt) from LASV(Lassa virus/H.sapiens-wt/NGA/2016/ISTH_0702;Clade II)__AVO03557__GPCstabilized
augggacaaaucauaacauuuuuccaggaaguaccccaugucauagaggaagugaugaacauuguucugauugcucuuagccuucuggcaguacugaaagggaucuacaauguugccaccuguggccucuuuggauugguggccuuucuccucuuguguggaaggucaugcucgacaaccuacaagggcguuuaugagcuacaaacccuagagcuagacauggcaaaccucaauaugacaaugccuuuaucuugcacgaagaacaacagccaucauuacaucauggucggaaaugagacuggcuuggagcugacuuuaacaaauacaaguauuaucaaccacaaguuuuguaaccuuucugaugcacauaaaaagaaucuuuaugaccaugcuuuaaugaguaucaucucaaccuuccacuuauccauucccaacuuuaaucaguaugaagcgaugaguugugacuucaauggaggaaagauaaguguucaguacaaccuuagccacacuuaugcuguagaugcagcuaaccauuguggaaccauugccaaugguguucuucagacuuuuaugaggauggcuugggguggcaguuacauagcacuugauuccggaugcgggaguugggacugcauaaugacuuccuaccaauauuugauaauccaaaacaccacuugggaagaucacugccaauuuucucgcccauccccuauugguuaucuggggcuacugucacaaaggaccagggauauuuacaucagccgaaggcgccggggaacuuuuacuuggacucucucugauucugaagguaaugaaacaccggguggguauugucuaacaagauggaugcugauugaggccgagcugaagugcuuugggaacacagcaguugcgaagugcaaugagaaacacgaugaagaguuuugugacauguuaagguuguuugacuuuaacaaacaagcuauaaggaggcugaagacgcccgcacagaugagcauccaacugauaaacaaagcagugaacgcacuaaucaaugaccagcugaucaugaagaaucauuugagagauaucaugugcauucccuacugcaauuacagcaaauacugguaucuaaaucauacugugacagggagaacaucacugccaaggugcuggcuugugucaaaugguuccuaccugaaugagacacauuucucugaugacauugaacaacaagcagacaacaugauaacagaacuguugcaaaaggaguacauggacaggcaagggaaaacacccuuaggguuaguagaucuuuuugucuucagcaccagcuuuuaucucauuagcaucuuccuccaccugauuaaaaucccaacccauagacaugucauagggaaacccugcccaaaaccacacagacucaaccacaugggcauaugcucauguggucuguacaaacauccugguguaccagucaaguggaaaagauag

SEQ ID NO: 3898 - RNA, 1473 nt, Artificial Sequence
  derived and/or modified protein sequence (wt) from LASV(Lassa virus/H.sapiens-wt/NGA/2016/ISTH_0703;Clade II)__AVO03597__GPCstabilized
augggacaaauuauaacauuuuuccaggaaguaccucaugucauagaggaagugaugaacauuguccugauugcucuuagccuucuggcaauacugaaagggaucuacaauguugcuaccuguggccucuuuggauugguguccuuucuccucuugugcggaagaucaugcucgacgaccuacaagggcguuuaugagcuacaaacccuagagcuagacauggcaagccuuaauaugacaaugccuuuaucuugcacgaagaacaacagccaucauuacaucauggucggaaaugagacuggcuuggagcugacuuuaacaaauacaaguauuaucaaccacaaguuuuguaaccuuucugaugcacauaaaaagaaucuuuaugaccaugcuuuaaugaguauuaucucaaccuuccacuuauccauucccaacuuuaaucaguaugaagcaaugaguugugacuucaauggaggaaagauaaguguucaguacaaccucagccacacuuaugcuguagaugcagcuagccacuguggaaccauugccaaugguguucuucagacuuuuaugaggauggcuugggguggcaguuacauagcacuugauuccggaugcgggaguugggacugcauaaugacuuccuaucaauauuugauaauccaaaacaccaccugggaagaucauugccaauuuucucgcccauccccuaucgguuaucuggggcuacugucacaaagaaccagggauauuuacaucagccgaaggcgccggggaacuuuuacuuggacucucucugauucugaagguaaugaaacaccggguggguauugucuaacaagauggauguugauugaggccgagcugaaaugcuuugggaacacagcaguugcgaagugcaaugagaaacacgaugaggaguuuugugacauguuaagguuguuugacuuuaacaaacaagcuauaaggaggcugaagacgcccgcacagaugaguauucaacugauaaacaaagcaguaaacgcacuaaucaaugaccaacugaucaugaagaaucauuugagagauauuaugugcauucccuacugcaauuacagcaaauacugguaucuaaaucauacugugacagggaggacaucacugccaagaugcuggcuugugucaaaugguuccuaccugaaugagacacauuuuucugaugacauugaacaacaagcagacaacaugauaacagaacuguugcaaaaggaguacauagagaggcaagggaaaacacccuuaggguugguagaucuuuuugucuucagcacuagcuuuuaucucauuagcaucuuccuccaccugauuaaaaucccaacccauagacaugucauagggaaacccugcccuaaaccacacagacucaaccacaugggcauaugcucauguggucuauacaaacauccugguguaccaguuaaguggaaaagauag

SEQ ID NO: 3899 - RNA, 1473 nt, Artificial Sequence
  derived and/or modified protein sequence (wt) from LASV(Lassa virus/H.sapiens-wt/NGA/2016/ISTH_0717;Clade II)__AVO03547__GPCstabilized
augggacagauugugacauucuuccaagaagucccucaugucaucgaggaggugaugaacaucguccucauagcauugucaauuuuggcaauucugaaaggacucuauaauguugccacaugcggcuuaauaggucuugucacauuucuccuacuuucugggagaucaugcucaaugauuuauaaaggaguuuaugagcuacaaacccuugagcugaacauggagacucugaauaugaccaugccgcuauccugcacgaaaaauaacagccaccauuacaucaugguggggaaugagacagggcuugagcuuacccuaaccaacacuagcuuacucaaccauaaguucugcaaccuuucagaugcucauaagaagaaucuuuaugaccauacucucaugagcauuaucuccacauuccauuuguccauucccaacuucaaucaguaugaggcaaugagcugcgauuucaauggcggcaaaaucacugugcaauacaaucuaagccacaccuaugcaguugacgcaguaaaucauuguggcacacuggcaaaugguauacugcaaacauuuaugagaauggcuuggggagguaguuacauugcucuugauuccagaugcgggaguugggauuguauaaugacuaguuaucaguaccugaucauccagaacacaaccugggaggaucauugucaauuuuccagaccaucucccauuggguaccuugggcuccucucacagagaaccagagacauuuacaucaguagaagacgccggggaacguuuaccuggacacucucugauucagaaggaaaugagacaccaggagguuacugccucacuagguggaugcugauugaagcugaacugaaguguuucgggaauacagcuguggccaaguguaaugaaaaacacgaugaagaguuuugugacaugcucagacuauuugacuucaauaaacaagccauaaggagauuaaaggcacccgcccaaaugaguauacagcugaucaacaaggcagucaaugcucuaauaaacgaucagcuaauuaugaagaaucaccugagggacaucaugugcauaccguacuguaacuacagcaaauauugguaccucaaucauacuucaacagggagaaccucauugccaagauguuggcuugucucaaaugguucauaucucaaugagacucacuucucagaugacaucgagcagcaagcugauaauaugauaacugaaauguugcaaaaggaguauuuagauaggcagggaaagaccccgcugggauugguagaucuuuuugucuucaguacaaguuucuacuugauuaguauuuuccuccaucuaaucaagauaccaacccauagacacauuguggggaagccuugcccuaaaccccacaggcugaaccacauggguauuugcuccuguggucuauacaagcagccaggagugccuguuagauggaagagauaa

SEQ ID NO: 3900 - RNA, 1473 nt, Artificial Sequence
  derived and/or modified protein sequence (wt) from LASV(Lassa virus/H.sapiens-wt/NGA/2016/ISTH_0753;Clade II)__AVO03609__GPCstabilized
auggggcaaauuauaacauuuuuccaggaaguaccucaugucauagaggaagugaugaacauuguccugauugcucucagccuucuggcaauucugaaagggaucuacaauguugcuacauguggccuuuuuggacugguguccuuucuccucuuauguggaagaucaugcucaacaacuuauaaggguguuuaugagcuacaaacucuagagcuagacauggcaagccuuaacaugacaaugcccuuaucuugcacgaagaacaacucccaccauuacaucauggucggaaaugagacuggcuuggagcugacuuuaacaaacacaaguauuaucaaccacaaauuuuguaaccucucugaugcacauaagaagaaucuuuaugaccaugcuuuaaugaguaucaucucaaccuuccacuuauccauucccaacuuuaaucaguaugaagcaaugagcugugacuucaauggagggaagauaagugugcaauacaaccucagccacacuuaugcuguggaugcggcuaaccauugugggaccauugccaauggcguucuucagacuuuuaugaggauggcuugggguggcaguuacauagcacuugauuccggaugcgggaacugggauugcauaaugacuuccuaccaauaucugauaauccaaaacaccacuugggaagaucacugucaguuuucucgcccaucccccaucgguuaucuggggcuacugucacaaaggaccagagacauuuacaucagucgaagacgccgggggacuuuuacuuggacucucucugauucugaaggcaaugaaacaccggguggguauugucuaacaagauggaugcugauugaggccgaguugaagugcuuugggaacacagcaguugcaaaaugcaaugagaaacaugaugaagaguuuugugacauguuaagauuguuugacuuuaacaaacaagcuauaaguaggcugaagacacccgcacagaugaguauccaacugauaaauaaagcagugaaugcacugaucaaugaccagcugauuaugaagaaucauuugagagauaucaugugcauuccuuauugcaauuacagcaaguauugguaucuaaaucacacuguaacagggagaacaucguugccaagaugcuggcuugugucaaaugguuccuaccugaaugagacacauuuuucugaugacauugaacaacaagcagacaacaugauaacagaacuguugcaaaaggaguacauggacaggcaaggaaaaacacccuuaggguuaguggaucuuuuuguuuuuagcaccaguuuuuaucucauuagcaucuuccuccaccugguuaaaaucccaacccacagacaugucauagggaaacccugcccuaaaccacacagacucaaccacaugggcauaugcucauguggucuauacaaacauccuggugugccaguuaaguggaaaagauag

SEQ ID NO: 3901 - RNA, 1473 nt, Artificial Sequence
  derived and/or modified protein sequence (wt) from LASV(Lassa virus/H.sapiens-wt/NGA/2016/ISTH_0759;Clade II)__AVO03593__GPCstabilized
auggggcaaaucauaacauuuuuccaggaagugccucaugucauugaagaggugaugaacauugucuuaauugcccucagccuucuagcaauacuaaaagggauuuacaauguugcuaccuguggccucuuuggguugguguccuuucuucucuuauguggaaggucaugcucaacaacuuacaaggguguuuaugagcuucaaacucuggagcuggauauggcgagccuuaauaugacaaugcccuuauccugcacgaagaacaacagucaccacuacaucaugguuggaaaugagacuggcuuggagcugaccuuaacaaacacaaguaucaucaaccacaaguuuugcaaccuuucugaugcacauaaaaagaaucucuaugaccauacuuuaaugagcaucaucucaaccuuccaccuauccaucccuaacuuuaaucaguaugaagcaaugaguugugacuucaauggggggaagauaaguguucaguacaaccucagccauacuuaugcuguggaugcagcuaaccauugugggaccauugccaauggaguccuucaaacuuuuaugaggauggcuugggguggcaguuacauagcacuugauucuggaugcgggaguugggauuguauaaugacguccuaccaauauuugauaauucaaaauaccaguugggaagaucacugccaguuuucucgcccguccccuaucgguuaucuggggcuacuuucacaaagaaccagggacauuuacaucagccgaagacgccggggaacuuuuacuuggacucucucugauucugaaggcaaugaaacaccggguggguauuguuuaacaagauggaugcugauugaagccgaauugaagugcuuugggaacacagcaguugcgaaaugcaaugagaagcaugaugaagaguuuugugacauguuaagguuguuugacuuuaauaaacaggcuauaaggaggcuaaagacacccgcacagaugagcauccaacuaauaaacaaagcagugaaugcacugaucaaugaccagcucauuaugaagaaucauuuaagagauaucaugugcauuccuuauugcaauuacagcaaguauugguacuuaaaccacacuguaacagggaagacaucguuaccaagauguuggcuuguaucaaaugguuccuaccugaaugaaacacauuuuucugaugacauugagcaacaagcagacaacaugauaacagaguuguuacagaaagaguacauugauaggcaagggaaaacacccuuaggguugguggaucuuuuugucuuuagcacuagcuucuaccuuauuagcaucuuccuccaccugguuaaaaucccaacccacagacaugucauagggaaacccugccccaagccacacagacucaaccacaugggcauaugcucauguggucuguacaaacauccugguguaccagucaaauggaaaagauag

SEQ ID NO: 3902 - RNA, 1473 nt, Artificial Sequence
  derived and/or modified protein sequence (wt) from LASV(Lassa virus/H.sapiens-wt/NGA/2016/ISTH_0777;Clade II)__AVO03615__GPCstabilized
auggggcaaauaauaacauucuuucaggaaguuccucaugucauagaagaggugaugaacauuguccugauugcccucagucuccuggcgauauugaaggggauuuacaauguugccacuuguggccuucuugggcugaucuccuuccuucuuuuauguggaagaucaugcucaacaaccuacaaggguguauaugagcuacaaacucuggagcuggacauggcaaaucuuaacaugacuaugccucuauccuguacaaagaacagcagccaucacuacaucaugguugggaaugaaacgggccuagaacugaccuugacaaacacaaguauaaucaaucauaaauucugcaaccuuucugaugcacacaagaagaaucuuuaugaucaugcucugaugagcaucauuucaacuuuccauuuguccauuccgaacuucaaucaguaugaggcaaugagcugugacuucaauggggggaaaauaagugugcaauacaaucuuagucaugcuuaugcuguagaugcagccaaccacugugggacuauugccaauggugucuuacagacuuuuaugagaauggcuuggggcggcagcuacauagcacucgacucuggaugcgggaacugggacuguauaaugacuuccuaucaguaccugauaauucaaaacaccaccugggaggaucacugucaauuuucccgcccaucccccauuggauaccuaggacugcugucacagagaacuagagauauuuacaucagucgaagacgccggggaacuuucaccuggacucucucugacucugagggcaaugaggcaccugguggauacugucuuacuagauggaugcuaauugaagcugaacugaagugcuuugggaacacagccauugcgaagugcaacgagaagcacgaugaggaauuuugugauauguugagacuuuucgacuucaacaaacaagcuauaaggagauuaaaaacacccgcacaaaugagcauccaauugauaaauaaagcaguaaaugcacuaauuaaugaccaguugaucaugaagaaccaccugagggauaucaugugcauuccuuauugcaauuacagcaaguauugguaucuaaaccauacuguaacagggaagacaucacugccaagguguuggcuuaucucgaaugguucuuaccuaaacgagacacauuuuucugaugauauugaacagcaagcagacaacaugauaacagaacuguuacaaaaggaguacauggauaggcaaggaaaaacacccuuaggguuaguagaccuuuuuguuuuuagcacuagcuuuuaucucauaagcauuuuccuccacuuggucaaaaucccgacccauaggcacauuguggggaaacccugccccaagccacacagacucaaccacaugggcauaugcucaugugguuuguacaagcauccugguguaccagucaaguggaagagauag

SEQ ID NO: 3903 - RNA, 1473 nt, Artificial Sequence
  derived and/or modified protein sequence (wt) from LASV(Lassa virus/H.sapiens-wt/NGA/2016/ISTH_0779;Clade II)__AVO03655__GPCstabilized
augggacaaauaauaaccuuuuuccaagagguaccccauguuguagaggaggugaugaauguaguccuaauugcacucagucuuuuggcaauauugaaaggaauuuacaacauugccacuugugggcuuuuugggcugaucucguuucuucuucugugcggcagaucaugcucaacuacuuacaaggguguuuaugaguugcaaaccuuggaacuggauauggcaaaucuuaacaugacaaugccuuuauccugcacaaaaaacaacagccaucacuacaucauggucgggaaugagacaggucuagaguuaacuuugaccaacacgagcauuaucaaccacaaauucugcaaccuuucugaugcucacaagaagaaccucuaugaccacacuuugaugaguaucaucucaaccuuccaccuguccaucccaaacuucaaucaauaugaagcuaugagcugugacuuuaacggggggaagauaaguguccaauacaaccucagucaugguuaugcuguagaugcagccaaucauuguggaacuaucgcaaauggggucuugcagaccuucaugaggauggcuugggguggaaguuauauagcacuugacucuggaugcggaaacugggacugcauaaugacuuccuaccaguacuuagugauucaaaacacuacuugggaggaucauugccaguuuucccguccaucuccuauugguuaucuuggauugcugucacagaggaccagagacauuuacaucagccgaagacgccgggguacuuucaccuggacucucucugauuccgaaggcaaugaugcaccugguggguacugucugaccagauggaugcuuauugaagcugaguugaaguguuuugggaauacagcuaucgcgaaaugcaaugagaaacaugacgaagaguucugcgacauguuaagacucuuugauuuuaacagacaagccauaaaaaggcuaaagacacccgcacagaugagcauucagcuuauaaauaaagcagucaaugcgcuuaucaaugaccaacugaucaugaaaaaucaccugagggacaucaugugcauuccuuacuguaauuauaguaaguacugguaccugaacaacacggugacagguaagucaucacuaccaaaauguuggcuuguuucgaaugggucuuaucugaaugagacacauuuuucugaugacauugaacaacaagcagauaacaugauaacagaaauguuacagaaagaguacauagauaggcaggggaaaacaccuuuaggguuaguggaucuuuuugucuuuagcaccagcuucuaucuuauaagcaucuuccuccacuuggucagaauuccgacccacaggcacauuacugggaaaccuugucccaagccacacagacucaaccacaugggcauuugcucauguggucuauacaaacaacccgguguaccaguuaaauggaagagauaa

SEQ ID NO: 3904 - RNA, 1473 nt, Artificial Sequence
  derived and/or modified protein sequence (wt) from LASV(Lassa virus/H.sapiens-wt/NGA/2016/ISTH_0917;Clade II)__AVO03535__GPCstabilized
augggucagauagugacauucuuucaggaaguuccucaugucauugaggaaauuaugaacauuguccucaucacuuuaucucugcuagcaaucuuaaaggguguguacaauuuggccacguguggccuuauuggucugauaacauuccuuuuccucuguggaaggucauguucgaugaccuacaaagggaauuaucaacuugaaacccuugaacugaacauggagaugcuuaacaugacuaugccucuguccugcacaaaaaauaacagucaccacuacauaaggguggguaaugaaacagggcucgagcugaccuuaaccaacacaagcaucauacaacacaaguucuguaaucucucugaugcacacaaaaggaaucucuacgaccacucucucaugagcauugucuccacuuuucaucuguccaucccuaacuuuaaucaguaugaagcuaugaguugugacuucaacggaggcaagaucagcauccaauacaauuugagccacaccuaugcaggagaugcagccaaacauuguggcacucuggcaaaugguauacugcaaaccuucaugaggauggcuuggggugggaguuacauugcacuugacucagguugcggaggcugggauuguauaaugacuaacuaccaauaccuaaucauucagaauguaacuugggaggaccauugucaauucucgagaccaucacccauuggcuaucuugggcuccucucucaaaggaccagagaaguuuacaucaguagaagacgccggggaacauucacauggacauuaucagauucugagggcaaugaagcuccaggggguuacugcuuaaccagauggauguuaauugaagcugaacugaaauguuuugggaauacugcaguagcuaagugcaaugagaaacaugaugaggaauucugugacaugcugaggcuuuuugauuucaacaaacaagccauucggagauugaaggcucccacucaaaugaguauccagcuuauuaacaaagcagucaaugcccucauaaaugaccagcuuauaaugaaaaaucaucucagagacauuaugugcauaccauauugcaacuauagcaaauauugguaucuuaaucauacaaucacggguagaacuucacuaccaagauguuggcuugugucaaacggguccuaucucaaugagacucauuucucagacgacauagaacaacaagcugacaacaugauaacagaaauguugcagaaagaguacaucgauagacaaggaaagaccccacugggcuugguugacuuguuuguguucagcacaaguuucuauuugaucagcauuuuccuacacuuagucaagauaccaacucauagacacauuguagguaagucaugccccaaaccucacaggcugaaucacaugggcauuugcucuugugggcuauacaagcggccaggagugucugugagguggaagagauaa

SEQ ID NO: 3905 - RNA, 1473 nt, Artificial Sequence
  derived and/or modified protein sequence (wt) from LASV(Lassa virus/H.sapiens-wt/NGA/2016/ISTH_1006;Clade II)__AVO03643__GPCstabilized
augggacaaaucauaacauuuuuccaggaaguaccucaugucauagaggaagugaugaacauuguucugauugcucuuagccuucuggcaauacugaaagggaucuacaauguugccaccuguggccucuuuggauugguggccuuucuccucuuguguggaagaucaugcucgacaaccuacaagggcguuuaugagcuacaaacccuagagcuggacauggcaagccucaauaugacaaugccuuuaucuugcacgaagaacaacagccaucauuacaucauggucggaaaugagacuggcuuggagcugacuuuaacaaauacaaguauuaucaaccacaaguuuuguaaccuuucugaugcacauaaaaagaaucuuuaugaccaugcuuuaaugaguaucaucucaaccuuccacuuauccauucccaacuuuaaucaguaugaagcgauggguugugacuucaauggaggaaagauaaguguucaguacaaccuuagccacaguuaugcuguagaugcagccaaccacuguggaaccauugccaaugguguucuucagacuuuuaugaggauggcuugggguggcaguuacauagcacuugauuccggaugcgggaguugggacugcauaaugacuuccuaccaauauuugauaauccaaaacaccacuugggaagaucacugccaauuuucucgcccauccccuaucgguuaucuggggcuacugucacaaaggaccagggauauuuacaucagccgaaggcgccggggaacuuuuacuuggacucucucugauucugaagguaacgaaacaccggguggguauugucuaacaagauggaugcugauugaggccgagcugaagugcuuugggaacacagcaguugcgaagugcaaugagaaacacgaugaagaguuuugugacauguuaagguuguuugacuuuaacaaacaagcuauaaggaggcugaagacgcccgcacagaugaguauccaacugauaaacaaagcagugaacgcacuaaucaaugaccagcugaucaugaagaaucauuuaagagauaucaugugcauucccuacugcaauuacaguaaauacugguaccuaaaucauacugugacagggagaacaucacugccaaggugcuggcuugugucaaaugguuccuaccugaaugagacacauuucucugaugacauugaacaacaagcagacaacaugauaacagaacuguugcaaaaggaguacauggacaggcaagggaaaacacccuuaggguuaguagaucuuuuugucuucagcaccagcuuuuaucucauuagcaucuuccuccaccugauuaaaaucccaacccauagacaugucauagggaaacccugcccuaaaccacacagacucaaccacaugggcauaugcucauguggucuguacaaacauccugguguaccaguuaaguggaaaagauag

SEQ ID NO: 3906 - RNA, 1473 nt, Artificial Sequence
  derived and/or modified protein sequence (wt) from LASV(Lassa virus/H.sapiens-wt/NGA/2016/ISTH_1026;Clade II)__AVO03589__GPCstabilized
augggacaaaucauaacauuuuuccaggaaguaccucaugucauagaggaagugaugaacauuguccugauugcucucagccuucuggcaauacugaaggggaucuacaauguugcuaccuguggccucuuuggauugguguccuuccuccucuuauguggaaggucauguucaacaacuuacaaggguguuuaugagcuacaaacucuggagcuagacauggcaagccuuaauaugacaaugcccuuaucuugcacgaagaacaacagccaccauuacaucauggucggaaaugagacuggcuuggagcugacuuuaacaaauacaaguaucaucaaccacaaauuuuguaaccucucugaugcacauaaaaagaaucuuuaugaucaugcuuuaaugaguaucauuucaaccuuccacuuguccauuccuaacuuuaaucaguaugaagcaaugagcugugacuucaauggggggaagauaaguguucaguacaaccuuagccacgcuuaugcuauagaugcagccagccacugugggacuaucgccaauggcguccuucagacuuuuaugaggauggcuugggguggcaguuauauagcacuugauuccggaugcgggaguugggacuguauaaugacuuccuaccaauauuugauaauccaaaacaccacuugggaagaucacugccaguuuucucgcccauccccuaucgguuaccuagggcuacugucacaaaggaccagggacauuuacaucagucgaagacgccgggggacuuuuacuuggacucucucugauucugaagguaaugaaacaccggguggguauugucuaacaagauggauguugauugaggccgaguugaaaugcuuugggaacacagcaguugcaaaaugcaaugagaaacaugaugaagaguuuugugacauguuaagauuguuugacuuuaacaaacaagcuauaaggaggcuaaagacacccgcacagaugaguauccagcugauaaacaaagcagugaaugcacugaucaaugaccagcugauuaugaagaaucauuugagagauaucaugugcauuccuuacugcaauuacagcaaguacugguaucuaaaucauacuguaacagggaagacaucguugccaaggugcuggcuugugucaaaugguuccuaccugaaugagacacauuuuucugaugauauugagcaacaggcagacaacaugauaacagaacugcugcaaaaggaguacuuagacaggcaagggaaaacaccuuuaggguuaguagaucuuuuugucuucagcaccagcuuuuaucucauuagcaucuuccuccaccugguuaaaaucccaacccacagacaugucauaggaaggcccugcccuaaaccacacagacucaaccacaugggcauauguucauguggucuauacaaacauccuggugugccagucaaguggaaaagauag

SEQ ID NO: 3907 - RNA, 1473 nt, Artificial Sequence
  derived and/or modified protein sequence (wt) from LASV(Lassa virus/H.sapiens-wt/NGA/2016/ISTH_1070;Clade II)__AVO03651__GPCstabilized
augggacaaaucauaacauuuuuccaggaaguaccucaugucauagaagaagugaugaacauuguccugauugcccucagccuucuggcgauuuugaaagggaucuacaauguugccaccuguggccucuuuggauugguauccuuccuucucuuauguggaagaucaugcucaacaacuuacaaagguguuuaugagcuacaaacucuggagcuagacauggcaagccuuaacaugacaaugcccuuaucuugcacaaagaacaacagccaccacuacaucauggucggaaaugagacuggcuuagaguugacuuuaacaaauacaaguaucaucaaccacaaguucuguaaccuuucugaugcacauaaaaagaaucuuuaugaccaugcuuuaaugaguaucaucucaaccuuccacuuauccauuccuaacuuuaaucaguaugaggcaaugagcugugacuucaauggggggaagauaaguguucaguacaaccuuagccacacuuuugcuguagaugcagcuaaccacugugggacuauugcuaauggcguucuccagacuuucaugaggauggcuugggguggcaguuacauagcacuugauuccggaugcgggagcugggauugcauaaugacuuccuaccaguauuugauaauucagaacaccacuugggaagaucacugccaguuuucucgcccaucccccaucgguuaucuggggcugcugucacaaaggaccagggacauuuacaucagucgaagacgccgggggacuuuuacuuggacccucucugauucugaaggcaaugaaacaccggguggguauugucuaacaagauggaugcugauugaagccgaauugaagugcuuugggaacacagcaguugcgaaaugcaaugagaaacaugaugaggaguuuugugacauguuaagauuguuugacuuuaacaaacaagcuauaaggaggcugaagacucccgcacagaugaguauccaacugauaaacaaagcagugaacgcauugauuaaugaccagcugauuaugaagaaucauuuaagagacaucaugugcauuccuuacugcaauuacagcaaauauugguauuugaaucacacuguaacagggaagacaucguuaccaagaugcuggcuugugucaaaugguuccuaccugaaugagacacauuuuucugaugauauugaacaacaagcagacaacaugauaacagaacuguugcagaaagaguacauggacaggcaagggaaaacacccuuaggguuaguagaucuuuuugucuucagcaccaguuuuuaucucauuagcaucuuucuccaccuaguuaaaaucccaacucauagacauauuauuggaaaacccuguccuaaaccacacagacucaaccacaugggcauaugcucauguggucuguacaaacauccugguguaccagucaaauggaaaagauag

SEQ ID NO: 3908 - RNA, 1473 nt, Artificial Sequence
  derived and/or modified protein sequence (wt) from LASV(Lassa virus/H.sapiens-wt/NGA/2016/ISTH_1123;Clade II)__AVO03645__GPCstabilized
auggggcaaaucauaacauuuuuccaggaagugccucaugucauugaggaggugaugaacauugucuuaauugcucucagccuucuagcaauacuaaaagggauuuacaauguugcuaccuguggucucuuuggguuggugucuuuucuucucuuauguggaaggucaugcucaacaacuuacaaggguguuuaugagcuucaaacucuggagcuggauaugggaagccuuaauaugacaaugcccuuauccugcacgaagaacaacagccaccacuacaucaugguuggaaaugagacuggcuuggagcugacuuuaacaaacacaaguaucauuaaccacaaauucugcaaccuuucugaugcacauaaaaagaaucucuaugaccaugcuuuaaugagcaucaucucaaccuuccaccuaucuaucccuaacuuuaaucaguaugaagcaaugaguugugacuucaauggaggaaagauaaguguucaguacaaccucagccaugcuuaugcuguggaugcagcuaaccauugugggaccauugccaauggaguccuucaaacuuuuaugaggauggccugggguggcaguuacauagcacuugauucuggaugcgggaguugggauuguauaaugacguccuaccaauauuugauaauccaaaacaccaguugggaagaucacugccaguuuucucgcccguccccuaucgguuaucuggggcuacugucacaaagaaccagggacauuuacaucagccgaaggcgccggggaaccuuuacuuggacucucucugacucugagggcaaugaaacaccggguggguacuguuuaacaagauggauguugauugaggccgaauuaaagugcuuugggaacacagcagucgcgaagugcaaugagaaacaugaugaagaguuuugugacauguuaagauuguuugacuuuaacaaacaggcuauaaggaggcuaaagacacccgcacagaugaguauccaacuaauaaacaaagcagugaacgcacugaucaaugaccagcucauuaugaagaaucauuuaagagauaucaugugcauuccuuacugcaauuacagcaaguauugguauuuaaaccacacuguaacagggaagacaucguugccaagaugcuggcuuguaucaaaugguuccuaccugaaugaaacacauuuuucugaugacauugagcaacaagcagacaacaugauaacagaauuguuacagaaagaguacauugacaggcaagggaaaacacccuuaggguugguggaucuuuuugucuucagcacuagcuucuaccuuauuagcaucuuccuccaccugguuaaaaucccaacccauagacaugucauagggaaacccugccccaagccacacagacucaaccacaugggcauaugcucauguggucucuacaaacauccugguguaccagucaaguggaaaagauag

SEQ ID NO: 3909 - RNA, 1473 nt, Artificial Sequence
  derived and/or modified protein sequence (wt) from LASV(Lassa virus/H.sapiens-wt/NGA/2016/ISTH_1150;Clade II)__AVO03627__GPCstabilized
augggacaaguaauaacauucuuucaggaaauaccucaugucauagaagaggugaugaauauuguccugauuacccucagucuucuggcgauauugaaggggaucuacaauguggccaccuguggccuuuuugggcugaucuccuuucuccuucuguguggaaggucaugcucaacaaccuacaaaggugucuaugaacugcaaacucuggagcuggacauggcaaaccucaacaugaccaugccucuaucuugcacaaaaaacagcagccaucauuacaucaugguugggaaugaaacuggccuagaauugacucugacaaacacgaguauaauuaaucauaaauucugcaaccuuagugaugcacacaaaaagaaucuuuaugaucaugcuuugaugagcaucaucucaacuuuccacuuguccauuccgaacuuuaaucaguaugaggcaaugaguugugacuucaauggagggaaaauaagcguacaauacaaccuuagccaugcuuaugcuguagaugcagccaaucacugugggaccauagcuaaugguguuuuacagaccuuuaugagaauggcuuggggcggcagcuauauagcacuugacucugggugcgggaacugggauuguauaaugacuuccuaucaguauuugauaauucaaaacacuacuugggaagaucacugucaauuuucccgcccauccccuauuggauaccugggacuguuaucacagaggacuagagacauuuacaucagucgaagacgccggggaacuuucaccuggacucucucugacucugagggcaaugaagcacccgguggguacugccuuaccagauggaugcuaauugaagcugaacugaagugcuuugggaacacagccauugcaaaguguaacgagaagcacgaugaagaauucugugauauguugagacuuuucgacuucaacaaacaagccauacguaggcugaaaacacccgcacaaaagagcauccaauuaauaaauaaagcaguaaaugcacuaauuaaugaccaguugaucaugaagaaccaccugagggauaucaugugcauuccuuauugcaauuacagcaaguacugguacuuaaaccauacagugacaggaaaaacaucacugccaaaaugcuggcuuauuucgaaugguucuuaccuaaaugagacacacuucuccgaugauauugaacagcaagcagacaauaugauuacagaacuguugcaaaaagaguauauggacagacaggggaaaacacccuuaggguugguagaucuuuuuguuuuuagcacuagcuuuuaucucauaagcauuuuccuccacuuaguuaagaucccgacccauaggcacauuguggggagacccugccccaaaccacacagacucaaccacaugggcauaugcucaugugguuuguacaaacauccugguguaccagucaaguggaagagauag

SEQ ID NO: 3910 - RNA, 1473 nt, Artificial Sequence
  derived and/or modified protein sequence (wt) from LASV(Lassa virus/H.sapiens-wt/NGA/2016/ISTH_1174;Clade II)__AVO03555__GPCstabilized
augggacaaaucauaacauucuuccaggaaguaccucaugucauagaggaagugaugaacauuguccugauugcucucagccuucuggcaauacugaaagggaucuacaauguugcuaccuguggcuucuuuggauugguguccuuucuccucuuauguggaagaucauguucaacaauuuacaaggguguuuaugagcuacaaacucuagagcuagacauggcaagccuuaauaugacaaugcccuuaucuugcacaaagaacaacucccaccauuacaucauggucggaaaugagacuggcuuggagcugacucuaacaaauacaaguauuaucaaccacaaguuuugcaaccuuucugaugcacauaaaaagaaucuuuaugaccaugcuuuaaugaguaucaucucaaccuuccacuugucuauuccacacuuuaaucaguaugaagcaaugaguugugauuuuaauggagggaagauaaguguucaguacaaccuuagccacacuuaugcuguagaugcagcuaaccacugugggacuauugccaauggcguccuucagacuuuuaugaggauggcuugggguggcaguuacauagcacuugauuccggaugcgggagcugggauugcauaaugaccuccuaccaauauuugauaauccaaaacaccacuugggaagaucacugccaguuuucucguccaucccccaucgguuaucuggggcuacugucacaaaggaccagggacaucuacaucagucgaagacgccgggggacuuuuacuuggacucucucugauucugaagguaaugaaacaccggguggguauugucuaacaagauggaugcugauugaggccgaguugaagugcuuugggaacacagcaguugcgaaaugcaaugaaaaacaugaugaagaguuuugugacauguuaagauuguuugacuuuaacaaacaagcuauaaggaagcugaagacacccgcacagaugaguauccaacugauaaauaaagcagugaacgcacugaucaaugaccagcugaucaugaagaaucauuuaagagauaucaugugcauuccuuauugcaauuacagcaaguacugguaucuaaaucacacuguaacagggaagacaucguugccaagaugcuggcuugugucaaaugguuccuaucuaaaugaaacacauuuuucugaugacauugaacaacaagcagacaacaugauaacagaacuguugcaaaaggaguacauggacaggcaggggaagacacccuuagggcuaguagaucuuuuugucuucagcaccagcuuuuaucuuauuagcaucuuccuccaccugguuaaaaucccaacucacagacaugucauagggaaacccuguccuaaaccacacagacucaaccacaugggcauaugcucauguggucuguacaaacauccuggugugccaguuaaguggaaaagauaa

SEQ ID NO: 3911 - RNA, 1473 nt, Artificial Sequence
  derived and/or modified protein sequence (wt) from LASV(Lassa virus/H.sapiens-wt/NGA/2016/ISTH_1207;Clade II)__AVO03599__GPCstabilized
augggacaaauuauaacauuuuuccaggaaguaccccaugucauagaggaagugaugaacauuguccugauugcucucagccuucuggcaauauugaaaggaaucuacaauguugcuaccuguggccucuuuggauugguguccuuucuccucuuauguggaagaucaugcucaacaacuuacaaggguguuuaugagcuacaaacccuagagcuagacaugacaagccucaauaugacaaugcccuuauccugcacaaagaacaacagccaccauuacaucaugguuggaaaugagacuggcuuggagcugacuuuaacaaauacaaguauuaucaaccacaaguuuuguaaucuuucugaugcacauaaaaagaaucucuaugaccaugcuuuaaugagcaucaucucaaccuuccacuuauccauucccaauuuuaaucaguaugaagcaaugaguugugacuuuaauggagggaagauaaguguucaguacaaccucagccacacuuaugcuguagaugcagccaaucacugugggacuaucgccaauggcguucuucagacuuuuaugaggauggcuuggggcggcaguuacauagcacuugauuccggaugcgggaguugggauuguauaaugacuuccuaccaauauuugauaauccaaaacaccacuugggaagaucacugccaguuuucucgcccaucccccaucgguuaccuggggcuacugucacaaaggacuagggacauuuacaucagucgaagacgccgggguacuuuuacuuggacucuuucugauucugaaggcaaugauacaccggguggauauugucuaacaagauggaugcugauugaggcugaguugaagugcuuugggaacacagcaguugcaaaaugcaaugagaaacacgaugaagaguuuugugacauguuaagauuguuugacuuuaacaaacaagcuauaaggaggcuaaagacacccgcacagaugagcauccaacugauaaacaaagcagugaacgcacugaucaaugaucaacucauuaugaagaaucacuugagagauaucaugugcauuccuuacugcaauuacagcaaguacugguaucuaaaucacacuguaacagggaagacaucguugccaaggugcuggcuuguaucaaaugguuccuaccugaaugagacacauuuuucugaugacaucgaacaacaagcagauaacaugauaacagaacuguugcaaaaggaguacauagacaggcaagggaaaacacccuuaggguuaguggaucuuuuuguuuucagcaccaguuuuuaucucauuagcaucuuccuccaccuggucaaaaucccaacccacagacauguuauagggaaacccugcccuaaaccacacagacucaaccacaugggcauaugcucauguggccuguacaaacauccugguguaccagucaaguggaaaagauag

SEQ ID NO: 3912 - RNA, 1473 nt, Artificial Sequence
  derived and/or modified protein sequence (wt) from LASV(Lassa virus/H.sapiens-wt/NGA/2016/ISTH_1306;Clade II)__AVO03623__GPCstabilized
augggacaaaucauaacauuuuuccaagaaguaccucaugucauagaggaagugaugaacauuguccugauugcucuuagccuccuggcaauacugaaagggaucuacaauguugcuaccuguggccucuuuggauugguguccuuucuccucuuauguggaagaucaugcucaacaaccuacaaggguguuuaugagcuacaaacucuagagcuagacauggcaagccuuaauaugacaaugcccuuaucuuguacgaagaacaacagccaccauuacaucauggucggaaaugagacuggcuuggagcugacuuuaacaaauacaagcauuaucaaccacaaguuuuguaaccuuucugaugcacauaaaaagaaucuuuaugaccaugcuuuaaugagcaucaucucaaccuuccauuuaucuauucccaacuucaaucaguaugaagcaaugaguugugacuucaaugggggaaagauaaguguucaguauaaccucagccacacuuacgcuguagaugcagccaaccacugugggacugucgccaauggcguccuucagacuuucaugaggauggcuugggguggcaguuacauagcacuugauuccggaugcgggaguugggauuguauaaugacuuccuaccaauauuugauaauccaaaacacuacuugggaagaucacugccaguuuucucgcccaucuccuaucgguuaucuggggcuacugucacaaaggaccagagacauuuacaucagucgaagacgccgggggacuuuuacuuggacucucucugauucugaagguaaugaaacaccggguggguauugucuaacaagauggaugcugauugaggcugaguugaaaugcuuugggaacacagcaguugcgaaauguaaugagaaacaugaugaagaguuuugugacauguuaagauuguuugacuuuaacaaacaagcuauaaggagguugaagacacccgcacaaaugaguauucaacugauaaacaaagcagugaacgcacugaucaaugaccagcuaauuaugaagaaucauuuaagagacaucaugugcauuccuuacugcaauuacagcaaguacugguaucuaaaucacacuguaacagggaggacaucguugccaaggugcuggcuugugucaaaugguuccuaccugaaugagacacauuuuucugaugacauugaacaacaagcagacaacaugauaacagaacuauugcaaaaagaguacauagauaggcaagggaaaacacccuuaggguuaguggaucuuuuugucuucagcaccagcuuuuaucucauuagcaucuuucuucaccuggucaaaaucccaacucacagacaugucauaggaaaacccugcccuaaaccacacagacucaaccacaugggcauaugcucauguggucuauacaaacauccugguguaccagucaaguggaaaagauag

SEQ ID NO: 3913 - RNA, 1473 nt, Artificial Sequence
  derived and/or modified protein sequence (wt) from LASV(Lassa virus/H.sapiens-wt/NGA/2016/ISTH_1311;Clade II)__AVO03575__GPCstabilized
augggacaaauagugacauucuuucaagaaguaccucaugucauagaagaggugaugaacauuguccugauugcucucagucuccuagcgauacugaaggggauuuacaauguagcuacuuguggccuuuuugggcugaucuccuuucuccuucuguguggaagaucaugcucaacaaccuacaagggugucuaugagcugcaaacucuagagcuggacauggcaaaccuuaacaugacuaugccucuaucuugcacaaaaaacaacagucaucauuacaucaugguuggaaaugaaacaggcuuagaacugaccuugacaaacacaaguauaaucaaucacaaauucuguaaccuuucugaugcacacaaaaagaaucuuuaugaucaugcuuugaugagcaucaucucaaccuuccacuuauccauuccgaacuucaaucaguaugaagcaaugagcugugauuuuaauggagggaaaauaaguguacaauacaaucuuagucaugcuuaugcuggagaugcagccagccacugugggaccauugccaauggugucuugcagacuuucaugagaauggcuuggggcggcagcuacauagcacuugauucuggaugcggaaacugggauuguauaaugacuuccuaucaguacuuaauaauucaaaacaccacuugggaagaucacugccaauuuucccgcccaucccccauuggauaccuaggacuccuaucacagagaacuagagacaucuacaucagucggagacgccggggaacuuucaccuggacacucucugauucugaggguaaugaugcacccgguggauacugccuuacuagauggauguuaauugaagcugaacugaagugcuuugggaacacagccauugcgaaguguaaugagaaacacgaugaggaauucugugauauguugagacuuuuugacuucaacaaacaagcuauaaaaaggcuaaaaacacccgcacagaugaguauccaauuaauaaauaaagcagugaaugcacuaaucaaugaccaguugaucaugaagaaccaccugagggacaucaugugcauuccuuauugcaauuacagcaaguacugguacuuaaaucauaccacaacagggaagacaucauugccgaagugcuggcuuauuucgaaugguucuuaccugaaugagacacacuucuccgaugauauugaacaacaagcggacaacaugauaacagaacuguugcaaaaggaguauuuggacagacaggggaaaacacccuuagguuugguagaucuuuuuguuuuuagcacuagcuuuuaucucauaaguauuuuccuccacuugauuaaaaucccaacccauaggcacauuguggggagacccugccccaagccacacagacucaaccauauggguauaugcucaugugguuuauauaaacauccuggugugccagucaaguggaagagauag

SEQ ID NO: 3914 - RNA, 1473 nt, Artificial Sequence
  derived and/or modified protein sequence (wt) from LASV(Lassa virus/H.sapiens-wt/NGA/2016/ISTH_1423;Clade II)__AVO03577__GPCstabilized
auggggcagaucgugacauuuuuccaagaagugccucaugucauagaggaaguaaugaacauugucuugauugcccucagucuucuggcaauacugaaagggaucuacaauguugccaccuguggccucuucggguugguguccuuucuucuccuauguggaagaucaugcucaacaacuuacaaagguguuuaugaacuucaaacuuuagagcuggacauggcaaaccuuaauaugacaaugcccuugucuugcacaaagaacaacagccaccacuacauuaugguuggaaaugagacuggcuuggaauuaacuuuaacaaacacaagcaucaucaaccacaaguuuuguaaccuuucugaugcacauaaaaagaaucuuuaugaccaugcuuuaaugagcaucaucucaaccuuccacuuaucaauucccaacuuuaaucaguaugaggcaaugaguugugauuucaauggagggaagauaaguguucaguacaaucuuagccacucuuaugcuguggaugcagcuaaccacugugggaccguugcuaauggcguucugcagacuuucaugaggauggcuugggguggcaguuauauagcacuugauucugggugcgggagcugggacuguauaaugacuuccuaccaauauuuaauaauccaaaacaucaccugggaagaucauugccaguuuucucgcccauccccuaucgguuaucuagggcuauugucacaaagaacuagagacaucuacaucagucguagacgccggggaacuuuuacuuggacucuuucugauucugaagguaaagaaacaccggguggauacuguuugacaagauggaugcugauugaggcugaguugaagugcuuugggaauacagcaguugcgaagugcaaugagaaacaugaugaagaauuuugugacauguugagacuguuugacuuuaacaaacaagcuauaaggaggcugaagacacccgcacagaugaguauccaauuaauaaacaaagcagugaaugcacugaucaaugaccaauugaucaugaagaaccauuuaagggauaucaugugcauuccuuacugcaacuacaguaaguauugguauuugaaucacacuguaacagggaaaacgucguugccaagaugcuggcuugugucaaaugguucuuaccuaaaugagacacacuuuucugaugacauugagcaacaagcagacaacaugauaacagaacuguugcagaaagaauacauagacagacaagggaaaacaccucuaggguuaguagaccuuuuuguuuucaguaccagcuuuuaucucauuagcaucuuccuccaucugguuaagaucccaacucacagacauaucuuagggaaacccugcccuaaaccacacagacucaaccacaugggcauaugcucauguggucuguacaagcacccugguguaccagucaaguggaaaagauaa

SEQ ID NO: 3915 - RNA, 1473 nt, Artificial Sequence
  derived and/or modified protein sequence (wt) from LASV(Lassa virus/H.sapiens-wt/NGA/2016/ISTH_1462;Clade II)__AVO03587__GPCstabilized
augggacaaaucauaacauuuuuccaggaaguaccucaugucauagaggaagugaugaacauuguccugauugcucuuagccuucuggcaauauugaaagggaucuacaauguugcuaccuguggccucuuuggauugguguccuuucuccucuugugcggaagaucaugcucgacaaccuacaagggcguuuaugagcuacaaacccuagagcuagacauggcuagccuuaauaugacaaugccuuuaucuugcacgaagaacaacagccaucauuacaucauggucggaaaugagacuggcuuggagcugacuuuaacaaauacaaguauuaucaaccacaaguuuuguaaccuuucugaugcacauaaaaagaaucuuuaugaccaugcuuuaaugaguaucaucucaaccuuccaccuauccauucccaacuuuaaucaguaugaagcaaugaguugugacuucaauggaggaaagauaaguguucaguacaaccucagccacacuuaugccguagaugcagcuaaccacuguggaaccauugccaaugguguucuucagacuuuuaugaggauggcuugggguggcaguuacauagcacuugauuccggaugcgggaguugggacugcauaaugacuuccuaccaauauuugauaauccaaaacaccacuugggaagaucauugccaauuuucucgcccauccccuaucgguuaucuggggcuacugucacaaaggaccagggauauuuacaucagccgaaggcgccggggaaccuuuacuuggacucucucugauucugaagguaaugaaacaccggguggguauugucuaacaagauggauguugauugaggccgagcugaaaugcuuugggaacacagcaguugcgaagugcaaugagaaacacgaugaggaguuuugugacauguuaagguuguuugacuuuaacaaacaagcuauaaggaggcugaagacgcccgcacagaugagcauucaacugauaaacaaagcaguaaacgcacuaaucaaugaccaacugaucaugaagaaucauuugagagauaucaugugcauucccuacugcaauuacagcaaauacugguaucuaaaucauacugugacagggaggacaucacuaccaagaugcuggcuugugucaaaugguuccuaccugaaugagacacauuuuucugaugacauugaacaacaagcagacaacaugauaacagaacuguugcaaaaggaguacauagagaggcaagggaaaacacccuuaggguuaguagaucuuuuugucuucagcacuagcuuuuaucucauuagcaucuuccuccaccugauuaaaaucccaacccauagacaugucauagggaaacccugcccuaaaccacacagacucaaccacaugggcauaugcucauguggucuauacaaacauccugguguaccaguuaaguggaaaagauag

SEQ ID NO: 3916 - RNA, 1473 nt, Artificial Sequence
  derived and/or modified protein sequence (wt) from LASV(Lassa virus/H.sapiens-wt/NGA/2016/ISTH_1472;Clade II)__AVO03605__GPCstabilized
augggacaaaucauaacuuuuuuccaggaaguaccucaugucauagaggaagugaugaacauuguccugauugcccuuagccuucuggcaauacugaaagggaucuacaauguugcuaccuguggccucuuuggauugguguccuuucuccucuuguguggaagaucaugcucgacaaccuacaaggguguuuaugagcuacaaacccuagagcuagacauggcaagccuuaauaugacaaugccuuuaucuugcacgaagaacaacagccaucauuacaucauggucggaaacgagacuggcuuggagcugacuuuaacaaauacaaguauuaucaaccacaaguuuuguaaccuuucugaugcacauaaaaagaaucuuuaugaccaugcuuuaaugaguaucaucucaaccuuccacuuauccauucccaacuuuaaucaguaugaagcaaugaguugugacuucaauggaggaaagauaaguguucaguacaaccuuagccacacuuaugcuguagaugcagcuaaccacuguggaaccauugccaaugguguucuucagacuuuuaugaggauggcuugggguggcaguuacauagcacuugauuccggaugcgggaguugggacugcauaaugacuuccuaccaauauuugauaauucaaaacaccacuugggaagaucacugccaauuuucucgcccauccccuauugguuaucuggggcuauugucacaaaggaccagggauauuuacaucagccgaaggcgccggggaacuuuuacuuggacucucucugauucugaagguaaugaaacaccggguggguauugucugacaagauggauguugauugaagccgagcugaagugcuuugggaacacagcaguugcgaagugcaaugagaaacacgaugaagaguuuugugacauguuaagguuguuugacuuuaacaaacaagcuauaaggaggcugaagacgcccgcacaaaugaguauccaacugauaaacaaagcaguaaacgcacuaaucaaugaccagcuaaucaugaagaaucauuugagagauaucaugugcauucccuacugcaauuacagcaaauacugguaucugaaucauacugugacagggaggacaucacugccaagaugcuggcuugugucaaaugguuccuacuugaaugagacacauuuuucugaugacauugaacaacaagcagacaacaugauaacagaacuguugcaaaaggaguacauagauaggcaagggaaaacacccuuaggguuaguagaucuauuugucuucagcaccagcuuuuaucucauuagcaucuuccuccaccugauuaaaaucccaacccauagacaugucauagggaaacccugcccuaaaccacacagacucaaccacaugggcauaugcucauguggucuguacaaacauccugguguaccaguuaaguggaaaagauag

SEQ ID NO: 3917 - RNA, 1473 nt, Artificial Sequence
  derived and/or modified protein sequence (wt) from LASV(Lassa virus/H.sapiens-wt/NGA/2016/ISTH_1474;Clade II)__AVO03613__GPCstabilized
augggacaaauuauaacauuuuuccaggaaguaccucaugucauagaggaagugaugaacauuguccugauugcucucagccuucuggcaauacuaaaagggaucuacaauguugcuaccuguggccucuuuggauugguguccuuccuccuccuauguggaagaucaugcucaacaacuuacaaagguguuuaugagcuacaaacucuagagcuagacauggcaagccuuaauaugacaaugcccuuaucuugcacgaagaacaacucccaccauuacaucauggucgggaaugagacuggcuuggagcugacuuugacaaauacaagcauuauccaccacaaguuuuguaaccuuucugaugcgcauaagaagaaucuuuaugaccaugcuuuaaugagcaucaucucaaccuuccacuuauccauuccuaacuuuaaucaguaugaagcaaugaguugugacuucaauggaggaaagauaaguguucaguacaaccuuagccacacuuaugcuguagaugcagcuaaccacuguggaaccauugccaauggcguucuucagacuuucaugaggauggcuugggguggcaguuacauagcacuugauuccggaugcggaaguugggacugcauaaugacuuccuaccaauauuugauaauucaaaacaccacuugggaagaucacugccaauuuucucgcccauccccuauugguuaucuggggcuauugucacaaaggaccagggauauuuacaucagccgaaggcgccggggaacuuuuacuuggacucucucugauucugaagguaaugaaacaccggguggguauugucugacaagauggauguugauugaagccgagcugaagugcuuugggaacacagcaguugcgaagugcaaugagaaacacgaugaagaguuuugugacauguuaagguuguuugacuuuaacaaacaagcuauaaggaggcugaagacgcccgcacaaaugaguauccaacugauaaacaaagcaguaaacgcacuaaucaaugaccagcuaaucaugaagaaucauuugagagauaucaugugcauucccuacugcaauuacagcaaauacugguaucugaaucauacugugacagggaggacaucacugccaagaugcuggcuugugucaaaugguuccuacuugaaugagacacauuuuucugaugacauugaacaacaagcagacaacaugauaacagaacuguugcaaaaggaguacauagauaggcaagggaaaacacccuuaggguuaguagaucuauuugucuucagcaccagcuuuuaucucauuagcaucuuccuccaccugauuaaaaucccaacccauagacaugucauagggaagcccugcccuaaaccacacagacucaaccacaugggcauauguucaugugguuuguacaaacauccuggcgugccagucaaguggaaaagauag

SEQ ID NO: 3918 - RNA, 1476 nt, Artificial Sequence
  derived and/or modified protein sequence (wt) from LASV(Lassa virus/H.sapiens-wt/NGA/2016/ISTH_1496;Clade II)__AVO03579__GPCstabilized
augggacaaauuauaacauuuuuccaggaaguaccucaugucauagaggaagugaugaacauuguccugauugcucucagccuucuggcaauauugaaaggggucuacaauguugccaccuguggccucuuuggauugguguccuuucuccucuuauguggaagaucaugcucaacaacaauauacaaggguguuuaugagcuacaaacucuagaguuagacauggcaagccuuaauaugacaaugccccuauccugcacgaagaacaacagccaccauuacaucauggucggaaaugagacugguuuggagcugacucuaacaaacacaagcauuaucaaccacaaguuuuguaaccuuucugaugcacauaaaaagaaucucuaugaccaugcuuuaaugaguaucaucucaaccuuccacuuauccauuccuaacuuuaaucaguaugaagcaaugaguugugacuucaauggggggaagauaaguguucaauacaaucuuagccacgcuuaugcuguagaugcagcuaaucacugugggaccaucgccaauggcguucuucagacuuuuaugaggauggcuugggguggcaguuacauagcacuugauuccggaugcaggaguugggauuguauaaugacuuccuaccaauauuugauaauccaaaacaccacuugggaagaucacugccaguuuucucgcccaucccccaucgguuaucuggggcuacugucacagaggaccagagacauuuacaucagucgaagacgccgggggacuuucacauggacucuuucugauucugaagguaaugaaacaccagguggguauugucuaacaagauggaugcugauugaagccgaguugaagugcuuugggaacacagcaguugcgaaaugcaaugaaaaacaugaugaagaguuuugugacauguuaagauuguuugacuuuaacaaacaagcuauaagaaggcugaagacacccgcacagaugaguauccagcugauaaacaaagcagugaacgcacugaucaaugaccagcugaucaugaagaaucauuugagagauaucaugugcauuccuuacugcaauuacagcaaguauugguaucuaaaucacacuguaacagggaagacaucguugcccaggugcuggcuugugucaaaugguuccuaccugaaugagacacauuuuucugaugauauugaacaacaagcagacaacaugauaacagaacuguugcaaaaggaguacauagacaggcaagggaaaacacccuuaggauuaguagaucuuuuugucuuuagcaccaguuuuuaucucauuagcaucuuccuccaucuggucaaaauuccaacucauagacauguuauagggaagcccugcccuaaaccacacagacucaaccacauggguauaugcucauguggucuauacaaacauccugguguaccagucaaauggaaaagauag

SEQ ID NO: 3919 - RNA, 1473 nt, Artificial Sequence
  derived and/or modified protein sequence (wt) from LASV(Lassa virus/H.sapiens-wt/NGA/2016/ISTH_1541;Clade II)__AVO03553__GPCstabilized
auggggcaaauagugacauucuuucaagaaguuccucaugucauugaggagauuaugaauauuguccucaucacuuugucccuacuugcuguuuuaaagggaauauauaacuuugccacauguggucuaauuggcuugaucacauuccuuuuccucuguggaagaucaugcucgacaaucuacaaaggaaacuaucaacuucagacacuugagcugaacauggagacacucaacaugacuaugccucuauccugcacaaaaaacaacagucaccacuacauaagagugggcaaugaaacaggacucgaauugacccugaccaacguaaguaucauaaaccacagauucuguaaucuuucugaugcacacaagaggaaucucuaugaucacacccucaugagcaucaucuccaccuuccauuuguccaucccaaauuucaaucaauacgaggcaaugaguugugauuucaauggagggaagaucaguguucaauauaaccuaagccacggauaugcgguggaugcggcuaagcauugugguacuguggcaaaugguguguugcagaccuuuaugaggauggccuggggugggagcuauauugcacuugacucaggcugcgggaacugggauuguauaaugacaaguuaucaauaccugaucauucaaaacacgacuugggaggaucacugucaguucucaaggccaucucccauugguuaucuuggacuucuuucacagaggaccagagauauuuacaucaguagaaggcgccggggaacauucacauggacacugucagacucugaggguagagaaaccccuggagguuacuguuugaccagauggaugcugauugaagcugaauugaaguguuucggcaacacugcaguagccaaaugcaaugagaaacaugaugaagaguuuugugacauguugagacuuuucgacuucaacaaacaagccauucagaggcugaagacucccgcccaaaugaguauucagcucauuaacaaggcggucaaugcccuuauaaaugaccagcuuauaaugaaaaaccaucugagggacaucaugugcauaccauacugcaauuacagcaaauauugguaucucaaucacacaaccacaggcaaaacuucacuaccaaaguguuggcuugugacaaauggauccuaucuuaaugaaacucauuuuucagaugacauagaacaacaagcugacaacaugauaacggaaaugcugcaaaaggaauauauugauaggcaagggaaaacuccacuuggacuaguugaccucuucguauucagcaccagcuucuaucucaucagcauuuuccuucauuuaauuaagauaccgaaccacaggcacauuguggguaagccaugccccaaaccccauagacugaaccauaugggcauuugcuccuguggguuuuacaaacaaccaggaguacccgugagguggaagagauag

SEQ ID NO: 3920 - RNA, 1473 nt, Artificial Sequence
  derived and/or modified protein sequence (wt) from LASV(Lassa virus/H.sapiens-wt/NGA/2016/ISTH_1546;Clade II)__AVO03537__GPCstabilized
auggggcaaauagugacauucuuucaagaaaucccucauguuguugaggaaaucaugaauauuguccucaucaccuuaucccuacuugcaauuuuaaaggguuuauacaacuuugccacauguggucucauuggcuugaucacauuccuuuuccucuguggaagaucauguucaacaauauauaaagggaguuaccaacuccaggcacuugaguugaacauggaaacacucaauaugacuaugccucuauccugcacaaaaaacaacagucaccacuacauaagggugggcaaugagacaggacucgaguugaccuuaaccaauacgagcaucauaaaucauaaguucugcaaccuuucugaugcacacaaaaagaaccucuaugaucacacccucaugagcaucaucuccaccuuccacuuguccauccccaauuuuaaucaguaugaagcaaugaguugugauuucaauggagguaaaaucaguguacaguacaaucuaagucacaguuaugcaggagaugcggcuaggcauugcggcacuguggcaaauggugucuuacaaacuuuuaugaggauggccuggggugggaguuacauugcacucgacucaggcugcggaaacugggacuguauaaugacgaguuaucaauacuuaaucauucagaacacaacuugggaggaccacugucaguucucgaggccaucucccaucgguuaucuuggacuucucucgcaaagaaccagagacaucuacaucaguagaaggcgccggggaacauuuacauggacacugucagauucugaagguaaagaaacuccuggagguuacuguuugacuagauggaugcuaauugaagcugaacugaaauguuuuggcaacacugcaguagccaagugcaaugagaaacaugaugaagaauuuugugacauguuaaggcuuuucgacuucaacaaacaagccauucagaggcugaagacucccgcccagaugagcauccagcucaucaacaaggcagucaaugcccuuauaaaugaucaacuuauaaugaaaaaccaucuuagggacaucaugugcauaccauacugcaauuacagcaaauauugguaccucaaccacacaaccacaggcaaaacuucacuaccaagauguuggcuugugucaaauggguccuaucuuaaugaaacucauuucucagaugacauagaacaacaggcugacaacaugauaacagaaaugcugcagaaggaauacauugauaggcaagggaaaacuccacuaggacuaguugaccucuuuguguuuagcacuagcuucuaccuuaucagcauuuuccugcauuugaucaagauaccaacccacaggcacauugugggcaagucaugccccaagccccauaggcuaaaucacaugggcauuugcuccugugggcuuuacaaacaaccagggguaccugugaaauggaagagauaa

SEQ ID NO: 3921 - RNA, 1473 nt, Artificial Sequence
  derived and/or modified protein sequence (wt) from LASV(Lassa virus/H.sapiens-wt/NGA/2016/ISTH_1591;Clade II)__AVO03647__GPCstabilized
augggacaaaucauaacauuuuuccaggaaguaccucaugucauagaggaagugaugaacauugucuugauugcucuuagccuucuggcaauacugaaaggaaucuacaauguugcuaccuguggccuuuuuggauugguguccuuucuccuccuauguggaagaucaugcucaacaacuuacaaggguguuuaugagcuacaaacucuagagcuagauauggcaagccuuaauaugacaaugcccuuaucuugcacgaagaacaacucccaccauuacaucaugguuggaaaugaaacuggcuuggagcugacuuuaacaaacacaaguauuauccagcacaaguuuuguaaccuuucugaugcacauaaaaagaaucuuuaugaccaugcuuuaaugagcaucgucucaaccuuccauuuauccauuccaaacuuuaaucaguaugaagcaaugagcugugacuucaauggagggaagauaacuguucaguacaaccuuagccacucuuaugcuauagaugcagcaaaccacugugggacuguugccaauggcguucuucagacuuuuaugaggauggcuugggguggcaguuacauagcacuugauucuggaugcggaagcugggauugcauaaugacuuccuaccaauaucugauaauccaaaacaccacuugggaagaucacugccaguuuucucgcccaucccccaucgguuaucuggggcuacugucacaaaggaccagggacauuuauaucagucgaagacgccgggggacuuuuacuuggacucucucugauucugaagguaaugaaacaccagguggguauugucuaacaagguggaugcugauugaggcagaguuaaagugcuuugggaacacagcaguugcgaaaugcaaugagaaacaugaugaagaguuuugugacauguugagauuguuugacuuuaacaaacaagcuauaagaaggcugaaggcacccgcacaaaugaguauccaacugauaaacaaagcggugaacgcacugaucaaugaccagcugauuaugaagaaucauuugagggauaucaugugcauuccuuacugcaauuacagcaaguauugguaucuaaaucacacuguaacagggaggacaucguugccaagaugcuggcuugugucaaauggcuccuaccuaaaugagacacauuuuucugaugacauugaacaacaagcagauaacaugauaacagaacuguugcagaaggaguacauggacaggcaagggaaaacacccuuaggguuaguagaccucuuugucuucagcaccagcuuuuaucucauuagcaucuuccuccaccugguuaaaaucccaacccacagacacaucauagggaaacccugccccaaaccacacaggcucaaccacaugggcguaugcucauguggucuguacaaacacccuggugugccagucaaguggaaaagauag

SEQ ID NO: 3922 - RNA, 1473 nt, Artificial Sequence
  derived and/or modified protein sequence (wt) from LASV(Lassa virus/H.sapiens-wt/NGA/2016/ISTH_1604;Clade II)__AVO03541__GPCstabilized
augggucagauagugacauucuuucaggaaguuccucaugucauugaggaaauuaugaacauuguccucaucacuuuaucucugcuugcaaucuugaaagguguguacaauuuggccacguguggccuuauuggucugauaacauuccuuuuccucuguggaaggucauguucgaugaccuacaaagggaguuaucaacuugaaacccuugaacugaacauggagacacuuaacaugaccaugccucuguccugcacaaaaaauaccagucaccacuacauaaggguggguaaugaaacagggcuugagcugacauuaaccaauacaagcauuauaaaccacaaguucugcaaucucucugaugcccacaaaaagaaucucuacgaccacucucucaugagcauugucaguaccuuucaccuguccaucccuaacuucaaucaguaugaagcuaugaguugugacuucaauggagguaagaucaguauccaauacaauuuaagccacgccuaugcaggagaugcagccaaacauuguggcaccuuggcaaauggugugcuacaaaccuucaugaggauggcuuggggugggaguuacauugcacuugacucagguugcggaaacugggauuguauaaugacuagcuaccaauacuuaaucauucagaauacaacuugggaggaccauugucaguuuucgagaccaucacccauuggcuaucucggacuucucucucaaaggaccagagaaauuuacauuaguagaagacgccggggaacauuuacauggacauuaucagauucugaaggcaaugaagcuccaggggguuacugcuuaacuagauggauguuaauugaagccgaacugaaauguuuugggaaugcugcaguagcuaaaugcaaugagaagcaugaugaggaauuuugugacaugcugaggcuuuuugauuuuaacaaacaagccauucagagauugaagacucccgcucaaaugaguauucagcuuauuaacaaagcugucaaugcccucauaaaugaccaacuuauaaugaaaaaucaucucagggacauuaugugcauaccauauugcaacuauagcaaauauugguaucuuaaucauacgacuacggguagaacuucacuaccaagauguuggcuuguaucaaacggguccuaucucaaugagacucauuucucagacgacauagaacaacaggcugacaauaugauaacagaaauguugcagaaagaguacaucgauagacaaggaaagaccccauuaggccugguugacuuguuuguguucagcacaagcuucuacuugaucagcauuuuucuacacuuggucaagauaccaacucauagacacauuguagguaaaucaugccccaagccucacaggcugaaccauaugggcauuugcucuugugggcuauauaaacagccaggagugccugugagguggaagagauga

SEQ ID NO: 3923 - RNA, 1473 nt, Artificial Sequence
  derived and/or modified protein sequence (wt) from LASV(Lassa virus/H.sapiens-wt/NGA/2016/ISTH_1609;Clade II)__AVO03661__GPCstabilized
auggggcaaauagugacauucuuucaagaaauuccucauguaauugaggaaguaaugaacauuguucucaucaccuuaucccuacuugcaguuuuaaagggaauauacaacuuugcaacauguggucucauugguuugauaacauuucuuuuccucugugggaggucauguucaacaauuuauaaagggagcuaucaacugcaaaaacuugaacuaaacauggaaacacucaacaugaccaugccucuauccugcacaaaaaauagcagucaccacuacauaagagugggcaaugaaacaggacucgaauugaccuuaaccaacacaagcaucauuagccauaaguucugcaaucuuucugaugcacacaagaaaaaucuuuaugaucaugcccucaugagcaucaucuccacuuuccaucuguccauucccaacuuuaaucaguacgaagcaaugaguugugauuucaauggagguaaaaucagugugcaauacaaucuaagccacagcuaugcaggugaugcggcuaggcauugugguacccuggcaaauggugugcuacagacuuuuaugaggauggccuggggugggaguuacauugcacuugacucgggcugcgguaacugggacuguauaaugacaaguuaucaauucuugauuauucagaacacaaccugggaggaccacugucaguuuucgaggccaucuccuauggguuaccucggacuucucucacagagaacuagagacaucuacaucaguagaaggcgccggggaacguucacauggacacugucggauucugaaggaaaagaaaccccuggagguuacuguuuaaccagauggaugcuaauugaggcugaacuaaaaugcuuugguaacacugcaguggccaaguguaaugagaaacaugaugaggaguuuugugacauguuaaggcuuuuugauuucaacaagcaagccauucagagguuaaaaacucccgcccagaugaguauucagcucauuaacaaggcagucaaugcccuuauaaaugaccaacuuauaaugaagaaccaccucagggauaucaugugcauaccauacugcaauuacagccaauauugguaccuuaaucauacaauuacaggcaaaacuucacugccaaaguguuggcuugugucaaauggauccuaucuuaaugaaacucauuuuucagaugacauagagcaacaagcugacaacaugaucacagaaaugcugcagaaggaguauauugauaggcaagggaaaacuccacuuggacuaguugaccuuuuuguauuuaguacuagcuucuaucuuaucagcauuuuuuugcauuuaaucaagauaccaacucauaggcacauugugggcaaaucaugccccaagccccacaggcuaaaccgaauggguauuugcuccuguggacuuuauaaacaaccaggaguaccugugaaauggaagagauaa

SEQ ID NO: 3924 - RNA, 1473 nt, Artificial Sequence
  derived and/or modified protein sequence (wt) from LASV(Lassa virus/H.sapiens-wt/NGA/2016/ISTH_1610;Clade II)__AVO03603__GPCstabilized
auggggcaaaucauaacauuuuuccaggaagugccucaugucauagaggaagugaugaacauugucuugauugcucucagccuucuggcgauacugaaagggaucuacaauguugcuacuuguggccuuuuuggguugguguccuuccuuuucuuauguggaagaucaugcucaacaacuuacaaaggugucuaugagcuacaaacucuagaguuggauauggcaagccuuaacaugacaaugcccuuaucuugcacgaagaacaacagccaccauuacaucaugguugggaaugaaacuggcuuggagcuaacccugacaaacacaagcaucaucaaccacaaguuuugcaaccuuucugaugcacauaagaagaaccuuuaugaccaugcuuuaaugagcaucaucucaaccuuccauuuauccauccccaacuuuaaucaguaugaagcaaugaguugugacuucaaugggggaaagauaaguguucaguacaaccuuagccacacuuaugcuauagaugcagccaaccacugugggaccauugccaaugguguccugcagacuuuuaugaggauggcuugggguggcaguuacauagcacuugauucuggaugcgggaguugggauuguauaaugacuuccuaccaauauuugauaauccagaacaccacuugggaagaucacugccaguucucccgcccaucuccuaucgguuaucuggggcuacugucacagagaacuagagacaucuauaucagucgaagacgccggggaacuuuuaccuggacucuuucugauucugaaggcaaugagacaccagguggauauuguuuaacaagauggaugcuaauugaggccgaguugaagugcuuugggaacacagcaguugcgaaguguaaugaaaagcaugaugaagaguucugugacauguuaaggcuguuugacuuuaacaaacaagcuauaagaaggcugaaggcacccgcacagaugaauauucaauuaauaaacaaagcagugaacgcauugaucaaugaccaguugauuaugaagaaccauuuaagggauaucaugugcauuccuuacugcaauuacaguaaguauugguauuuaaaccauacuguaacaggaaggacaucguugccaagaugcuggcuuguaucaaaugguuccuaccuaaaugagacacacuucucugacgacauugagcagcaagcagacaauaugauaacagaauuguuacaaaaggaauacauggacaggcaagggaaaacacccuuaggguuaguagaucuuuuugucuucagcaccagcuuuuaucucauuagcaucuuccuccaccugauuaaaaucccaacccacagacauauuguagggaaacccugcccuaaaccacacagacucaaccacaugggcauaugcucauguggcuuguauaaacauccuggugugccagucaaguggaaaagauag

SEQ ID NO: 3925 - RNA, 1473 nt, Artificial Sequence
  derived and/or modified protein sequence (wt) from LASV(Lassa virus/H.sapiens-wt/NGA/2018/ISTH_0959;Clade II)__AVV65099__GPCstabilized
augggacaaaucauaacauuuuuccaggaaguaccucaugucauagaggaagugaugaacauuguccugauugcucucagccuuuuggcaauacugaaggggaucuacaauguuguuaccuguggccucuuuggauugguguccuuccuccucuuauguggaagaucauguucaacaacuuacaaggguguuuaugagcuacaaacucuggagcuggacauggcaagccuuaauaugacaaugcccuuaucuugcacgaagaacaacagccaccauuacaucauggucggaaaugagacuggcuuggagcugacuuuaacaaauacaaguaucaucaaccauaaauuuuguaaccucucugaugcacauaaaaagaaucuuuaugaucaugcuuuaaugaguaucauuucaaccuuccacuuauccauuccaaacuuuaaucaguaugaagcaaugagcugugacuucaaugggggaaagauaaguguucaguacaaccuuagccacgccuaugcuauagaugcagccaaccacugcgggacuauugccaauggcguucuucaaacuuuuaugaggauggcuugggguggcagcuauauagcacuugauuccggaugcgggaguugggacuguauaaugacuuccuaccaguauuugauaauccaaaacaccacuugggaagaucauugucaguuuucucgcccauccccuaucgguuaccuagggcuacugucacaaaggaccagggacauuuacaucagucgaagacgccgggggacuuuuacuuggacucucucugauucugaagguaaugaaacaccggguggguauugucuaacaagauggaugcugauugaggccgaguugaaaugcuuugggaacacagcaguugcgaaaugcaaugagaaacaugaugaagaguuuugugacauguuaagauuguuugacuuuaacaaacaagcuauaaggaggcuaaagacacccgcacagaugaguauccagcugauaaacaaagcagugaacgcacugaucaaugaccagcugauuaugaaaaaucauuugagagauaucaugugcauuccuuacugcaauuacagcaaguacugguaucuaaaucauacuguaacagggaagacaucguugccaaggugcuggcuugugucaaaugguuccuaccugaaugagacacauuuuucugaugacauugaacaacaagcagacaauaugauaacagaacugcugcaaaaggaguacauagacaggcaagggaaaacaccuuuaggguuaguagaucuuuuugucuucagcaccagcuuuuaucucauuagcaucuuccuccaccugguuaaaaucccaacccacagacaugucauaggaaaacccugcccuaaaccacacagacuuaaucacaugggcauauguucauguggucuauacaaacauccuggugugccagucaaguggaaaagauag

SEQ ID NO: 3926 - RNA, 1473 nt, Artificial Sequence
  derived and/or modified protein sequence (wt) from LASV(Lassa virus/H.sapiens-wt/NGA/2018/ISTH_1024;Clade II)__AVV65105__GPCstabilized
augggacaaaucauaacauuuuuccaggaaguaccucaugucauagaggaagugaugaacauuguuuugauugcucucagccuucuggcaauacugaaaggggucuacaauguugcuaccuguggccucuuuggauuggugucuuuucuucucuuauguggaagaucaugcucaacaacuuacaagggcguuuaugaguugcaaacucuagagcuagacauggcaaaccuuaacaugacaaugcccuuaucuugcacgaagaauaacagccaccauuacaucagggucggaaaugagacuggucuggagcugacuuuaacaaacacgagcaucaucaaccacaaguuuuguaaccuuucugaugcacauaaaaauaaucuuuaugaccaugcuuuaaugaguaucaucucaacuuuccacuuauccauuccuaacuuuaaucaguaugaggcaaugaguugugacuucaauggggggaagauaaguguucaguacaaccucagccacgcuuaugcuguggaugcagcuaaccauugugggaccauugccaauggcguucuucaaacuuuuaugagaauggcuugggguggcaguuacauagcacuugauuccggaugcgggaguugggauuguauaaugacuuccuaccaauacuugauaauccaaaacaccacuugggaagaucacugccaguuuucucguccauccccuaucgguuaucuggggcuacugucacagaggaccagggacauuuacaucagucggaggcgccgggggacuuuuacuuggacucucucugauucugaagguaaugaaacaccggguggauauugucuaacaagguggaugcugauugaggcugaguugaagugcuuugggaacacagcaguugcaaaaugcaacgagaaacaugaugaagaguuuugugacauguuaagauuguuugacuuuaacaaacaagcuauaaggaggcugaaaacacccgcacaaaugaguauccaacugauaaacaaagcagugaacgcacugauuaaugaccagcugaucaugaagaaucauuuaagagauaucaugugcauuccuuauugcaauuacagcaaguauugguacuuaaaucacacuguaacagggaagacaucguugccaagaugcuggcuuguaucaaaugguaccuaccugaaugagacacauuuuucugaugacauugaacaacaagcagacaauaugauaacagaacuguugcagaaggaguacauggacaggcaagggaaaacacccuuaggguuaguagaucuuuuugucuucagcaccagcuuuuaucucauuagcaucuuccuccaucugguuaagaucccaacccacagacaugucauagggaaacccugcccuaaaccacacagacucaaccacaugggcauaugcucauguggucuauacaaacauccugguguaccagucaaguggaagagauag

SEQ ID NO: 3927 - RNA, 1473 nt, Artificial Sequence
  derived and/or modified protein sequence (wt) from LASV(Lassa virus/H.sapiens-wt/NGA/2018/ISTH_1079;Clade II)__AVV65107__GPCstabilized
augggacaaaucauaacauuuuuccaggaaguaccucaugucauagaggaagugaugaacauuguccugauugcucuuagccuucuggcaauacugaaagggaucuacaauguugccaccuguggccucuuuggauugguggccuuucuccucuugugugggagaucaugcucgacaaccuacaaggguguuuaugagcuacaaacccuagagcuagacauggcaagccucaauaugacaaugccuuuaucuugcacgaagaacaacagccaucauuacaucauggucggaaaugagacuggcuuggagcugacuuuaacaaauacaaguauuauuaaccacaaguuuuguaaccuuucugaugcacauaaaaagaaucuuuaugaccaugcuuuaaugaguaucaucucaaccuuucacuuauccauucccaacuuuaaucaguaugaagcgaugaguugugacuucaauggaggaaagauaaguguucaguacaaccuuagccacacuuaugcuguagaugcagcuaaccacuguggaaccauugccaaugguguucuucagacuuuuaugaggauggcuugggguggcaguuacauagcacuugauuccggaugcgggagcugggacugcauaaugacuuccuaccaauauuugauaauccaaaacaccacuugggaagaucacugccaauuuucucgcccauccccuaucgguuaccuggggcuacugucacaaaggaccagggauauuuacaucagccgaaggcgccgggggacuuuuaccuggacucucucugacucugaagguaaugaaacaccggguggguauugucuaacaagauggaugcugauugaggccgagcugaagugcuuugggaacacagcaguugcgaagugcaaugagaaacacgaugaagaguuuugugacauguuaagguuguuugacuuuaacaaacaagcuauaaggaggcugaaaacgcccgcacagaugagcauccaacugauaaacaaagcagugaacgcacuaaucaaugaccagcugaucaugaagaaucauuuaagagauaucaugugcauucccuacugcaauuacagcaaauacugguaucuaaaucauacugugacagggagaacaucacugccaaggugcuggcuugugucaaaugguuccuaccugaaugagacacauuucucugaugacauugaacaacaagcagacaacaugauaacagaacuguugcaaaaggaguacauggacaggcaagggaaaacacccuuaggguuaguagaucuuuuugucuucagcaccagcuuuuaucucauuagcaucuuccuccaccugauuaaaaucccaacccauagacaugucauagggaaacccugcccuaaaccacacagacucaaccacaugggcauaugcucauguggucuguacaaacauccugguguaccaguuaaguggaaaagauag

SEQ ID NO: 3928 - RNA, 1473 nt, Artificial Sequence
  derived and/or modified protein sequence (wt) from LASV(Lassa virus/H.sapiens-wt/NGA/2018/ISTH_1177;Clade II)__AVV65101__GPCstabilized
augggacaaauuauaacauuuuuccaggaaguaccucauguuauagaagaagugaugaacauuguccugauugcccucagccuucuggcaauauugaaagggaucuacaauguugcuaccuguggccucuuuggauugguguccuuccuucucuuauguggaagaucaugcucaacaacuuacaaagguguuuaugagcugcaaacucuagagcuggacauggcaagccuuaacaugacaaugcccuuauccugcacaaaaaauaacagccaccauuacaucaggguuggaaaugagacuggcuuagaguugacuuuaacaaauacaaguaucaucgaccacaaguucuguaaccuuucugaugcacauaaaaagaaccuuuaugaccaugcuuuaaugaguaucaucucaaccuuccacuuauccauuccuaacuuuaaucaguaugaagcaaugaguugugacuucaauggggggaagauaaguguucaguacaaccuuagccacacuuacgcuguagaugcagcuaaccacugugggacuauugcuaauggcguucuccagacuuucaugaggauggcuuggggugguaguuacauagcacuugauuccggaugcggaagcugggauugcauaaugacuuccuaccaauauuugauaauccagaacaccacuugggaagaucacugccaguuuucucgcccauccccuaucgguuaucuggggcugcugucacaaaggaccagggacauuuacaucagucgaagacgccgggggacuuuuacuuggacccucucugauucugaaggcaaugaaacaccggguggguauugucuaacaagauggaugcugauugaggccgaauugaagugcuuuggaaacacagcaguugcgaaaugcaaugagaaacaugaugaggaguuuugugacauguuaagauuguuugacuuuaacaaacaagcuauaaggaggcugaagacacccgcacagaugaguauccaacugauaaacaaagcagugaacgcacugaucaaugaccagcugauuaugaagaaucauuuaagagauaucaugugcauuccuuacugcaauuacagcaaguacugguauuuaaaucacacuauaacagggaggacaucguuaccaagaugcuggcuugugucaaaugguuccuaccugaaugagacacauuuuucugaugacauugaacaacaagcagacaacaugauaacagaacuguugcagaaggaguacauggauaggcaagggaaaacacccuugggguuaguagaucuuuuugucuucagcaccaguuuuuaucucauuagcaucuuucuccaccuaguuaaaaucccaacucacagacauguuauaggaaaacccugcccuaaaccacacagacucaaccacaugggcauaugcucauguggucuguacaaacauccugguguaccagucaaauggaaaagauag

SEQ ID NO: 3929 - RNA, 1473 nt, Artificial Sequence
  derived and/or modified protein sequence (wt) from LASV(Lassa virus/H.sapiens-wt/NGA/2018/ISTH_1375;Clade II)__AVV65115__GPCstabilized
augggacaaaucauaacauuuuuccaggaaguaccucauguuauagaggaagugaugaacauuguccugauugcucucagccuucuggcaauacugaaggggaucuacaauauugcuaccuguggccucuuuggauugguguccuuucuccucuuauguggaagaucauguucaacaacuuacaaggguguuuaugagcuacaaacucuggagcuagacauggcaagccuuaauaugacaaugcccuuaucuugcacgaagaacaacagccaccauuacaucauggucggaaaugagacuggcuuggagcugacuuuaacaaauacaaguaucaucaaccacagguuuuguaaucucucugaugcacauaaaaagaaucuuuaugaucaugcuuuaaugaguaucauuucaaccuuccacuuauccauuccuaacuuuaaucaguaugaagcaaugagcugugacuucaaugggggaaagauaaguguucaguacaaccuuagccacgcuuaugcuguagaugcagccaaccacugugggaccaucgccaauggcguucuucagacuuuuaugaggauggcuugggguggcaguuauauagcacuugauuccggaugcgggaguugggacuguauaaugacuuccuaccaauauuugauaauccaaaacaccacuugggaagaucacugccaguuuucucgcccauccccuaucgguuaccuggggcuauugucacagaggaccagggacauuuacaucagucgaaggcgccgggggacuuuuacuuggacucucucugauucugaagguaaugaaacaccggguggguauugucuaacaagauggaugcugauugaggccgaguugaaaugcuuugggaacacagcaguugcgaaaugcaaugagaaacaugaugaagaguuuugugacauguuaagauuguuugacuuuaauaaacaagcuauaaggaggcugaagacgcccgcacagaugaguauccagcugauaaacaaagcagugaacgcacugaucaaugaccagcugauuaugaagaaucauuugagagauaucaugugcauuccuuacugcaauuacagcaaguacugguaucuaaaucauacuguaacagggaagacaucguugccaaggugcuggcuugugucaaaugguuccuaccugaaugagacacauuuuucugaugacauugaacaacaagcagacaauaugauaacagaacugcugcaaaaggaguacauagacaggcaaggaaaaacaccuuuaggguuaguagaucuuuuugucuucagcaccagcuuuuaucucauuagcaucuuccuccaccuggucaaaaucccaacccacagacaugucauaggaaaacccugcccuaaaccacacagacuuaaccacaugggcauauguucauguggucuauacaaacauccuggugugccagucaaguggaaaagauag

SEQ ID NO: 3930 - RNA, 1473 nt, Artificial Sequence
  derived and/or modified protein sequence (wt) from LASV(Lassa virus/H.sapiens-wt/NGA/2018/ISTH_1381;Clade II)__AVV65111__GPCstabilized
augggacaaauuguaacauuuuuccaggaaguaccucaugucauagaggaagugaugaacauugucuugauugcucucagccuucuggcaauacugaaagggaucuacaauguugcuaccuguggccucuuuggauugguauccuuucuucucuuguguggaagaucaugcucaacaacuuacaaggguguuuaugagcuacaaacucuagagcuagacauggcaagccuuaauaugacaaugcccuuaucuugcacgaagaacaacagccaccauuacaucauggucggaaaugagacuggcuuagagcugaccuuaacaaauacaaguauuaucaaccacaaguuuugcaaccuuucugaugcacauaaaaagaaccuuuaugaccaugcuuuaaugaguaucaucucaaccuuccacuuauccauucccaacuuuaaucaguaugaagcaaugaguugugacuucaauggggggaagauaaguguucaguacaaccuuagccacacuuaugcuguagaugcagccaaccacugugggacuaucgccaauggcguccuucagaccuuuaugaggauggcuuggggaggcagcuacauagcacuugauuccggaugcgggaguugggacuguauaaugacuuccuaccaauauuugauaauccaaaacaccacuugggaagaucacugccaguuuucucgcccauccccuaucgguuaccugggguuguugucacaaaggaccagggacauuuacaucagucgaagacgccgggggacuuuuacuuggacucuuucugauucugaaggcaaugagacaccggguggguauugucuaacaagguggaugcugauugaggccgaauugaagugcuuugggaacacagcgguugcgaaaugcaaugagaaacaugaugaagaguuuugugacauguuaagacuguuugacuuuaacaaacaagccauaaggaggcugaagacgcccgcacagaugaguauccaacuaauaaacaaagcagugaacgcacugaucaaugaccaguugaucaugaaaaaucauuuaagagauaucaugugcauuccuuacugcaauuacagcaaguacugguaucuaaaucacacuguaacagggaagacaucgcugccaagauguuggcuugugucaaaugguuccuaccugaaugagacacauuuuucugaugacauugaacagcaagcagacaacaugauaacagaacuguugcaaaaggaguacauggacaggcaagggaaaacacccuuaggguuaguagaucuuuuugucuucagcaccagcuuuuaucucaucaguaucuuccuccacuugguuaaaauuccaacccacagacauguuguagggaagccuugcccuaaaccacacagacuuaaucacauggguauaugcucauguggucuguacaaacauccugguguaccagucagauggaaaagauaa

SEQ ID NO: 3931 - RNA, 1473 nt, Artificial Sequence
  derived and/or modified protein sequence (wt) from LASV(Lassa virus/H.sapiens-wt/NGA/2018/ISTH_1643;Clade II)__AVV65119__GPCstabilized
auggggcaaaucauaacauuuuuccaggaagugccucaugucauugaggaggugaugaacauugucuuaauugcucucagccuucuagcaauacuaaaagggauuuacaauguugcuaccuguggccucuuuggguugguguccuuucuucucuuauguggaaggucaugcucaacaacuuacaaggguguuuaugagcuucaaacucuggagcuggauauggcaagccuuaauaugacaaugcccuuauccugcacgaagaacaacagccaccacuacaucaugguuggaaaugagacuggcuuggagcugacuuuaacaaacacaaguaucaucaaccacaaguuuugcaaccuuucugaugcacauaaaaagaaucucuaugaccaugcuuuaaugagcaucaucucaaccuuccaccuauccaucccuaacuuuaaucaguaugaagcaaugaguugugauuucaaugggggaaagauaaguguucaguacaaccucagccauacuuaugcuguggaugcagcuaaccauugugggaccauugccaauggaguccuucaaacuuuuaugaggauggcuugggguggcaguuacauagcacuugauucuggaugcgggaguugggauuguauaaugacauccuaccaauauuugauaauccaaaacaccaguugggaagaucacugccaguuuucucgcccguccccuaucgguuaucugggacuacuuucacaaagaaccagagacauuuacaucagccgaagacgccgggggacuuuuacuuggacucucucugauucugagggcaaugaaacaccggguggguauuguuuaacaagauggaugcugauugaagccgaauugaagugcuuugggaacacagcaguugcgaaaugcaaugagaaacaugaugaagaguuuugugacauguuaagguuguuugacuuuaauaaacaggcuauaaggaggcuaaagacacccgcacagaugaguauccaacuaauaaacaaagcagugaaugcauugaucaaugaccagcucauuaugaagaaucauuuaagagauaucaugugcauuccuuacugcaauuacagcaaguauugguacuuaaaccacacuguaacagggaagacgucguugccaagguguuggcuuguaucaaaugguaccuaccugaaugaaacacauuuuucugaugacauugagcaacaagcagacaacaugauaacagaauuguuacagaaagaguacauugauaggcaagggaaaacacccuuaggguugguggaucuuuuugucuucagcacuagcuucuaccuuauuagcaucuuccuccaccugguuaaaaucccaacccacagacaugucauagggaaacccugccccaagccacacagacucaaccacaugggcauaugcucauguggucuguauaaacauccugguguaccagucaaguggaaaagauaa

SEQ ID NO: 3932 - RNA, 1473 nt, Artificial Sequence
  derived and/or modified protein sequence (wt) from LASV(LASV003-NIG-2008;Clade II)__AIT17580__GPCstabilized
auggggcaaaucauaacauuuuuccaggaagugccucaugucauagaagaagugaugaacauuguccugauugcccucagccuuuuggcaauauugaaagggaucuacaauguugcuacuuguggccucuuuggacugguguccuuucuucucuuauguggaagaucaugcucaacaacuuacaaagguguuuaugagcuacaaacucuagagcuagacauggcaagccuuaauaugacaaugcccuuaucuugcacaaagaauaauagccaccauuacaucauggucggaaaugaaacuggcuuagagcugacuuuaacaaauacaaguaucaucaaccacaaguuuuguaaccuuucugaugcacauaaaaagaaucuuuaugaccaugcuuuaaugagcaucaucucaaccuuccacuuauccauuccuaacuuuaaucaauaugaagcaaugaguugugacuucaauggggggaagauaaguguucaguacaaccuuagccacacuuaugcuguagaugcagcuaaccacugugggacuauugccaauggcguucuucagacuuucaugaggauggcuugggguggcagcuacauagcacuugauuccggaugcgggaguugggauuguauaaugacuuccuaccaauaucugauaauccagaacaccacuugggaagaucauugccaguuuucucgcccaucccccaucgguuaucuggggcuacugucacaaaggaccagggacauuuacaucagucgaagacgccgggggacuuuuacuuggacccucucugauucugaaagcaaugaaacuccagguggguauugucuaacaagguggauguugauugaggccgagcugaagugcuuugggaacacagcaguugcgaaaugcaaugaaaaacaugaugaagaguuuugugacaugcuaagauuguuugacuuuaacaaacaagcuauaaggaggcugaaagcacccgcacagaugagcauccaacuaauaaacaaagcagugaaugcacugaucaaugaccagcugauaaugaagaaucauuuaagagauaucaugugcauuccuuacugcaauuacagcaaauauugguacuugaaucacacuguaacagggaggacaucguuaccaagaugcuggcuugugucaaaugguuccuaccugaaugagacacauuuuucugacgacauugaacaacaagcagacaauaugauaacagaacuguugcagaaggaguacauggacaggcaagggaaaacaccuuuaggguuaguagaucuuuuugucuucagcaccagcuuuuaucucaucagcaucuuccuccaccugguuaaaaucccaacccacagacaugucauagggaaacccugcccuaaaccacacagacucaaccacaugggcauaugcucauguggucuguacaaacauccuggugugccagucaaguggaaaagauag

SEQ ID NO: 3933 - RNA, 1473 nt, Artificial Sequence
  derived and/or modified protein sequence (wt) from LASV(LASV006-NIG-2008;Clade II)__AIT17584__GPCstabilized
augggacaaaucauaacauuuuuccaggaaguaccucaagucauagaggaagugaugaacauuguccugauugcucucagccuucuggcaauacugaaagggaucuacaauguugcuaccuguggccucuuuggauugguguccuuucuccucuuguguggaagaucaugcucgacaaccuacaagggcguuuaugagcuacaaacccuagagcuagacauggcaagccuuaauaugacaaugcccuuaucuugcacgaagaacaacagccaucauuacaucauggucggaaaugagacuggcuuggagcugacuuuaacaaaccaaaguauuaucaaccacaaguuuuguaaccuuucugaugcacauaaaaagaaucuuuaugaccaugcuuuaaugaguaucaucucaaccuuccacuuauccauucccaacuuuaaucaauaugaagcaaugaguugugacuucaauggaggaaagauaaguguucaguacaaccuuagccacucuuuugcuguagaugcagcuaaccacuguggaaccauugccaaugguguucuucagacuuuuaugaggauggcuugggguggcaguuacauagcacuugauuccggaugcgggaguugggacugcauaaugacuuccuaccaauauuugauaauccaaaacaccacuugggaagaucacugucaauuuucucgcccauccccuaucgguuaucuggggcuacugucacaaaggaccagggauauuuacaucagccgaaggcgccgggggacuuucacuuggacucucucugauucugaagguaaugaaacaccggguggguauugucuaacaagauggaugcugauugaggccgagcugaagugcuuugggaacacagcaguugcgaagugcaaugagaaacacgaugaagaguuuugugacauguuaagguuguuugacuuuaacaaacaagcuauaaggaggcugaagacgcccgcacagaugaguauccaauuaauaaacaaagcaguaaacgcacuaaucaaugaccagcugaucaugaagaaucauuugagagauaucaugugcauucccuacugcaauuacagcaaauacugguacuuaaaucauacuaagacagggaagacaucacugccaagaugcuggcuugugucaaaugguuccuaccugaaugagacacauuuuucugaugacauugaacaacaagcagacaacaugauaacagaacuguugcaaaaggaguacauggacagacaagggaaaacacccuuaggguuaguagaucuuuuugucuucagcaccagcuuuuaucuuauuagcaucuuccuccaccugguuaaaaucccaacccauagacaugucauagggaaacccugcccuaaaccacacagacucaaccacaugggcauaugcucauguggucuguacaaacauccugguguaccaguuaaguggaaaagauag

SEQ ID NO: 3934 - RNA, 1473 nt, Artificial Sequence
  derived and/or modified protein sequence (wt) from LASV(LASV035-NIG-2009;Clade II)__AIT17588__GPCstabilized
auggggcaaaucauaacauuuuuccaggaagugccucaugucauugaggaggugaugaacauugucuuaauugcucucagucuucuagcaauacugaaagggauuuacaauguugcuaccuguggccucuuuggguugguguccuuucuucucuuauguggaaggucaugcucaacaacuuacaaggguguuuaugagcuucaaacucuagagcuggauauggcaagccuuaauaugacaaugcccuuauccugcacgaagaacaacagccaccacuacaucaugguuggaaaugagacuggcuuggagcugacuuugacaaacacaaguaucaucaaccacaaguucugcaaccuuuccgaugcacauaaaaagaaucucuaugaccaugcuuuaaugagcaucaucucaacuuuccaccuauccaucccuaacuuuaaucaguaugaagcaaugaguugugacuucaauggggggaagauaaguguucaguacaaccucagccacgcuuaugcuguagaugcagcuaaccauugugggaccauugccaauggaguucuucaaacuuuuaugaggauggcuugggguggcaguuacauagcacuugauucuggaugcgggaguugggauuguauaaugacuuccuaccaauauuugauaauccaaaacaccacuugggaagaucacugccaguuuucucgcccauccccuauugguuaucuggggcuacugucacaaagaaccagggauauuuacaucagccgaagacgccggggaacuuuuacuuggacucucucugauucugaaggcaaugaaacaccggguggauauuguuuaacaagauggaugcugauugaggccgaauuaaagugcuuugggaacacagcaguugcgaaaugcaaugagaaacaugaugaagaguuuugugacauguuaagguuguuugacuuuaacaaacaggcuauaaggaggcuaaaggcacccgcacagaugagcauccaacuaauaaacaaagcagugaacgcacugaucaaugaccagcucauuaugaagaaucauuuaagagauaucaugugcauuccuuacugcaauuacagcaaguauugguauuuaaaucacacuguaacagggaagacaucguugccaagaugcuggcuuguaucaaaugguuccuaccugaaugaaacacauuuuucugaugacauugaacaacaagcagauaacaugauaacagaauuguuacagaaagaguacauugacaggcaagggaaaacacccuuaggguugguggaucuuuuugucuucagcacuagcuucuaccuuauuagcaucuuccuccaccugguuaaaaucccaacccacagacaugucauagggaagcccugccccaagccacacagacucaaccacaugggcauaugcucauguggucuguacaaacauccugguguaccagucaaguggaaaagauag

SEQ ID NO: 3935 - RNA, 1473 nt, Artificial Sequence
  derived and/or modified protein sequence (wt) from LASV(LASV042-NIG-2009;Clade II)__AIT17592__GPCstabilized
augggacaaaucauaacauuuuuccaggaagugccucaugucauagaggaagugaugaacauuguccugauugcucucagccuucuggcaauauugaaagggaucuacaauguugcuaccuguggccucuuuggauugguguccuuccuccucuuauguggaagaucaugcucaacaacuuacaaggguguuuacgaacuacaaacccuugagcuagacauggcaagccuuaauaugacaaugccccugucuugcacgaagaacaauucccaccauuacaucauggucggaaaugagacuggcuuggaauugacuuuaacaaauacaagcauuaucaaccacaaguuuugcaaccuuucugaugcacauaaaaagaaucuuuaugaccacacuuuaaugaguaucaucucaaccuuccacuuauccauuccuaacuuuaaucaguaugaagcaaugaguugugacuucaaugggggaaggauaaguguucaguacaaccuuagccacgcuuaugcuguagaugcagccaaccacugugggaccauugccaauggcguucuccaaacuuuuaugaggauggcuugggguggcaguuacauagcacuugauucuggaugcgggagcugggauugcauaaugacuuccuaccaguauuuaauaauccaaaacaccacuugggaagaucauugucaguuuucucgcccaucccccaucgguuaucuggggcugcugucgcaaaggaccagggacauuuacaucagucgaagacgccgggggacuuuuacuuggacucucucugacucugaagguaaugaaacaccggguggauauugucuaacaagauggaugcugauugaggcugaguugaagugcuuugggaacacagcaguugcaaaaugcaaugagaaacaugaugaggaguuuugugacauguugagauuguuugacuuuaacaaacaagcuauaaggaggcugaagacacccgcacagaugagcauccaacugauaaacaaagcagugaacgcacugaucaaugaccagcugauuaugaagaaccauuugagagauaucaugugcauuccuuacugcaauuacagcaaauauugguaucuaaaucacacuauaacagggaaaacaucauugccaagaugcuggcuuguaucaaaugguuccuaccugaaugagacacauuuuucugaugacauugaacaacaagcagacaacaugauaacagaacuguugcaaaaggaguacauagacaggcaaggaaaaacacccuuaggguugguagaucuuuuugucuucagcaccagcuuuuaucuuauuagcaucuuccuccaccugguuaaaaucccaacccacagacaugucguagggaaacccugccccaaaccacauagacucaaucacaugggcauaugcucaugugguuuguacaaacauccuggugugccagucaaguggaaaagauag

SEQ ID NO: 3936 - RNA, 1473 nt, Artificial Sequence
  derived and/or modified protein sequence (wt) from LASV(LASV045-NIG-2009;Clade II)__AIT17596__GPCstabilized
auggggcaaaucauaacauuuuuccaggaagugccucaugucauugaggaggugaugaacauugucuuaauugcucucagccuucuagcaauacuaaaagggauuuacaauguugcuaccuguggccucuuuggguugguguccuuucuucucuuauguggaaggucaugcucaacaacuuacaaggguguuuaugagcuucaaacucuggagcuggauauggcaagccuuaauaugacaaugcccuuauccugcacgaagaacaauagccaccacuacaucaugguuggaaaugagacuggcuuggagcugacuuuaacaaacacaaguaucaucaaccacaaguuuugcaaccuuucugaugcacauaaaaagaaucucuaugaccaugcuuuaaugagcaucaucucaaccuuccaccuauccaucccuaacuuuaaucaguaugaagcaaugaguugugauuucaauggggggaagauaaguguucaguacaaccucagccauacuuaugcuguggaugcagcuaaccauugugggaccauugccaauggaguccuucaaacuuuuaugaggauggcuugggguggcaguuacauagcacuugauucuggaugcgggaguugggauuguauaaugacguccuaccaauauuugauaauccaaaacacuaguugggaagaucacugccaguuuucucgcccguccccuaucgguuaucuggggcuacuuucacaaagaaccagggacauuuacaucagccgaagacgccggggaaccuuuacuuggacucucucugauucugagggcaaugaaacaccggguggguauuguuuaacaagauggaugcugauugaagccgaauugaagugcuuugggaacacagcaguugcgaaaugcaaugagaaacaugaugaagaguuuugugacauguuaagguuguuugacuuuaauaaacaggccauaaggaggcuaaagacacccgcacagaugaguauccaacuaauaaacaaagcagugaaugcacugaucaaugaccagcucauuaugaagaaucauuuaagagauaucaugugcauuccuuacugcaauuacagcaaguauugguacuuaaaccacacuguaacagggaagacaucguugccaagauguuggcuuguaucaaaugguuccuaccugaaugaaacacauuuuucugaugacauugagcaacaagcagacaacaugauaacagaauuguuacagaaagaguacauugauaggcaagggaaaacacccuuaggguugguggaucuuuuuguuuucagcacuagcuucuaccuuauuagcaucuuccuccaccuggucaaaaucccaacccacagacaugucauagggaaacccugccccaagccacacagacucaaccacaugggcauaugcucauguggucuguacaaacauccugguguaccagucaaguggaaaagauag

SEQ ID NO: 3937 - RNA, 1473 nt, Artificial Sequence
  derived and/or modified protein sequence (wt) from LASV(LASV046-NIG-2009;Clade II)__AIT17600__GPCstabilized
augggacaaaucauaacauuuuuccaggaaguaccucaugucauagaggaagugaugaacauuguccugauugcucucagucuucuagcaauacugaaggggaucuacaauguugcuaccuguggccucuuuggauugguguccuuccuccucuuauguggaagaucauguucaacaacuuacaaggguguuuaugagcuacaaacucuggagcuagacauggcaagccuuaauaugacaaugcccuuaucuugcacgaagaacaacagccaccauuacaucaugguuggaaaugagacuggcuuggagcugacuuuaacaaauacaaguaucaucaaccacaaauuuuguaaccucucugaugcacauaaaaagaaucuuuaugaucaugcuuuaaugaguaucauuucaaccuuccacuuauccauuccuaacuuuaaucaguaugaagcaaugagcugugacuucaauggggggaagauaaguguucaguacaaccuuagccacgcuuaugcuggagaugcagccaaccacuguggaacuaucgccaaugguguucuucagacuuuuaugaggauggcuugggguggcaguuauauagcacuugauuccggaugcgggaguugggacuguauaaugacuuccuaccaauauuugauaauccaaaacaccacuugggaggaucacugccaguuuucucgcccauccccuaucgguuaccuagggcuacugucacaaaggaccagggacauuuacaucagucgaagacgccgggggacuuucacuuggacucucucugauucugaagguaaugaaacaccggguggguauugucuaacaagauggaugcugauugaggccgaguugaaaugcuuugggaacacagcaguugcgaaaugcaaugagaaacaugaugaagaguuuugugacauguuaagauuguuugacuuuaacaaacaagcuauaaggaggcuaaagacacccgcacagaugaguauccagcugauaaacaaagcagugaacgcacugaucaaugaccagcugauuaugaagaaucauuugagagauaucaugugcauuccuuacugcaauuacagcaaguacugguaucuaaaucauacuguaacagggaagacaucguugccaaggugcuggcuugugucaaaugguucauaccugaaugagacacauuuuucugaugacauugaacaacaagcagacaauaugauaacagaacugcugcaaaaggaguacauagacaggcaagggaaaacaccuuuaggguuaguagaucuuuuugucuucagcaccagcuuuuaccucauuagcaucuuccuccaccugguuaaaaucccaacccacagacaugucauaggaaaacccugcccuaaaccacacagacuuaaccacaugggcauauguucauguggucuauacaaacauccuggugugccagucaaguggaaaagauag

SEQ ID NO: 3938 - RNA, 1473 nt, Artificial Sequence
  derived and/or modified protein sequence (wt) from LASV(LASV049-NIG-2009;Clade II)__AIT17604__GPCstabilized
augggacaaaucauuacauuuuuccaggaaguaccucaugucauagaggaagugaugaacauuguucugauugcucucagccuucuggcaauacugaaggggaucuacaauguugcuaccuguggccuuuuuggauugguguccuuucuccucuuauguggaagaucaugcucaacaaccuauaaggguguuuaugagcuacaaacucuagagcuggacaugacaagccucaauaugacaaugcccuuaucuugcacgaagaacaauagccaccauuacaucauggucgggaaugagacuggcuuagagcugacuuuaacaaauacaaguaucaucaaccacaaguuuuguaaccuuucugaugcacauaaaaaagaucuuuaugaccaugcuuuaaugaguaucaucucaaccuuccacuuaucuaucccuaacuucaaucaauaugaggcaaugaguugugacuucaauggggggaagauaaguguucaguacaaccuuagccacacuuacgcuguagaugcagcuaaacacugugggaccaucgccaacggcguucuucagacuuucaugagaauggcuugggguggcaguuacauagcacuugauuccggaugcgggaguugggauugcauaaugaccuccuaccaauauuugauaauccaaaacacuacuugggaagaucacugccaguuuucucgcccauccccugucgguuaucuggggcugcuaucacaaaggaccagggacauuuacaucagucgaagacgccgggggacuuuuacuuggacucucucugauucugaagguaaugaaacaccggguggguauugucuaacaagauggaugcugauugaggccgaguugaaaugcuucgggaacacagcaguugcuaaaugcaaugagaaacaugaugaagaguucugugacauguuaagauuguuugacuucaacaaacaagcuauaaggagacugaagacacccgcacagaugaguauccaacugauaaacaaagcaguaaacgcacugaucaaugaccagcugaucaugaagaaucauuugagagauaucaugugcauuccuuacugcaauuauaguaaguacugguaucuaaaucacacuguuacagggaagacaucguugccaagaugcuggcuugugucaaaugguuccuaccugaaugagacacauuuuucugaugacauugaacaacaagcagacaacaugauaacagaacuguugcaaaaagaguacuuagacaggcaagggaaaacacccuuaggguuaguagaucuguuugucuucagcaccagcuuuuaucucauuagcaucuuccuccaccugguuaaaaucccaacccacagacaugucauagggaaacccugcccuaaaccacacagacucaaccacaugggcauaugcucauguggucuguacaaacacccuggugugccagucaaguggaaaagauag

SEQ ID NO: 3939 - RNA, 1473 nt, Artificial Sequence
  derived and/or modified protein sequence (wt) from LASV(LASV052-NIG-2008;Clade II)__AIT17608__GPCstabilized
augggacaaaucauaacauuuuuccaggaaguaccucaugucauagaggaagugaugaacauuguccugauugcucucagccuucuggcaauacugaaagggaucuacaauguugcuaccuguggccucuuuggauugguguccuuucuccucuuauguggaagaucaugcucaacaacuuacaaggguguuuaugagcuacaaacuuuagagcuagacauggcaagccuuaacaugacaaugcccuugucuugcacgaagaacaacucccaccauuacaucauggucggaaaugagacuggccuggagcugacuuuaacaaauacaagcaucaucaaccacaaguuuuguaaccuuucugaugcacauaaaaggaaucuuuauaaccaugcuuuaaugaguaucaucucaaccuuccacuuauccauuccuaacuuuaaucaguaugaagcaaugagcugugacuucaaugggggaaagauaaguguucaguacaaucuuagccacacuuaugcuguagaugcagcuaaccacugugggaccauugccaauggcguucuucagacuuuuaugaggauggcuugggguggcaguuacauagcacuugauuccggaugcgggagcugggauugcauaaugacuuccuaccaauauuugauaauccagaacacuacuugggaagaucacugccaguuuucucgcccaucccccaucgguuaucugggguugcugucacaaaggaccagggacauuuacaucagucgaagacgccggggaacuuucacuuggacucucucugacucugaagguaaugaaacaccggguggguauuguuuaacaagauggaugcugauugaagccgaauugaagugcuuugggaacacagcaguugcaaaaugcaaugagaaacaugaugaagaauuuugugacauguuaagauuguuugauuuuaacaaacaagcuauaaggaggcugaagacacccgcacagaugaguauucaacugauaaacaaagcagugaacgcacugauuaaugaccagcugauuaugaagaaucauuugagagauauuaugugcauuccuuacugcaauuacagcaaguauugguaucuaaaucacacugucacagggaagacaucauuaccaagaugcuggcuugugucaaaugguucuuaccugaaugagacacauuuuucugaugacauugaacaacaagcagacaacaugauaacagaacuguugcaaaaggaguacauagacaggcaagggaaaacacccuuaggguuaguagaccuuuuugucuucagcaccagcuuuuaucucaucagcaucuuccuccaccugguuaaaaucccaacccauagacauaucauagggaaacccugcccuaaaccacacagacucaaccauaugggcauauguucauguggucuguacaaacauccuggugugccagucaaguggagaagauag

SEQ ID NO: 3940 - RNA, 1473 nt, Artificial Sequence
  derived and/or modified protein sequence (wt) from LASV(LASV056-NIG-2008;Clade II)__AIT17612__GPCstabilized
augggacaaaucauaacauuuuuccaggaaguaccucaugucauagaggaagugaugaacauuguccugauugcucuuagccuuuuggcaauacugaaagggaucuacaauguugcuaccuguggucucuuuggauugguguccuuucuccucuuauguggaagaucauguucaacaacuuacaaggguguuuaugagcuacaaacucuagagcuagacauggcaagccuuaacaugacaaugcccuugucuugcacgaagaacaacucccaccauuacaucagggucggaaaugagacuggcuuggagcugaccuuaacaaacacaagcauuauuaaccacaaguuuuguaaccuuucugaugcacacaaaaagaaucuuuaugaccauucuuugaugaguaucaucucaaccuuccacuuauccauuccuaacuuuaaucaguaugaagcaaugaguugugacuucaauggggggaagauaaguguucaguacaaccuuagccacaccuaugcuguggaugcggcuaaccacugcgggaccauugccaauggcguucuucagacuuuuaugaggauggcuugggguggcaguuacauagcacuugauuccggaugcgggaacugggauugcauaaugacuuccuaccaauauuugauaauccaaaacaccacuugggaagaucacugucaguuuucucgcccaucccccaucggcuaucuggggcuguugucacaaaggaccagggacauuuacaucagucgaagacgccgggggacuuuuacuuggacucucucugacucugaagguaaugaaacaccggguggguauugucuaacaagauggaugcugauugaggccgaguugaagugcuuugggaacacagcaguugcaaaaugcaaugagaaacaugaugaggaauuuugugacauguuaagauuguuugacuucaauaaacaagccauaaggagacugaagacacccgcacagaugaguauccaacugauaaacaaagcagugaacgcacugaucaaugaccagcugauuaugaagaaucacuugagagauaucaugugcauuccuuacugcaauuacagcaaguauugguaucuaaaucacacuguaacagggaagacaucgcuuccaagaugcuggcuugugucaaaugguuccuaccuaaaugagacacauuuuucugaugacauugaacaacaagcggacaauaugauaacugaacuguugcagaaggaguacauagacaggcaaggaaaaacacccuugggguuaguagaucuuuuugucuucagcaccagcuuuuaucucauuagcaucuuccuccaccugguuaaaaucccaacccacagacaugucguggggaaacccugcccuaaaccacacagacucaaccacaugggcauaugcucauguggucuguacaaacauccuggugugccagucaaguggaaaagauag

SEQ ID NO: 3941 - RNA, 1473 nt, Artificial Sequence
  derived and/or modified protein sequence (wt) from LASV(LASV058-NIG-2008;Clade II)__AIT17616__GPCstabilized
augggacaaaucauaacauuuuuccaggaaguaccucaugucauagaggaagugaugaacauuguccugauugcucucagucuucuggcaauacugaaggggaucuacaauguugcuaccuguggccucuuuggauugguauccuuucuccucuuauguggaagaucaugcucaacaacuuacaaggguguuuaugagcuacaaacucuagagcuagacauggcaagccuuaacaugacaaugcccuuaucuugcacgaaaaacaacucccaccauuacaucauggucggaaaugagacuggcuuggagcugaccuuaacaaauacaagcaucaucaaccacaaguuuuguaaccuuucugaugcacauaaaaagaaucucuaugaccaugccuugaugaguaucaucucaaccuuccacuuauccauuccuaacuuuaaucaguacgaagcaaugaguugugacuucaaugggggaaagauaaguguucaguacaaccuuagccacgccuaugcuguagaugcagccaaucacugugggaccauugccaauggcguucuucagacuuucaugaggauggccugggguggcaguuacauagcacuugauuccggaugcgggagcugggauugcauaaugacuuccuaccaauauuugauaauccaaaauaccacuugggaagaucacugccaguucucccgcccaucccccaucggcuaucugggguugcugucacaaaggaccagggacauuuacaucaguagaagacgccgggggaccuuuacuuggacucucucugacucugaagguaaugagacaccggguggguauugucuaacaagauggaugcuaauugaggcugaguugaagugcuuugggaacacagcaguugcaaagugcaaugagaaacaugaugaagaguuuugugacauguugagauuguuugacuucaacaaacaagcuauaaggagacugaaaacacccgcacagaugaguauccaacugauaaacaaagcagugaacgcacugaucaaugaccagcuuauuaugaagaaucacuugagggauaucaugugcauuccuuacugcaauuacaguaaauauugguaucuaaaccacacuguaacagggaagacaucgcugccaagaugcuggcuugugucaaaugguuccuaccugaaugagacacauuuuucugaugacauugaacaacaagcagacaacaugauaacagaacuguugcaaaaggaguacauagacaggcaagggaaaacacccuuaggguuaguagaucuuuuugucuucagcaccagcuucuaucucauuagcaucuuucuccacuugguuaaaaucccaacccacagacaugucauagggaaacccugcccuaaaccacacagacucaaccacaugggcauaugcucauguggucuguacaaacauccuggugugccagucaaguggaagagauag

SEQ ID NO: 3942 - RNA, 1473 nt, Artificial Sequence
  derived and/or modified protein sequence (wt) from LASV(LASV063-NIG-2009;Clade II)__AIT17620__GPCstabilized
augggacaaaucauaacauuuuuccaagagguaccucaugucauagaggaagugaugaacauuguccugauugcucucagccuucuggcaauacugaaagggaucuacaauguugcuaccuguggccucuuuggguugguguccuuucuccucuuauguggaagaucaugcucaacaacuuacaaggguguuuaugagcuacaaacucuagagcuagacauggcaagccuuaauaugacaaugcccuugucuugcacgaagaacaacucccaccauuacaucauggucggaaaugagacuggccuggagcuaacuuuaacaaauacaagcauuaucagccacaaguucuguaaccuuucugaugcacauaaaaagaaucuuuaugaccaugcuuuaaugaguauuaucucaaccuuucacuuauccauuccuaacuuuaaucaguaugaagcaaugaguugugacuucaauggggggaagauaaguguucaguacaaccuuagccaugcuuaugccauagaugcagcuaaccacugugggaccguugccaauggcguucuacagacuuuuaugaggauggcuugggguggcaguuacauagcacuugauuccggaugcgggagcugggauugcauaaugacuuccuaccaauauuuaauaauccaaaacaccacuugggaagaucacugccaguuuucucgcccaucccccaucgguuaucuggggcuacugucacaaaggaccagggacauuuacaucagucgaagacgccgggggacuuucacuuggacucucucugacucugaggguaaugaaacaccggguggauauugucuaacaagauggaugcugauugaggccgaguugaagugcuuugggaacacagcaguugcaaaaugcaaugagaaacacgaugaagaguuuugugacauguuaagauuguuugacuuuaacaaacaagccauaagaaggcugaaggcacccgcacaaaugaguauccaacugauaaacaaagcagugaacgcacugaucaaugaccagcugauuaugaagaaucauuugagagauaucaugugcauuccuuacugcaauuacagcaaguauugguaucuaaaucacacuguaacagggaagacaucacugccaagaugcuggcuugugucaaauggguccuaccugaaugagacacauuuuucugacgacauugaacaacaagcagacaacaugauaacagaacuguugcaaaaggaguacauggacagacaagggaaaacacccuuaggguuaguugaucuuuuugucuucagcaccagcuuuuaucucauuagcaucuuccuccaccugguuaaaauuccaacccacagacaugucauagggaaacccugcccuaaaccacacagacucaaccauaugggcauaugcucaugugguuuguacaaacauccuggugugccagucaaguggaaaagauag

SEQ ID NO: 3943 - RNA, 1473 nt, Artificial Sequence
  derived and/or modified protein sequence (wt) from LASV(LASV1000-NIG-2009;Clade II)__AIT17782__GPCstabilized
augggacaaaucauaacauuuuuccaggaaguuccucaugucauagaggaagugaugaacauuguccugauugcucucagccuccuggcaauacuaaaagggaucuacaauguugcuaccuguggccucuuuggauugguguccuuccuccucuuauguggaagaucaugcucaacaacuuacaaggguguuuaugagcugcaaacucuagagcuagacauggcaagccuuaauaugacaaugccucuaucuugcacgaagaauaacagccaccauuacaucauggucggaaaugagacuggcuuggagcugacuuuaacaaacacaaguauuaucaaucacaaguuuuguaaccuuucugaugcacacaaaaagaaucuuuaugaccaugcuuuaaugagcaucaucucaaccuuccauuuaucuauucccaacuucaaucaguaugaagcaaugaguugugacuucaaugggggaaagauaaguguucaguacaaccuuagccacacuuaugcuguagaugcagccaaccacugugggacuaucgccaauggcguccuucagaccuuuaugaggauggcuugggguggcaguuacauagcacuugauuccggaugcgggaguugggacuguauaaugacuuccuaucaauaucugauaauccaaaacaccacuugggaagaucacugccaguuuucucgcccaucuccuaucgguuaucuggggcuacugucacaaaggaccagagacauuuacaucagucgaagacgccgggggacuuucacuuggacucucucugauucugaagguaaugaaacaccggguggguacugucuaacaagguggaugcugauugaggccgaguugaagugcuuugggaacacagcaguugcgaaaugcaaugagaaacaugaugaagaguuuugugacauguuaagauuguuugacuuuaacaaacaagcuauaaagaggcugaagacacccgcacagaugaguauucaacugauaaacaaagcagugaacgcacugaucaaugaccagcugauuaugaagaaucauuugagagacaucaugugcauuccuuacuguaauuacagcaaguauugguaucuaaaucacaccguaacagggaagacaucguugccaaggugcuggcuugugucaaaugguuccuaccugaaugagacacacuuuucugaugacauugaacaacaagcagauaacaugauaacagaacuauugcaaaaggaguacauagacaggcaagggaaaacacccuuaggguuaguagaccuuuuugucuuuagcaccagcuuuuaucucauuagcaucuuccuccaccuggucaaaaucccaacccauagacaugucguagggaaacccugcccuaaaccacacagacucaaccacaugggcauaugcucauguggucuauacaaacauccugguguaccagucaaauggaaaagauag

SEQ ID NO: 3944 - RNA, 1473 nt, Artificial Sequence
  derived and/or modified protein sequence (wt) from LASV(LASV1008-NIG-2009;Clade II)__AIT17786__GPCstabilized
augggacaaaucauaacauuuuuccaggaaguaccucaugucauagaagaagugaugaacauuguccugauugcccucagccuucuggcaauuuugaaagggaucuacaauguugcuaccuguggccucuuuggauugguguccuuucuucucuuauguggaagaucaugcucaacaacuuacaaagguguuuaugagcuacaaacucuagagcuagacauggcaagccuuaauaugacuaugcccuuaucuugcacaaagaauaacagccaccauuacaucauggucggaaaugagacuggcuuagagcugacuuuaacaaauacaaguaucaucaaccacaaguucuguaaccuuucugaugcacauaaaaagaaucuuuaugaccaugcuuuaaugaguaucaucucaaccuuccacuuauccauuccuaacuuuaaucaguaugaagcaaugaguugugacuucaauggggggaagauaaguguucaguacaaccuuagccacgcuuaugcuauagaugcagcugaccacugugggacuauugcuaauggcguucuucagacuuucaugaggauggcuugggguggcaguuacauagcacuugauuccggaugcgggagcugggauugcauaaugacuuccuaccaauauuugauaauccagaacaccacuugggaagaucacugccaguuuucucgcccaucccccaucgguuaucuggggcugcugucacaaaggaccagggacauuuacaucagucgaagacgccgggggacuuuuacuuggacccucucugauucugaaggcaaugaaacaccggguggguauugucuaacaagauggaugcugauugaagccgaauugaagugcuuugggaacacagcaguugcgaaaugcaaugagaaacaugaugaggaguuuugugacauguuaagauuguuugacuuuaacaaacaagcuauaaggaggcugaagacacccgcacagaugaguauccaacugauaaacaaagcagugaacgcacugaucaaugaccagcugauuaugaagaaucauuuaagagauaucaugugcauuccuuacugcaauuacagcaaguauugguauuuaaaucacacuguaacagggaagacaucguugccaagaugcuggcuugugucaaaugguuccuaccugaaugagacacauuuuucugaugacauugaacaacaagcagacaacaugauaacagaacuguugcagaaggaguacauggacaggcaagggaaaacacccuuaggguuaguagaucuuuuugucuucagcaccaguuuuuaucucauuagcaucuuucuccaccuaguuaaaaucccaacucacagacauaucacaggaaaacccugcccuaaaccacacagacucaaccacaugggcauaugcucauguggucuguacaaacauccugguguaccagucaaauggaaaagauag

SEQ ID NO: 3945 - RNA, 1473 nt, Artificial Sequence
  derived and/or modified protein sequence (wt) from LASV(LASV1011-NIG-2009;Clade II)__AIT17790__GPCstabilized
augggacaaaucauaacauuuuuccaggaaguaccucauguuauagaggaagugaugaacauuguccugauugcucucagccuucuggcaauacugaaagggauuuacaauguugcuacuuguggccucuuuggauugguguccuuucuccucuuauguggaagaucaugcucaacaacuuacaaggguguuuaugagcuacaaacucuagaguuagacauggcaagccucaauaugacaaugcccuuaucuugcacgaagaacaacagccaccacuacaucauggucggaaaugagacuggcuuggagcugacuuuaacaaauacaaguauuaucaaccacaaguuuuguaaccuuucugaugcacauaaaaagaaucuuuaugaccaugcuuuaaugagcaucaucucaaccuuccacuuauccauuccuaacuucaaucaguaugaagcaaugaguugugacuuuaauggagggaagauaaguguucaguacaaccuuagccacacuuaugcuguagaugcagccaaccacugugggacuaucgccaauggcguucuucagaccuucaugaggauggccugggguggcaguuacauagcacuugauuccggaugcgggaguugggacuguauaaugacuuccuaccaauauuuaauaauccaaaacaccacuugggaagaucacugccaguuuucccgcccaucuccuauugguuaucuggggcuacugucacaaaggaccagggacauuuacaucagucggagacgccgggggacuuuuacuuggacucucucugauucugaaggcaaugaaacaccagguggguauugucugacaagauggaugcugauugaggccgaguugaagugcuuugggaacacggcaguugcgaaaugcaaugagaaacaugaugaagaguuuugugacauguuaagauuguuugacuuuaacaaacaagcuauaaggaggcugaagacacccgcacagaugaguauccaacuaauaaacaaagcagugaacgcacugaucaaugaccagcugauuaugaagaaucauuugagagauaucaugugcauuccuuacugcaauuacagcaaguacugguaucuaaaucacacuguaacagggaagacaucguugccgaggugcuggcuugugucaaaugguuccuaccugaaugagacacauuuuucugaugacauugaacaacaagcagacaacaugauaacagaacuguugcaaaaggaguauauggacaggcaagggaaaacacccuuaggguuaguagaucuuuuugucuucagcaccagcuuuuaucucauuagcaucuuccuccaccuggucaagaucccaacccacagacauaucacagggaaacccugcccuaaaccacacagacucaaccacaugggcauaugcucauguggucuauacaaacauccugguguaccaguuaaguggaaaagauag

SEQ ID NO: 3946 - RNA, 1473 nt, Artificial Sequence
  derived and/or modified protein sequence (wt) from LASV(LASV1016-NIG-2009;Clade II)__AIT17798__GPCstabilized
augggacaaaucauaacauuuuuccaggaaguaccucaugucauagaggaagugaugaacauuguccugauugcucucagccuucuggcaauacugaaagggaucuacaauguugcuaccuguggccucuuuggauugguguccuuucuccuuuuauguggaagaucauguucaacaaccuacaaagguguuuaugagcuacaaacucuagagcuggacauggcaagccuuaauaugacaaugcccuuaucuugcacgaagaacaacagccaccauuacaucauggucggaaaugagacuggcuuagagcugacuuuaacaaauacaagcauuaucaaccacaaguuuuguaaccuuucugaugcacauaaaaagaaucuuuaugaccaugcuuuaaugaguaucauuucaaccuuccacuuauccauuccuaacuuuaaucaguaugaagcgaugaguugugacuucaauggggggaagauaaguguucaguacaaccuuagccacacuuaugcuguagaugcagccaaccacugugggacuaucgccaauggcguucuucagacuuuuaugaggauggcuugggguggcagcuacauagcacuugauuccggaugcgggaguugggauuguauaaugacuuccuaccaauauuugauaauccaaaacaccacuugggaagaucauugccaguuuucucgcccauccccuaucgguuaccuggggcuacuaucacaaagaaccagggacauuuacaucagucgaagacgccgggggacuuucacuuggacucucucugauucugaagguaaugaaacaccggguggguauugucuaacaagauggaugcugauugaggccgaguugaagugcuuugggaacacagcaguugcgaagugcaaugagaaacaugaugaagaguuuugugacauguuaagauuguuugacuuuaacaaacaagcuauaaugaggcugaagacacccgcacagaugaguauccaauugauaaacaaagcagugaacgcacugaucaaugaccagcugauuaugaagaaucauuugagagacaucaugugcauuccuuacugcaauuacagcaaauacugguaucuaaaucacacuguuacagggaagacaucguugccgaggugcuggcuugugucaaaugguucuuaccugaaugagacacauuuuucugaugacauugaacaacaagcagacaacaugauaacagaaauguugcaaaaggaguacuuagacaggcaagggaaaacacccuuaggguuaguagaucuuuuugucuuuagcaccagcuuuuaucucauuagcaucuuccuccaccuggucaaaaucccaacccacagacacaucauagggaaacccugccccaaaccgcacagacucaaccacaugggcauaugcucauguggucuauacaaacauccugguguaccagucaaguggaaaagauaa

SEQ ID NO: 3947 - RNA, 1473 nt, Artificial Sequence
  derived and/or modified protein sequence (wt) from LASV(LASV221-NIG-2010;Clade II)__AIT17624__GPCstabilized
augggacaaaucauaacauuuuuccaggaaguaccucaugucauagaggaagugaugaacauuguccugauugcucucagccuucuggcaauacugaaagggaucuacaauguugcuaccuguggccucuuuggauugguguccuuccuccucuuauguggaagaucaugcucaacaacuuacaaggguguuuaugagcuacaaacucuagagcuagacauggcaagccuuaauaugacaaugcccuuaucuugcacgaagaacaacucccaccauuacaucauggucggaaaugagacuggcuuggagcugacuuugacaaauacaagcauuaucaaccacaaguuuuguaaccuuucugaugcgcauaaaaagaaucuuuaugaccaugcuuuaaugaguaucaucucaaccuuccacuuguccauuccuaacuuuaaucaguaugaagcaaugaguugugauuucaaugggggaaagauaaguguucaguacaaccuuagccacacuuaugcuauagaugcagccaaccacugugggaccauugccaauggcguucuucagacuuucaugagaauggcuugggguggcaguuacauagcacuugauuccggaugcgggagcugggauugcauaaugacuuccuaccaauauuugauaauccaaaacaccacaugggaagaucacugccaguuuucucgcccaucccccaucgguuaucuggggcuacuaucacaaagaaccagggacauuuacauuagucgaagacgccgggggacuuucacuuggacucucucugacucugaagguaaugaaacaccggguggguauugucuaacaagauggaugcugauugaggccgaguugaagugcuuuggaaacacagcaguugcaaaaugcaaugaaaaacaugaugaagaguuuugugauauguugagauuguuugacuucaacaaacaagcuauaaggaggcuaaagacacccgcacagaugaguauccaacugauaaacaaagcggugaacgcacugaucaaugaccagcugaucaugaagaaucauuugagagauaucaugugcauuccuuacugcaauuacagcaaguauugguaucuaaaucacacuguaacagggaagacaucguugccaagaugcuggcuugugucgaaugguucuuaccugaaugagacacauuuuucugaugacauugaacaacaagcagacaacaugauaacagaaauguugcaaaaggaguacauggacaggcaagggaaaacacccuuaggguuaguagaucuuuuugucuucagcaccagcuuuuaucucauuagcaucuuccuccaccuaguuaaaauuccaacccacagacaugucauagggaaacccugcccuaaaccacacagacucaaccacaugggcauauguucauguggucuguauaagcauccuggcgugccagucaaguggaaaagauag

SEQ ID NO: 3948 - RNA, 1473 nt, Artificial Sequence
  derived and/or modified protein sequence (wt) from LASV(LASV224-NIG-2010;Clade II)__AIT17626__GPCstabilized
augggacaaaucauaacauuuuuccaggaaguaccucaugucauagaggaagugaugaacauugucuugauugcucuuagccuucuggcaauacugaaaggagucuacaauguugcuaccuguggccucuuuggauugguguccuuucuccuccuauguggaagaucaugcucaacaacuuacaaggguguuuaugagcuacaaacucuagagcuagauauggcaagccuuaauaugacaaugcccuuaucuugcacgaagaacaacucccaccacuacaucaugguuggaaaugaaacuggcuuggagcugacuuuaacaaacacaaguauuauccagcacaaguuuuguaaccuuucugaugcacauaaaaagaaucuuuaugaccaugcuuuaaugagcaucaucucaaccuuccauuuauccauuccaaacuuuaaucaguaugaagcaaugagcugugacuucaauggagggaagauaacuguucaguacaaccuuagccacucuuaugcuauagaugcagcaaaccacugugggacuauugccaauggcguucuucagacuuuuaugaggauggcuugggguggcaguuacauagcacuugauucuggaugcggaagcugggauugcauaaugacuuccuaccaauauuugauaauccaaaacaccacuugggaagaucacugccaguuuucucgcccaucccccaucgguuaucuggggcuacugucacaaaggaccagggacauuuacaucagucgaagacgccgggggacuuuuacuuggacucucucugauucugaagguaaugaaacaccggguggguauugucuaacaagguggaugcugauugaggcagaguuaaagugcuuugggaacacagcaguugcgaaaugcaaugagaaacaugaugaagaguuuugugacauguugagauuguuugacuuuaacaaacaagcuauaaggaggcugaagacacccgcacaaaugaguauccaacugauaaacaaagcagugaacgcacugaucaaugaccagcugauuaugaagaaucauuugagggauauuaugugcauuccuuacugcaauuacagcaaguauugguaucuaaaucacacuguaacagggaggacaucguugccaagaugcuggcuugugucaaaugguuccuaccuaaaugagacacauuuuucugaugacauugaacaacaagcagauaacaugauaacagaacuguugcaaaaggaguacauggacaggcaagggaaaacacccuuaggguuaguagaucuuuuugucuucagcaccagcuuuuaucucauuagcaucuuccuccaccugguuaaaaucccaacccacagacacaucauagggaaacccugcccuaaaccacacaggcucaaccacaugggcguaugcucauguggucuguacaaacacccuggugugccagucaaguggaaaagauag

SEQ ID NO: 3949 - RNA, 1473 nt, Artificial Sequence
  derived and/or modified protein sequence (wt) from LASV(LASV225-NIG-2010;Clade II)__AIT17630__GPCstabilized
auggggcaaaucauaacauuuuuccaagaagugccucaugucaucgaggaagugaugaacauuguccuaauugcucucagccuucuagcaauacuaaaagggauuuacaauguugcuaccuguggccucuuuggguugcuguccuuucuucucuuauguggaaggucaugcucaacaacuuacaaggguguuuaugagcuucaaacucuggagcuggauauggcaagccucaauaugacaaugcccuuauccugcacgaagaacaacagccaccacuacaucaugguuggaaaugagacuggcuuggagcuaacuuuaacaaacacaaguaucaucaaccacaaguucugcaaccuuucugaugcacauaaaaagaaucucuaugaccaugcuuuaaugagcaucaucucgaccuuccacuuauccaucccuaacuuuaaucaguaugaagcaaugaguugugacuucaaugggggaaagauaaguguucaguacaaccucagccaugcuuaugcuguggaugcagcugagcauugugggaccauugccaauggaguccuucaaacuuuuaugaggauggcuugggguggcagcuacauagcacuugauucuggaugcgggaguugggauuguguaaugacguccuaccaauauuugauaauccaaaacaccaguugggaagaucacugccaguuuucucgcccguccccuaucgguuaucuggggcuacugucacaaagaaccagggacauuuacaucagucgaagacgccggggaacuuuuaccuggacucucucugauucugagggcaaugaaacaccggguggguauuguuuaacaagauggaugcugauugaggccgaauuaaagugcuuugggaacacagcaguugcgaaaugcaaugagaaacaugaugaagaguuuugugacauguuaagguuguuugacuuuaacaaacaggcuauaaggagguuaaagacacccgcacagaugaguauccaacuaauaaacaaagcagugaacgcacugaucaaugaccagcucauuaugaagaaucauuuaagagauaucaugugcauuccuuacugcaauuacagcaaguauugguauuuaaaccauacuguaacagggaagacaucguugccaagaugcuggcuuguaucaaaugguuccuaccugaaugaaacacauuuuucugaugacauugagcaacaagcagacaacaugauaacagaauuguugcagaaagaguacauugacaggcaagggaaaacacccuuaggguugguggaucuuuuugucuucagcacuagcuuuuaccuuauuagcaucuuccuccaccuggucaaaaucccaacccacagacaugucauagggaaacccugccccaagccacacagacucaaccacaugggcauaugcucauguggucuguacaaacauccugguguaccagucaaguggaaaagauag

SEQ ID NO: 3950 - RNA, 1473 nt, Artificial Sequence
  derived and/or modified protein sequence (wt) from LASV(LASV229-NIG-2010;Clade II)__AIT17634__GPCstabilized
augggacaaaucauaacauuuuuccaggaaguaccucaugucauagaggaagugaugaacauuguucugauugcucucagccuucuggcgauacugaaggggaucuacaauguugcuaccuguggccucuuugggcugguguccuuucuccucuuaugugggagaucauguucaacaauuuacaaggauguuuaugagcuacaaacccuagagcuggauauggcaagccucaacaugacaaugcccuuaucuugcacgaagaacaacagccaccauuacaucaugguuggaaaugagacuggcuuggaacugacuuuaacaaauacaaguauuaucaaccacaaguuuuguaaccuuucugaugcgcauaaaaagaaucuuuaugaccaugcuuuaaugaguaucaucucaaccuuccacuuauccauuccuaacuucaaucaguaugaagcaaugaguugugacuuuaaugggggaaagauaaguguucaguacaaccuuagccacacuuaugcuauagaugcagcuaaccacugugggacuaucgcuaauggcguucuucagacuuucaugaggauggcuugggguggcaguuacauagcacuugauuccggaugcgggaguugggauuguauaaugacuuccuaccaauacuugauaauccaaaacaccacuugggaagaucacugccaguuuucucgcccauccccuauugguuaucugggcuuacugucgcaaaggaccagggacauuuacaucagucgaagacgccgggggacuuuuacuuggacccucucugauucugaagguaaugaaacaccggguggguauugucuaacaagauggaugcugauugaggccgaguugaagugcuuugggaacacagcagucgcgaaaugcaaugaaaaacaugaugaagaguuuugugacauguuaagauuguuugacuuuaacaaacaagcuauaaggaggcugaagacgcccgcacagaugaguauccaacugauaaacaaagcagugaacgcauugaucaaugaucagcugauuaugaaaaaucauuugagagauaucaugugcauuccuuacugcaauuacagcagguauugguaucuaaaucacacugugacagggaggacaucguugccaaggugcuggcuugugucaaacgguuccuaccugaaugagacacauuuuucugaugacauugaacagcaagcagacaacaugauaacagaacuguugcaaaaggaguacauggacagacaagggaaaacacccuuaggguuaguggaucuuuuugucuucagcaccagcuuuuaucucauuagcaucuuccuccaccugguuaaaaucccaacccacagacaugucauagggaaacccugcccuaaaccacauagacucaaccacaugggcauaugcucauguggucuauacaaccauccuggugugccagucaaauggaaaagauag

SEQ ID NO: 3951 - RNA, 1473 nt, Artificial Sequence
  derived and/or modified protein sequence (wt) from LASV(LASV237-NIG-2010;Clade II)__AIT17638__GPCstabilized
augggacaaaucauaacauuuuuccaggaaguaccucaugucauagaggaagugaugaacauuguccugauugcucucagccuucuggcaauacugaaggggaucuacaauguugccaccuguggccuauuuggacugguguccuuucuccucuuauguggaagaucaugcucaacaacuuauaaggguguuuaugagcuacaaacucuagagcuggauauggcaagccuuaauaugacaaugccccuaucuugcacaaagaacaacagucaccauuacaucauggucggaaaugagacuggcuuggagcugacuuuaacaaauacaaguauuaucaaccacaaguuuuguaaccuuucugaugcacauaaaaaggaucucuaugaccaugcuuuaaugaguaucaucucaaccuuccacuuaucuauuccuaauuuuaaucaguaugaagcaaugaguugugacuucaauggggggaagauaaguguucaguacaaccuuagccacacuuaugcuguagaugcagccaaucacugugggacuaucgccaauggcguucuucagacuuuuaugaggauggcuugggguggcaguuacauagcacuugauuccggaugcgggaguugggauuguauaaugacuuccuaccaauauuugauaauccagaacaccacuugggaagaucacugccaguuuucucgcccauccccuaucgguuaucuggggcuacugucacaaaggaccagagacauuuacaucagucgaagacgccgggggacuuuuacuuggacucucucugauucugaagguaaugaaacaccggguggguacugucuaacaagauggaugcugauugaggccgaguugaagugcuuugggaacacagcaguugcgaaaugcaaugagaaacaugaugaagaguuuugugacauguuaagacuguuugauuucaacaaacaagcuauaaggaggcuaaagacacccgcacagaugaguauccaacugauaaacaaagcagugaaugcauugaucaaugaccagcuuauuaugaagaaucacuugagagauaucaugugcauuccuuacugcaauuacagcaaguacugguaucugaaucacacuguaacagggaagacaucguugccgaggugcuggcuugugucaaaugguuccuaccugaaugagacacauuuuucugaugacauugaacaacaggcagacaacaugauaacagaacuguugcaaaaggaguacauggacaggcaagggaaaacacccuuaggguuaguagaccuuuuugucuucagcaccagcuuuuaucucauuagcaucuuccuccaccugaucaaaaucccaacccacagacauaucacagggaaacccugcccuaaaccacacagacuuaaccacaugggcauaugcucauguggucuauacaaacauccugguguaccagucaaguggaaaagauag

SEQ ID NO: 3952 - RNA, 1473 nt, Artificial Sequence
  derived and/or modified protein sequence (wt) from LASV(LASV239-NIG-2010;Clade II)__AIT17642__GPCstabilized
augggacaaaucauaacauuuuuccaagaaguaccucaugucauagaggaagugaugaacauuguccugauugcccucagccuccuggcaauacugaaaggggucuacaauguugccaccuguggccucuuuggacugguguccuuucuccucuuauguggaagaucaugcucaacaacuuacaaggguguuuaugagcuacagacucuagagcuagacauggcaagccuuaauaugacaaugcccuuaucuugcacgaagaacaacagccaucauuacaucauggucggaaaugauacuggcuuggagcugacuuuaacaaauacaaguauuaucaaccacaaguucugcaaccuuucugaugcacacaaaaagaaucuuuaugaccaugcuuuaaugaguaucauuucaaccuuccacuuaucuauuccuaacuuuaaucaguaugaagcaaugaguugugacuucaaugggggaaagauaaguguucaauacaaccuuagccacgcuuaugcuguagaugcagcuagccacugugggaccauugccaauggcguucuucagacuuuuaugaggauggcuugggguggcaguuacauagcacuugauuccgguugcgggaguugggauuguauaaugacuuccuaccaauauuugauaauccaaaacacuacuugggaagaucacugccaguuuucccgcccauccccuaucgguuaccuggggcuacugucacaaaggaccagggacauuuacaucagucgaagacgccgggggacuuuuacuuggacucucucugauucugaggguaaugaaacaccggguggguauugucugacaagauggaugcuaauugaggccgagcugaagugcuuugggaacacagcaguugcaaaaugcaaugagaaacaugaugaagaguuuugugacauguuaagguuguuugacuuuaacaagcaagcuauaaggagacugaagacacccgcgcagaugaguauccaauugauaaacaaagcagugaacgcacugauaaaugaccaacugaucaugaagaaucauuugagagauaucaugugcauuccuuacugcaauuacagcaaguacugguaccuaaaucacacuguaacagggaaaacaucguugccaagaugcuggcuugugucaaaugguuccuaccugaaugagacacauuuuucugaugacauugaacaacaagcagacaacaugauaacagaacuguugcaaaaggaguacauggacaggcaagggaaaacacccuuaggguuaguagaucuuuuugucuucagcaccaguuuuuaucucauuagcaucuuccuccaccuaguuaaaaucccaacccauagacauauuauagggaaacccugcccuaaaccacacagacucaaccacaugggcauaugcucauguggucuguacaaacauccugguguaccaguuaaguggaaaagauag

SEQ ID NO: 3953 - RNA, 1473 nt, Artificial Sequence
  derived and/or modified protein sequence (wt) from LASV(LASV241-NIG-2011;Clade II)__AIT17646__GPCstabilized
auggggcaaaucauaacauucuuccaggaaguaccucaugucauagaggaagugaugaacauuguccugauugcccucagccuucuggcaauauugaaaggaaucuacaauguugcuaccuguggccucuuuggauugguguccuuucuccucuuauguggaagaucaugcucaacaacuuacaaagguguuuaugagcugcaaacucuagaacuagacauggcaagccuuaauaugacaaugcccuuaucuugcacaaagaauaacagccaucauuacaucauggucgggaaugagacuggcuuagagcugaccuuaacaaauacaaguaucauuaaccacaaguuuuguaaccucucugaugcacauaaaaagaaucuuuaugaccaugcuuuaaugaguaucaucucaacuuuccacuuauccauuccuaauuuuaaucaguaugaagcaaugaguugugacuucaauggggggaagauaaguguucaguacaaccuuagccacgcuuaugcuguagaugcagccagccacugugggaccguugccaauggcguucuucagacuuucaugaggauggcuugggguggcaguuacauagcacuugauuccgggugcgggaguugggauuguauaaugacuuccuaccaauauuugauaauccagaacaccaccugggaagaccacugccaguuuucucguccaucccccaucgguuaucuggggcuacugucacaaaggaccagggacauuuacaucagucgaagacgccgggggacuuuuacuuggacccucucugauucugaaggcaaugagacaccggguggauauugucuaacaagauggaugcugauugaggccgaauugaagugcuuugggaacacagcaguugcgaagugcaaugagaaacaugaugaagaguuuugugacauguuaagauuguuugacuuuaacaaacaagcuauaaggaggcugaagacacccgcacagaugaguauccaacugauaaacaaagcagugaacgcacugaucaacgaccagcugauuaugaagaaucauuuaagagauaucaugugcauuccuuacugcaauuacagcaaauauugguauuuaaaucacacuguaacagggaagacaucguugcccagaugcuggcuugugucaaaugguuccuaccugaaugagacacauuuuucugaugacauugaacaacaagcagacaacaugauaacagaacuguugcagaaggaguacauggacaggcaagggaaaacacccuuaggguuaguagaucuuuuugucuuuagcaccagcuuuuaucucauuagcaucuuccuccaccugguuaaaaucccaacucacagacaugucauagggaaacccugcccuaaaccacacagacucaaccacaugggcauaugcucauguggucuguacaaacauccugguguaccagucaaauggaaaagauag

SEQ ID NO: 3954 - RNA, 1473 nt, Artificial Sequence
  derived and/or modified protein sequence (wt) from LASV(LASV242-NIG-2010;Clade II)__AIT17650__GPCstabilized
auggggcaaaucauaacauuuuuucaggaagugccucaugucauagaagaagugaugaacauuguccugauugcccucagccuucuggcaauauugaaagggaucuacaauguugcuacuuguggccucuuuggacugguguccuuucuucucuuauguggaagaucaugcucaacaacuuacaaagguguuuaugagcuacaaacucuagagcuagacauggcaagccuuaauaugacaaugcccuuaucuugcacaaagaauaauagccaccauuacaucauggucggaaaugaaacuggcuuagagcugacuuuaacaaauauaaguaucaucaaccacaaguuuuguaaccuuucugaugcacauaaaaagaaucuuuaugaccaugcuuuaaugagcaucaucucaaccuuccacuuauccauuccuaacuucaaucaauaugaagcaaugaguugugacuucaauggggggaagauaaguguucaguacaaccuuagccacacuuaugcuguagaugcagcuaaccacugugggaccauugccaauggcguucuucagacuuucaugaggauggcuugggguggcagcuacauagcacuugauuccggaugcgggaguugggauuguauaaugacuuccuaccaauauuugauaauccagaacaccacuugggaagaucacugccaguuuucucgcccaucccccaucgguuaucuggggcuacugucacaaaggaccagggacauuuacaucagucgaagacgccgggggacuuuuacuuggacccucucugauucugaaggcaaugaaacuccagguggguauugucuaacaagguggauguugauugaggccgaguugaagugcuucgggaacacagcaguugcgaaaugcaaugagaaacaugaugaagaguuuugugacaugcuaagauuguuugacuucaauaaacaagcuauaaggagacugaaagcacccgcacagaugaguauccaacuaauaaacaaagcagugaaugcacugaucaaugaccagcugauaaugaagaaucauuuaagagauaucaugugcauuccuuacugcaauuacagcaaguauugguauuugaaucacacuguaacaggaaggacaucguuaccaagaugcuggcuugugucaaaugguuccuaccugaaugagacacauuuuucugacgacauugaacaacaagcagacaacaugauaacagaacuguugcagaaggaguacauagacaggcaagggaaaacaccuuuaggguuaguagaucuuuuugucuucagcaccagcuuuuaucucaucagcaucuuccuccaccugguuaaaaucccaacccacagacauaucauagggaaacccugcccuaaaccacacagacucaaccacaugggcauaugcucauguggucuguacaagcauccuggugugccagucaaguggaaaagauag

SEQ ID NO: 3955 - RNA, 1473 nt, Artificial Sequence
  derived and/or modified protein sequence (wt) from LASV(LASV246-NIG-2010;Clade II)__AIT17658__GPCstabilized
augggacaaaucauaacauucuuucaggaaguaccucaugucauugaggaagugaugaacauuguccugauugcccucagccuucuagcaauacugaaagggguuuacaauguugcuaccuguggccucuuuggauugguguccuuucuccucuuauguggaaggucaugcucaauaacuuacaaggguguuuaugagcuacaaacucuagagcuagacauggcaaaccuuaauaugacaaugcccuuaucuugcacgaagaacaacagccaucauuacaucauggucggaaaugagacuggcuuagagcugacuuuaacaaauacaaguaucaucaaccacaaguuuuguaaccuuucugaugcacauaaaaagaaucuuuaugaccaugcuuuaaugaguaucaucucaaccuuccacuuauccauuccuaacuuuaaucaguaugaggcaaugaguugugacuucaaugggggaaagauaaguguucaguacaaccucagccacacuuaugcuggagaugcagcugaccacugugggaccauugccaauggcguucuucagacuuuuaugagaauggcuugggguggcaguuacauagcacuugauucuggaugcgggaguugggauuguauaaugacuuccuaccaauauuugauaauccaaaacaccacuugggaagaucacugccaguuuucccgcccauccccuauggguuaucugggguugcugucacaaaggaccagggauauuuacaucagucgaagacgccggggaacuuuuacuuggacucucucugauucugaagguaaugaaacaccggguggguauugucuaacaagauggaugcugauugaggcagaguugaagugcuuugggaacacagcaguugcgaaaugcaaugagaaacaugaugaagaguuuugugacauguuaagguuguuugauuucaacaaacaagcuauaaggaggcugaagacacccgcacaaaugagcauucaacugauaaacaaagcagugaacgcacugaucaaugaccagcuaaucaugaagaaucauuugagagauaucaugugcauuccuuacugcaauuacagcaaguauugguaucuaaaucacacuauaacagggaaaacaucguugccaagaugcuggcuugugucaaaugguuccuaccugaaugaaacacauuuuucugaugacauugaacaacaagcagacaacaugauaacagaacuguugcagaaggaguacauagacagacaagggaaaacacccuuaggguugguggaucucuucgucuucagcaccagcuuuuaucucauuagcaucuuccuccacuugguuaaaaucccaacucacaggcauaucacagggaaacccugcccuaaaccacacagacucaaccacaugggcauaugcucaugugguuuguacaaacaucccgguguaccaguuagauggaaaagauag

SEQ ID NO: 3956 - RNA, 1473 nt, Artificial Sequence
  derived and/or modified protein sequence (wt) from LASV(LASV251-NIG-2010;Clade II)__AIT17666__GPCstabilized
auggggcagaucguaacauuuuuccaggaaguaccucaugucauagaagaggugaugaacauuguccugauugcccucagccuucuggcaauauuaaaagggaucuacaauguugcuaccuguggucucuuuggauugguguccuuucuucucuuauguggaagaucaugcucaacaacuuacaaagguguuuaugagcuacaaacucuagagcuagacauggcaagccuuaauaugacaaugcccuuauccugcacgaagaacaacagccaucauuacaucauggucggaaaugagacuggcuuagagcugaccuuaacgaauacaaguaucaucaaccacaaguuuuguaaccuuucugaugcacauaaaaagaaucuuuaugaccaugcuuuaaugaguaucaucucaaccuuccacuuauccauuccuaacuuuaaucaguaugaagcaaugagcugugacuucaauggggggaagauaaguguucaguacaaccuuagccacacuuaugcuguagaugcagcuaaccacugugggaccauugccaauggcguucuucagacuuucaugaggauggcuugggguggcaguuacauagcacuugauuccggaugcgggaguugggauuguauaaugacuuccuaccaauauuuaauaauccagaacaccacuugggaagaucacugccaguuuucucguccaucccccaucgguuaucuggggcuacugucacaaagaaccagggacauuuacaucagucgaaggcgccgggggacuuuuacuuggacccucucugauucugaaggcaaugaaacaccggguggguauugucuaacaagauggaugcugauugaggccgaguuaaagugcuuugggaacacagcaguugcaaaaugcaaugagaaacaugaugaagaguuuugugacauguuaagacuguuugauuucaacaaacaagcuauaaggaggcugaagacacccgcacagaugaguauccagcuaauaaacaaagcagugaacgcacugaucaaugaccagcugauuaugaagaaucaucuaagagauaucaugugcauuccuuacugcaauuacagcaaguauugguauuuaaaucacacuguaacagggaagacaucguugccaagaugcuggcuugugucaaaugguuccuaccugaaugagacacauuuuucugaugacauugaacaacaagcagacaacaugauaacagaacuguugcagaaggaguacauggacaggcaagggaaaacacccuuaggguuaguagaucuuuuugucuucagcaccagcuuuuaucucauuagcaucuuccuccaccugguuaaaaucccaacccacagacauaucacaggaaaacccugccccaagccacacagacucaaccacaugggcauaugcucauguggucuguacaaacauccugguguaccagucaaguggaaaagauag

SEQ ID NO: 3957 - RNA, 1473 nt, Artificial Sequence
  derived and/or modified protein sequence (wt) from LASV(LASV253-NIG-2011;Clade II)__AIT17670__GPCstabilized
auggggcaaaucauaacauuuuuucaggaagugccucaugucauagaagaagugaugaacauuguccugauugcccucagccuucuggcaauauugaaagggaucuacaauguugcuacuuguggccucuuuggacugguguccuuucuucucuuauguggaagaucaugcucaacaacuuacaaagguguuuaugagcuacaaacucuagagcuagacauggcaagccuuaauaugacaaugcccuuaucuugcacaaagaauaauagccaccauuacaucauggucggaaaugaaacuggcuuagagcugacuuuaacaaauacaaguaucaucaaccacaaguuuuguaaccuuucugaugcacauaaaaagaaucuuuaugaccaugcuuuaaugagcaucaucucaaccuuccacuuauccauuccuaacuucaaucaauaugaagcaaugaguugugacuucaauggggggaagauaaguguucaguacaaccuuagccacacuuaugcuguagaugcagcuaaccacugugggacuauugccaauggcguucuucagacuuuuaugaggauggcuugggguggcagcuacauagcacuugauuccggaugcgggagcugggauuguauaaugacuuccuaccaauauuugauaauccagaacaccacuugggaggaucacugccaguuuucucgcccaucccccaucgguuaucuggggcuacugucacaaaggaccagggacauuuacaucagucgaagacgccggggaacuuuuacuuggacccucucugauucugaaggcaaugaaacuccagguggguauugucuaacaagguggauguugauugaggccgaguugaagugcuuugggaacacagcaguugcgaaaugcaaugagaaacaugaugaagaguuuugugacaugcuaagauuguuugacuuuaauaaacaagcuauaaggagacugaaagcacccgcacagaugaguauucaacuaauaaacaaagcagugaaugcacugaucaaugaccagcugauaaugaagaaucauuuaagagauaucaugugcauuccuuacugcaauuacagcaaguauugguaucugaaucacacuguaacaggaaggacaucguuaccaagaugcuggcuugugucaaaugguuccuaccugaaugagacacauuuuucugacgacauugaacaacaagcagacaacaugauaacagaacuguugcagaaggaguacauagacaggcaagggaaaacaccuuuaggguuaguggaucuuuuugucuucagcaccagcuuuuaucucaucagcaucuuccuccaccugguuaaaaucccaacccacagacauaucauagggaaacccugcccuaaaccacacagacucaaccacaugggcauaugcucauguggucuguacaaacauccuggugugccaguuaaguggaaaagauag

SEQ ID NO: 3958 - RNA, 1473 nt, Artificial Sequence
  derived and/or modified protein sequence (wt) from LASV(LASV254-NIG-2011;Clade II)__AIT17674__GPCstabilized
augggacaaaucauaacauuuuuccaggaaguaccucaugucauagaggaagugaugaacauuguucugauugcucucagccuucuggcaauauugaaagggaucuacaauguugcuaccuguggccucuuuggauugguguccuuucuucucuuauguggaagaucaugcucaacaacuuacaaggguguuuaugagcuacaaacucuagagcuagacaugacaaaccucaauaugacaaugccuuuauccugcacgaaaaacaacagccaccauuacaucauggucggaaaugagacuggucuggagcugacuuuaacaaauacaagcaucaucaaccacaaguuuuguaaccuuucugaugcacauaaaaagaaucuuuauaaccaugcuuuaaugaguauuauuucaacuuuccacuuauccauuccuaacuuuaaucaguaugaagcaaugaguugugacuucaaugggggcaagauaaguguccaguacaaccuuagccauaguuaugcuguggaugcagcuaaccacugugggaccauugccaauggcgugcuucagacuuuuaugaggauggcuugggguggcaguuacauagcacuugauuccggaugcgggaauugggauuguauaaugaccuccuaccaauauuugauaauccaaaacaccacuugggaagaucacugucaguuuucucgcccauccccuauugguuaucugggguuacugucacaaaggaccagggacauuuacaucagucgaagacgccgggggacuuuuacuuggacucucucugauucugaagguaaugaaacaccagguggguauugucuaacaagauggaugcugauugaggccgaguugaagugcuuugggaacacagcaguugcgaaauguaaugagaaacaugaugaggaguuuugugacauguuaagauuguuugacuuuaacaaacaagcuauaaggaggcugaagacacccgcacaggcgaauauccaacugauaaauaaagcagugaacgcacugaucaaugaccagcugaucaugaagaaucauuugagagauaucaugugcauuccuuacugcaauuacagcaaguauugguacuuaaaucacacuguaacagggaagacaucguugccaagaugcuggcuugugucaaauggcuccuacuugaaugagacacauuuuucugaugacauugaacaacaagcagacaauaugauaacagaacuguugcagaaggaguacauggacaggcaagggaaaacacccuuaggguugguagaucuuuuugucuucagcaccagcuuuuaucucauuagcaucuuccuccaccugguuaaaaucccaacccacagacaugucauagggaaacccugcccuaaaccacacagacucaaccacaugggcauaugcucauguggucuguacaaacauccugguguaccagucaaguggaaaagauag

SEQ ID NO: 3959 - RNA, 1473 nt, Artificial Sequence
  derived and/or modified protein sequence (wt) from LASV(LASV256-NIG-2010;Clade II)__AIT17678__GPCstabilized
augggacaaaucauaacauuuuuccaggaaguaccucaugucauagaggaaguuaugaacauuguccugaucacucucagccuucuggcaauacugaaagggaucuacaauauugcuaccuguggccucuuuggauugguguccuuucuccucuuauguggaagaucauguucaacaacuuacaagggugucuaugagcuacaaacuuuagagcuagauaugacaagccuuaauaugacaaugcccuugucuugcacgaagaacaauucccaccauuacaucauggucgggaaugagacuggccuggagcugacuuuaacaaauacaagcauuaucaaccacaaguuuugcaaccuuucugaugcacacaaaaagaaucuuuaugaucaugcuuuaaugaguaucauuucaaccuuccacuuauccauuccuaacuuuaaucaguaugaagcaaugaguugugauuucaauggggggaagauaaguguucaguacaaccuuagccacacuuaugcuguagaugcagcuaaccacugugggaccauugccaauggcguucuucagacuuuuaugaggauggcuugggguggcaguuauauagcacuugauuccggaugcgggagcugggauugcauaaugacuuccuaccaauauuugauaauccaaaacaccacuugggaagaucacugccaguuuucucgcccaucccccaucgguuaucuggggcugcugucacaaagaaccagggacauuuacaucagucgaagacgccggggaacuuuuaccuggacucucucugacucugaaggcaaugaaacaccggguggguauugucuaacaagauggaugcugauugaggcugaguugaagugcuuugggaacacagcagucgcaaaaugcaaugagaaacaugaugaagaauuuugugacauguuaagauuguuugacuucaacaaacaagcuauaaggaggcugaagacacccgcacagaugaguauccagcugauaaacaaagcagugaacgcacugauuaaugaccagcugauuaugaagaaucacuugagagauauuaugugcauuccuuacugcaauuacagcaaguauugguaucuaaaucacacuguaacagggaagacaucgcuaccaagaugcuggcuugugucaaaugguuccuaccugaaugagacacauuucucugaugacauugaacaacaagcagacaacaugauaacagaacuguugcaaaaggaguacauagacaggcaagggaaaacacccuuaggguuaguagaccuuuuugucuucagcaccagcuuuuaucucauuagcaucuuccuccaccugguuaagaucccaacccacagacauaucauagggaaacccugccccaaaccacacagacucaaccauaugggcauauguucauguggucuguacaaacauccugguauaccagucaaguggaaaagauag

SEQ ID NO: 3960 - RNA, 1473 nt, Artificial Sequence
  derived and/or modified protein sequence (wt) from LASV(LASV267-NIG-2010;Clade II)__AIT17686__GPCstabilized
augggacaaaucauaacauuuuuccaagaaguaccucaugucauagaggaagugaugaacauugucuuaauugcucucagccuucuggcaauacugaaagggauauacaauguugcuaccuguggccucuuuggauugguguccuuucuccucuuauguggaagaucaugcucaacaacuuacaaggguguuuaugagcuacaaacucuggagcuggacauggcgagccuuaauaugacaaugcccuuaucuugcacgaagaacaacagccaccauuacaucauggucggaaaugagaccggcuuggaguuaacuuuaacaaauacaaguauuaucaaccacaaguuuugcaaccuuucugaugcacauaaaaagaaucuuuaugaccaugcuuuaaugaguaucaucucaacuuuucacuuauccauuccuaacuuuaaucaguaugaagcaaugaguugugacuucaaugggggaaagauaaguguucaauacaaccuuagccacacuuaugcuguagaugcagcuaaccacugugggaccauugcuaauggcguucuucagacuuuuaugaggauggcuugggguggcaguuacauagcacuugauuccagaugcgggaguugggauugcauaaugacuuccuaccaauauuugauaauccaaaacaccacuugggaagaucacugccaguuuucucgcccaucccccaucgguuaucuggggcuacugucacaaaggaccagggacauuuauaucagucgaagacgccgggggacuuuuacuuggacucucucugauucugaagguaaugaaacaccggguggguauugucuaacaagauggaugcugauugaggccgaguugaagugcuuuggaaacacagcaguugcgaaaugcaaugagaaacaugaugaagaguuuugugacauguuaagauuguuugacuuuaacaaacaagcuauaaggaggcugaagacacccgcacagaugaguauccaacugauaaacaaagcagugaacgcacugaucaaugaccagcugauuaugaagaaucauuugagagauaucaugugcauuccuuacugcaauuacagcaaguauugguaucuaaaucacacugugacagggaagacaucguugccaagaugcuggcuugugucaaaugguuccuaccugaaugagacacacuuuucugaugauauugagcaacaagcagacaacaugauaacagagcuguuacaaaaggaguacauggacaggcaagggaaaacacccuuaggguuaguagaucuuuuuguuuuuagcaccagcuuuuaucucauuagcaucuuccuccaccugauuaaaaucccaacccacagacaugucauagggaaaccuugcccuaaaccacacagacucaaccacaugggcauaugcucauguggucuguacaaacauccugguguaccagucaaguggaaaagauaa

SEQ ID NO: 3961 - RNA, 1473 nt, Artificial Sequence
  derived and/or modified protein sequence (wt) from LASV(LASV271-NIG-2010;Clade II)__AIT17690__GPCstabilized
auggggcaaaucauaacauucuuccaggaaguaccucaugucauagaagaagugaugaacauuguccugauugcccucagccuucuggcaauauugaaaggaaucuacaauguugcuaccuguggccucuuuggauugguguccuuucuucucuuauguggaagaucaugcucaacaacuuacaaagguguuuaugagcugcaaacucuagagcuagacauggcaagccuuaauaugacaaugcccuuaucuugcacaaagaauaacagccaccauuacaucauggucgggaaugagacuggccuagagcugaccuuaacaaauacaaguaucauuaaccacaaguuuuguaaccuuucugaugcacauaaaaagaaucuuuaugaccaugcuuuaaugaguaucaucucaacuuuccacuuauccaucccuaauuuuaaucaguaugaagcaaugaguugugacuucaauggagggaagauaaguguucaguacaaccuuagccacgcuuaugcuguagaugcagccagccacugugggaccguugccaauggcguucuucagacuuucaugaggauggcuugggguggcaguuacauagcacuugauuccgggugcgggaguugggauuguauaaugacuuccuaccaauauuugauaauccagaacaccaccugggaagaccacugccaguuuucucgcccaucccccaucgguuaucuggggcuacugucacaaaggaccagggacauuuacaucagucgaagacgccgggggacuuuuacuuggacccucucugauucugaaggcaaugaaacaccggguggauauugucuaacaagauggaugcugauugaggccgaauugaagugcuuugggaacacagcaguugcgaagugcaaugagaaacaugaugaagaguuuugugacauguuaagauuguuugacuuuaacaaacaagcuauaaggaggcugaagacacccgcacagaugaguauccaacugauaaacaaagcagugaacgcacugaucaacgaccagcugauuaugaagaaucauuuaagagauaucaugugcauuccuuacugcaauuacagcaaauauugguauuuaaaucacacuguaacagggaggacaucguugcccagaugcuggcuugugucaaaugguuccuaccugaaugagacacauuuuucugaugauauugaacaacaagcagacaacaugauaacagaacuguugcagaaggaguacauggacaggcaagggaaaacacccuuaggguuaguagaucuuuuugucuuuagcaccagcuuuuaucucauuagcaucuuccuccaccugguuaaaaucccaacucacagacaugucauagggaaacccugcccuaaaccacacagacucaaccacaugggcauaugcucauguggucuguacaaacauccugguguaccagucaaauggaaaagauag

SEQ ID NO: 3962 - RNA, 1473 nt, Artificial Sequence
  derived and/or modified protein sequence (wt) from LASV(LASV274-NIG-2010;Clade II)__AIT17694__GPCstabilized
augggacaaaucauaacauuuuuccaggaaguaccucaugucauagaggaagugaugaacauuguccugauugcucucagccuucuggcaauacugaaggggaucuacaauguugcuaccuguggccucuuuggacugguguccuuccuccucuuauguggaagaucauguucaacaauuuacaaggguguuuaugagcuacaaacucuggagcuagacauggcaagccuuaauaugacaaugcccuuaucuugcacgaagaacaacagccaccauuacaucauggucggaaaugagacuggcuuggagcugacuuuaacaaauacaaguaucaucaaccacaaauuuuguaaccucucugaugcacauaaaaagaaucuuuaugaucaugcuuuaaugaguaucauuucaaccuuccacuuauccauuccuaacuuuaaucaguaugaagcaaugagcugugacuucaauggggggaagauaaguguucaguacaaccucagccacacuuaugcuguggaugcagccaaccacugugggacuaucgccaaugguguucuucagacuuuuaugaggauggcuugggguggcaguuauauagcacuugauuccggaugcgggagcugggacuguauaaugacuuccuaucaauauuugauaauccaaaacaccacuugggaagaucacugccaguuuucucguccauccccuaucgguuaccuagggcuacugucacaaaggaccagggacauuuacaucagucgaagacgccgggggacuuuuacuuggacucucucugauucugaagguaaugaaacaccggguggguauuguuuaacaagauggaugcugauugaggccgaguugaaaugcuuugggaacacagcaguugcgaaaugcaaugagaaacaugaugaagaguuuugugacauguuaagauuauuugacuuuaacaaacaagcuauaagaaggcuaaagacacccgcacagaugaguauccagcugauaaacaaagcagugaacgcacugaucaaugaccagcugauuaugaagaaucauuugagagacaucaugugcaucccuuacugcaauuacagcaaguacugguaucuaaaucauacuguaacagggaagacaucguugccaaggugcuggcuugugucaaaugguuccuaccugaaugagacacauuuuucugaugacauugaacaacaagcagacaacaugauaacagaacuacugcaaaaggaguacauagacaggcaagggaaaacaccuuuaggguuaguagaucuuuuugucuucaguaccagcuuuuaucucauuagcaucuuccuccaccugguuaaaaucccaacccacagacaugucguaggaaaacccugcccuaaaccacacagacucaaccacaugggcauauguucauguggucuauauaaacauccuggugugccagucaaguggaaaagauag

SEQ ID NO: 3963 - RNA, 1473 nt, Artificial Sequence
  derived and/or modified protein sequence (wt) from LASV(LASV719-NIG-2009;Clade II)__AIT17704__GPCstabilized
augggacaaaucauaacauuuuuccaggaaguaccucaugucauagaggaagugaugaacauuguccugauugcucucagccuucuggcaauacugaaggggaucuacaauguugcuaccuguggccucuuuggauugguguccuuccuccucuuauguggaagaucauguucaacaacuuacaaggguguuuaugagcuacaaacucuggagcuagacauggcaagccuuaauaugacaaugcccuuaucuugcacgaagaacaacagccaccauuacaucauggucggaaaugagacuggcuuggagcugacuuuaacaaauacaaguaucaucaaccacaaauuuuguaaccucucugaugcacauaaaaagaaucuuuaugaucaugcuuuaaugaguaucauuucaaccuuccacuuauccauuccuaacuuuaaucaguaugaagcaaugaguugugacuucaauggggggaagauaaguguucaguacaaccuuagccacacuuaugcuguagaugcagccaaccacugugggacuaucgccaaugguguucuucagacuuuuaugaggauggcuugggguggcaguuauauagcacuugauuccggaugcggaaguugggacuguauaaugacuuccuaccaauauuugauaauccaaaacaccacuugggaagaucacugccaguuuucucgcccauccccuaucgguuaccuagggcuacugucacaaaggaccagggacauuuacaucagucgaagacgccgggggacuuuuacuuggacucucucugauucugaagguaaugaaacaccggguggauauugucuaacaagauggaugcugauugaggccgaguugaaaugcuuugggaacacagcaguugcgaaaugcaaugagaaacaugaugaagaguuuugugacauguuaagauuguuugacuuuaacaaacaagcuauaaggaggcuaaagacacccgcacagaugaguauccagcugauaaacaaagcagugaacgcacugaucaaugaccaacugauuaugaagaaucauuugagagauaucaugugcauuccuuacugcaauuacagcaaguacugguaucuaaaucauacuguaacagggaagacaucguugccaaggugcuggcuugugucaaaugguuccuaccugaaugagacacauuuuucugaugacauugaacaacaagcagacaauaugauaacagaacugcugcaaaaggaguacauagacaggcaagggaaaacaccuuuaggguuaguagaucuuuuugucuucagcaccagcuuuuaucucauuagcaucuuccuccaccugguuaaaaucccaacccacagacaugucauaggaaaacccugcccuaaaccacacagacuuaaccauaugggcauauguucuuguggucuauacaaacauccuggugugccagucaaguggaaaagauag

SEQ ID NO: 3964 - RNA, 1473 nt, Artificial Sequence
  derived and/or modified protein sequence (wt) from LASV(LASV738-NIG-2009;Clade II)__AIT17712__GPCstabilized
augggacaaaucauaacauuuuuccaggaaguaccucaugucauagaggaagugaugaacauuguccugauugcucucagccuucuggcaauacugaaagggaucuacaauguugcuaccuguggucucuuuggauugguguccuuucuccuuuuauguggaagaucauguucaacaaccuacaaggguguuuaugaacuacaaacucuagagcuggacauggcaagccuuaauaugacaaugccccuaucuugcacgaagaacaacagccaccauuacaucauggucgggaaugagacuggcuuagagcugacuuuaacaaauacaaguauuaucaaccacaaguuuuguaaucuuucugaugcacauaaaaagaaucuuuaugaccaugcuuuaaugaguaucauuucaaccuuccacuuguccaucccuaacuuuaaucaguaugaagcgaugaguugugacuucaaugggggaaagauaaguguucaguacaaccuuagccacacuuaugcuguagaugcagccaaccacugcgggaccaucgccaauggcguucuucagacuuuuaugaggauggcuugggguggcagcuacauagcacuugauuccggaugcggggcuugggauuguauaaugacuuccuaccaauauuugauaauccagaacaccacuugggaagaucauugccaguuuucucgcccauccccuaucgguuaucuggggcuacugucacaaaggaccagggacauuuacaucagucgaagacgccgggggacuuuuacuuggacucucuccgauucugaagguaaugaaacaccggguggguacugucuaacaagauggaugcugauugaggccgaguugaagugcuuugggaacacagcaguugcgaaguguaaugagaaacaugaugaagaguuuugugacauguuaagauuguuugacuuuaacaaacaagcuauaaugaggcugaagacacccgcacagaugaguauccaacugauaaacaaagcagugaacgcacuaaucaaugaccagcugauuaugaaaaaucacuugagagacaucaugugcauuccuuacugcaauuacagcaaguacugguaucuaaaucacacuguuacagggaagacaucguugccaaggugcuggcuugugucaaaugguucuuaccuaaaugaaacacauuuuucugaugacauugaacaacaagcagauaacaugauaacagaaauguugcaaaaggaguacauagacaggcaagggaaaacacccuuaggguuaguagaucuuuuugucuuuagcaccagcuuuuaucucauuagcaucuuccuccaccuggucaaaaucccaacccacagacaugucauagggaaacccugccccaaaccgcacagacucaaccacaugggcauaugcucauguggucuauacaaacauccugguguaccagucagguggaaaagauag

SEQ ID NO: 3965 - RNA, 1473 nt, Artificial Sequence
  derived and/or modified protein sequence (wt) from LASV(LASV966-NIG-2009;Clade II)__AIT17718__GPCstabilized
augggacaaauuauaacauuuuuccaggaaguaccucaugucauagaggaagugaugaacauugucuugauugcucucagccuucuggcaauacugaaagggaucuacaauguugccaccugcggccucuuuggauugguguccuuucuacucuuauguggaagaucaugcucaacaacuuacaaggguguuuaugaacuacaaacucuagagcuagacauggcaagccucaacaugacaaugcccuuaucuugcacgaagaacaacagccaccauuacaucagggucggaaaugagacuggcuuggagcugacuuuaacaaaugcaaguaucaucaaccacaaguuuuguaaucuuucugaugcacauaaaaagaaccuuuaugaccaugcuuuaaugagcaucaucucgacuuuccacuuguccauucccaacuuuaaucaguaugaagcaaugaguugugacuucaauggagggaagauaaguguucaauacaaccuuagccacgcuuaugcuauagaugcagcuaaccacugugggacuguugccaauggcguucuucagacuuucaugaggauggcuugggguggcaguuauauagcacuugauuccggaugcgggaauugggauuguauaaugacuucuuaccaauauuuaauaauccaaaacaccacuugggaagaucacugccaguuuucucguccauccccuauuggcuaucuagggcuacugucacaaagaaccagggacauuuauaucagucgaagacgccgggggacuuuuaccuggacucucucugacuccgaggguaaugaaacaccaggugguuauugucuaacaagauggaugcugauugaagccgaguugaagugcuuuggaaacacggcaguugcgaaauguaaugagaaacaugaugaggaguuuugugacauguuaagauuguuugacuucaacaaacaagcuauaaggaggcugaagacacccgcacagaugaguauccaacugauaaacaaagcagugaacgcacugaucaaugaccagcuaauuaugaagaaucacuuaagagauaucaugugcauuccuuacugcaauuacagcaaguauugguauuuaaaucacacuguaacagggaagacaucguugccuagaugcuggcuugugucaaaugguuccuacuugaaugagacacauuuuucugacgacauugaacaacaagcagacaacaugauaacagaacuguugcagaaggaguacauggauaggcaagggaaaacacccuuaggguuaguggaucucuuugucuucagcacuaguuucuaccucauaagcaucuuccuccaccuggucaaaaucccaacccacagacaugucauagggaaaccuugccccaagccucacagacucaaccacaugggcauaugcuccugugguuuuuacaaacauccugguguaccagucaaguggaagagauag

SEQ ID NO: 3966 - RNA, 1473 nt, Artificial Sequence
  derived and/or modified protein sequence (wt) from LASV(LASV969-NIG-2009;Clade II)__AIT17724__GPCstabilized
augggacaaaucauaacauuuuuccaggaaguaccucauguaauagaggaagugaugaacauuguccugauugcucucagccuucuggcaauacugaaagggaucuacaauguugcuaccuguggccucuuuggacugguguccuuccuccucuuauguggaagaucaugcucaacaacuuacaaggguguuuaugagcuacaaacucuagaguuagacauggcaaaccuuaauaugacaaugcccuuaucuugcacgaagaacaacagccaccauuacaucaugguuggaaaugagacuggcuuggagcugacuuuaacaaauacaagcauuaucaaccauaaguuuugcaaccuuucugaugcacacaaaaagaaucuuuaugaccaugcuuugaugaguaucaucucaaccuuccacuuauccauuccuaacuuuaaucaauaugaagcgaugagcugugacuucaauggggggaagauaaguguucaguacaaccuuagccacacuuaugcuguagaugcagccaaccacugugggaccgucgccaauggcguucuucagacuuucaugaggauggcuugggguggcaguuacauagcacuugauuccggaugcgggaguugggauuguauaaugacuuccuaccaauauuugauaauccaaaacaccacuugggaagaucacugccaguuuucucgcccaucccccaucgguuaucuggggcuacugucacaaaggaccagggacauuuacaucagccgacgacgccgggggacuuuuacuuggacucucucugauucugaagguaaugaaacaccggguggguauugucugacaagauggaugcugauugaggccgaguuaaagugcuuugggaacacagcaguugcgaaaugcaaugagaaacaugaugaagaauuuugugacauguuaagauuauuugacuuuaacaaacaagcuauaaggaggcugaagacacccgcacagaugaguauccaacugauaaacaaagcagugaacgcacugaucaaugaccagcugauuaugaagaaucauuugagagauaucaugugcauuccuuacugcaauuacagcaaguacugguaucuaaaucauacuguaacagggaagacaucguugccaaggugcuggcuugugucaaaugguuccuaucuaaaugagacacauuuuucugaugacaucgaacaacaagcagacaacaugauaacagaacuguugcaaaaggaguacauggacaggcaagggaaaacacccuuaggguugguggaucuuuuuguuuuuagcaccagcuuuuaucucauuagcaucuuccuccaccugguuaaaaucccaacccacagacauaucauggggaaacccugcccuaaaccacacagacucaaccacaugggcauaugcucauguggucuauauaaacaccccgguguaccagucaaguggaaaagauag

SEQ ID NO: 3967 - RNA, 1473 nt, Artificial Sequence
  derived and/or modified protein sequence (wt) from LASV(LASV971-NIG-2009;Clade II)__AIT17728__GPCstabilized
augggacaaaucauaacauuuuuccaagaaguaccucaugucauagaggaagugaugaacauuguccugauugcucucagucuuuuggcaauauugaaagggaucuacaauguugcuaccuguggccucuuuggauugguguccuuucuccucuuauguggaagaucaugcucaacaacuuacaaggguguuuaugagcuacaaacucuagagcuagacauggggagccuuaauaugacaaugcccuuaucuugcacgaagaacaacucccaccauuacaucauggucggaaaugagacuggcuuggagcugacuuuaacaaauacaaguauuaucaaccacaaguuuugcaaccuuucugaugcacauaaaaagaaucuuuaugaccaugcuuuaaugaguaucaucucaaccuuccacuuguccauuccaaacuuuaaucaguaugaagcaaugaguugugauuucaauggggggaagauaaguguucaguacaaccuuagccacacuuaugcuguagaugcagcuaaccacugugggaccauugcuaauggcguucuucaaacuuuuaugaggauggcuugggguggcaguuacauagcacuugacuccggaugcgggagcugggacugcauaaugacuuccuaccaauauuuaauaauccaaaacaccacuugggaagaucacugccaguuuucucguccaucccccaucgguuaccuggggcuacugucacaaaggaccagggacauuuacaucagucgaagacgccgggggacuuuuacuuggacccucucugauucugaagguaaugaaacaccagguggguauugucuaacaagauggaugcugauugaggccgaguugaagugcuuugggaacacagcgguugcgaagugcaaugaaaaacaugaugaagaguuuugugacauguuaagauuguuugauuuuaacaaacaagcuauaaggaggcugaagacacccgcacagaugaguauucaacugauaaacaaagcagugaacgcacugaucaaugaccagcugauuaugaagaaucauuuaagagauaucaugugcauuccuuacugcaauuacagcaaguauugguaucuaaaucacacuguaacagggaagacaucguugccaagaugcuggcuugugucaaaugguuccuaccuaaaugagacacauuuuucugaugacauugaacaacaggcagacaacaugauaacagaacuguugcaaaaagaguacauggacaggcaagggaagacacccuugggguuaguagaucucuuugucuucagcaccagcuuuuaucucauuagcaucuuccuccaccugguuaaaaucccaacucacagacaugucauagggaaacccugucccaaaccacauagacucaaccacaugggcauaugcucauguggucuguacaaacauccuggugugccagucaaguggaaaagauag

SEQ ID NO: 3968 - RNA, 1473 nt, Artificial Sequence
  derived and/or modified protein sequence (wt) from LASV(LASV975-NIG-2009;Clade II)__AIT17732__GPCstabilized
augggacaaauuauaacauucuuucaagaaguaccucaugucauagaggaagugaugaacauuguccugauugcucucagccuucuggcaauacugaaagggaucuacaauguugccaccuguggccucuuuggauugguguccuuucuccucuuauguggaagaucaugcucaacaacuuacaagggugucuaugagcuacaaacucuagagcuagauauggcaagccuuaauaugacaaugccccuaucuugcacaaagaacaacagccaccauuacaucauggucggaaaugagacugguuuggagcugacuuuaacaaauacaagcauuaucaaccacaaguuuuguaaccuuucugaugcacacaaaaagaaucucuaugaccaugcuuuaaugaguaucaucucaaccuuccacuuauccauuccuaauuucaaucaguaugaagcaaugaguugugacuucaauggggggaagauaaguguacaguauaaccuuagucacacuuaugcuguugaugcagccaaucacugugggacuauugccaacgguguccuucagacuuuuaugagaauggcuugggguggcaguuacauagcacuugauuccggaugcgggaguugggauuguauaaugacuuccuaccaauauuugauaauccaaaauacuacuugggaagaucauugccaguuuucucgcccauccccuaucgguuaucuggggcuacugucacaaaggaccagggacauuuacaucagucgaagacgccgggggacuuuuacuuggacucucucugauucugaagguaaugaaacaccggguggguauugucuaacaagauggaugcugauugaggcugaauugaagugcuuuggaaacacagcaguugcgaaaugcaaugagaaacaugaugaagaguuuugugacauguuaagacuguuugacuuuaacaaacaagcuauaaggagguugaagacacccgcacagaugaguauccaacugauaaacaaagcagugaacgcacugaucaaugaccagcuuauuaugaagaaucacuugagagauaucaugugcauuccuuacugcaauuacagcaaguacugguaucuaaaucacacuguaacagggaagacaucguugccaaggugcuggcuugugucaaaugguuccuaccugaaugagacacauuuuucugaugauauugaacaacaagcagacaacaugauaacagaacuauugcaaaaggaguauauagacaggcaagggaaaacacccuugggguuaguagaucuuuuugucuuuagcaccagcuuuuaucucauuagcaucuuccuccaccuagucaaaaucccaacccacagacauaucguugggaagcccugcccuaaaccacacagacucaaccacaugggcauaugcucauguggucuauacaagcauccugguguaccaguuaaguggaagagauag

SEQ ID NO: 3969 - RNA, 1473 nt, Artificial Sequence
  derived and/or modified protein sequence (wt) from LASV(LASV976-NIG-2009;Clade II)__AIT17736__GPCstabilized
augggacaaaucgugacauuuuuccaggaaguaccucaugucauagaggaagugaugaacauuguccugauugcucucagccuucuggcaauacugaaagggaucuacaauguugcuaccuguggccucuuuggauugguguccuuucuccuuuuauguggaagaucauguucaacaaccuacaaagguguuuaugagcuacaaacucuagagcuggacauggcaagccuuaauaugacaaugcccuugucuugcacgaagaacaacagccaccauuacaucauggucggaaaugagacuggcuuagagcugaccuuaacaaauacaaguauuaucaaccacaaguuuugcaaccuuucugaugcacacaaaaaggaucuuuaugaccaugcuuuaaugaguaucauuucaaccuuccauuuauccauuccuaacuuuaaucaguaugaagcgaugaguugugacuucaauggggggaagauaaguguucaguacaaccuuagccacacuuaugcuguagaugcagccaaccacugugggacuaucgccaauggcguucuucagacuuuuaugaggauggcuugggguggcagcuacauagcacuugauuccggaugcgggaguugggauuguauaaugacuuccuaccaauauuugauaauccaaaacaccacuugggaagaucauugccaguuuucucgcccauccccuaucgguuaucuggggcuacuaucacaaagaaccagggacauuuacaucagucgaagacgccgggggacuuucacuuggacucucucugauucugaagguaaugaaacaccggguggguauugucuaacaagauggaugcugauugaggccgaguugaagugcuuugggaacacagcaguugcgaagugcaaugagaaacaugaugaagaguuuugugacauguuaagauuguuugacuuuaacaaacaagcuauaaugaggcugaagacacccgcacagaugaguauccaauugauaaacaaagcagugaacgcacugaucaaugaccagcugauuaugaagaaucauuugagagacaucaugugcauuccuuacugcaauuacagcaaguacugguaucuaaaucacacuguuacagggaagacaucguugccgaggugcuggcuuguaucaaaugguucuuaccugaaugagacacguuuuucugaugacauugaacaacaagcagacaacaugauaacagaaauguugcaaaaggaguacuuagacaggcaagggaaaacacccuuaggguuaguagaucuuuuugucuuuagcaccagcuuuuaucucauuagcaucuuccuccaccuggucaaaaucccaacccacagacacaucauagggaaacccugccccaaaccgcacagacucaaccacaugggcauaugcucauguggucuauacaaacauccugguguaccagucaaguggaaaagauaa

SEQ ID NO: 3970 - RNA, 1473 nt, Artificial Sequence
  derived and/or modified protein sequence (wt) from LASV(LASV978-NIG-2009;Clade II)__AIT17744__GPCstabilized
auggggcaaaucauaacauuuuuccaggaagugccucaugucauugaggaggugaugaacauugucuugauugcucucagccuucuagcaauacuaaaagggauuuacaauguugcuaccuguggccucuuuggguugauguccuuucuucucuuauguggaaggucaugcucaacaacuuacaaggguguuuaugagcuucaaacucuggagcuggauauggcaaaccuuaauaugacaaugcccuuauccugcacgaagaacaacagccaccacuacaucaugguuggaaaugagacuggcuuggagcugacuuuaacaaacacaaguaucaucaaccacaaguucugcaaccuuucugaugcacauaaaaagaaucucuaugaccaugcuuuaaugagcaucaucucaaccuuccaucuauccaucccuaacuuuaaucaguaugaagcaaugaguugugacuucaaugggggaaagauaaguguucaguacaaccucagccaugcuuaugcuguggaugcagcuaaccauugugggaccauugccaauggaguccuucaaacuuuuaugaggauggccugggguggcaguuacauagcacuugauucuggaugcgggaguugggauuguauuaugacguccuaccaauauuugauaauccaaaacaccaguugggaagaucacugccaguuuucucgcccguccccuaucgguuaucuggggcuacugucacaaagaaccagggacauuuacaucagccgaagacgccggggaacuuuuaccuggacucucucugauucugagggcaaugaaacaccggguggguauuguuuaacaagauggaugcugauugaggccgaauuaaagugcuuugggaacacagcaguugcgaaaugcaaugagaaacaugaugaagaguuuugugacauguuaagguuguuugacuuuaacaaacaggcuauaaggaggcuaaagacacccgcacagaugaguauccaacuaauaaacaaagcagugaacgcacugaucaaugaccagcucauuaugaagaaucauuuaagagauaucaugugcauuccuuacugcaauuacagcaaguauugguauuuaaaccacacuguaacagggaagacaucguugccaagaugcuggcuuguaucaaaugguuccuaccugaaugaaacacauuuuucugaugacauugagcaacaagcagacaacaugauaacagaauuguuacagaaagaguacauugacaggcaagggaaaacacccuuaggguugguggaucuuuuugucuucagcacuaguuucuaccuuauuagcaucuuccuccaccuggucaaaaucccaacccacagacaugucauagggaaacccugccccaagccacacagacucaaccacaugggcauaugcucauguggucuguacaaacauccugguguaccagucaaguggaaaagauag

SEQ ID NO: 3971 - RNA, 1473 nt, Artificial Sequence
  derived and/or modified protein sequence (wt) from LASV(LASV981-NIG-2009;Clade II)__AIT17752__GPCstabilized
augggacaaaucauaacauuuuuccaugaaguaccucaugucauagaggaaguaaugaacauuguucugauugcucucagccuucuggcaauacugaaagggaucuacaauguugcuaccuguggccucuuuggauugguauccuuucuccucuuauguggaagaucaugcucaacaacuuacaaggguguuuaugagcugcagacucuagagcuagacauggcaagccuuaauaugacaaugcccuuaucuugcacgaagaauaacucccaccauuacaucaugguuggaaaugagacuggcuuggagcugaccuuaacaaauacaagcauuaucaaccacaaguuuuguaaccuuucugaugcacauaaaaagaaucuuuaugaccaugcuuuaaugaguaucaucucaaccuuccacuuaucaauuccuaacuuuaaucaguaugaagcaaugaguugugacuucaaugggggaaagauaaguguucaguacaaucuuagccacacuuaugcuauagaugcagccaaccauugugggaccauugcuaauggcguucuucagacuuuuaugaggauggcuugggguggcaguuacauagcacuugauucuggaugcggaagcugggauugcauaaugacuuccuaccaauauuugauaauccaaaacaccacuugggaagaucacugccaguuuucucgcccauccccuaucgguuaucuggggcugcugucacaaaggaccagggacauuuacaucagucgaagacgccgggggaccuucacuuggacucucucugacuccgaagguaaugaaacaccggguggguauugucuaacaagauggaugcuaauugaggccgaguugaagugcuuugggaacacagcaguugcaaaaugcaaugagaaacaugaugaagaguuuugugacauguuaagauuguuugacuuuaacaaacaagcuauaaggaggcugaagacacccgcacagaugaguauccaacugauaaacaaagcaguaaacgcacugaucaaugaccagcugauuaugaagaaucauuugagagauaucaugugcauuccuuacugcaauuacagcaaauauugguaucuaaaucacacuguaacagggaagacaucguugccaagaugcuggcuugugucaaaugguuccuaucugaaugagacgcauuuuucugaugacauugaacaacaagcagacaacaugauaacagagcuauugcaaaaggaguacauagacaggcaaggaaaaacacccuuaggcuuaguagaucuuuuugucuucagcaccagcuuuuaucucauuagcaucuuucuccaccuggucaaaaucccaacccacagacaugucauagggaagcccugccccaaaccacacagacucaaccacaugggcauaugcucauguggucuguacaagcacccuggcgugccagucaaguggaaaagauag

SEQ ID NO: 3972 - RNA, 1473 nt, Artificial Sequence
  derived and/or modified protein sequence (wt) from LASV(LASV982-NIG-2009;Clade II)__AIT17756__GPCstabilized
auggggcaaaucauaacauuuuuucaggaagugccucaugucauagaagaagugaugaacauuguccugauugcccuuagccuucuggcaauauugaaagggaucuacaauguugcuacuuguggccucuuuggacugguguccuuucuucucuuauguggaagaucaugcuccauaacuuacaaagguguuuaugagcuacaaacucuagagcuagacauggcaagccuuaauaugacaaugcccuuaucuuguacaaagaauaauagccaccauuacaucauggucggaaaugaaacuggcuuagagcugacuuuaacaaauacaaguaucaucaaccacaaguuuuguaaccuuucugaugcacauaaaaagaaucuuuaugaccaugcuuuaaugagcaucaucucaaccuuccacuuauccauuccuaacuuuaaucaauaugaggcaaugagcugugacuucaauggggggaagauaaguguucaguacaaccuuagccacacuuaugcuguagaugcagcuaaccacugugggacuauugccaauggcguucuucagacuuucaugaggauggcuugggguggcagcuacauagcacuugauuccggaugcgggaguugggauuguauaaugacuuccuaccaauauuugauaauccagaacaccacuugggaagaucacugccaguuuucucgcccaucccccaucgguuaucugggacuacugucacaaaggaccagggacauuuacaucagucgaagacgccgggggacuuuuacuuggacccucucugauucugaaggcaaugaaacuccagguggguauugucugacaagguggauguugauugaggccgaguugaagugcuuugggaacacagcaguugcgaaaugcaaugaaaaacaugaugaagaguuuugugacaugcuaagauuguuugacuuuaacaaacaagcuauaaggaggcugaaagcacccgcacagaugaguauccaacuaauaaacaaagcagugaaugcacugauuaaugaccagcugauaaugaagaaucauuuaagagauaucaugugcauuccuuacugcaauuacagcaaguauugguaucugaaucacacuguaacagggaggacaucguuaccaagaugcuggcuugugucaaaugguuccuaccugaaugagacacauuuuucugaugacauugaacaacaagcagacaacaugauaacagaacuguugcagaaggaauacauagauaggcaagggaaaacaccuuuaggguuaguagaucuuuuugucuucagcaccagcuuuuaucucaucagcaucuuccuccaccugguuaaaaucccaacccacagacauaucauagggaaacccugcccuaaaccacauagacucaaccacaugggcauaugcucauguggucuguacaagcauccuggugugccagucaaguggaaaagauag

SEQ ID NO: 3973 - RNA, 1473 nt, Artificial Sequence
  derived and/or modified protein sequence (wt) from LASV(LASV988-NIG-2009;Clade II)__AIT17758__GPCstabilized
augggacaaaucauaacauuuuuccaggaaguaccucaugucauagaggaagugaugaacauuguccugauugcucucagccuucuggcaauacugaaagggaucuacaauguugcuaccuguggccucuuuggauugguguccuuucuccucuuauguggaagaucaugcucaacaacuuacaaggguguuuaugagcuacaaacucuagagcuaaacauggcaagccuuaauaugacgaugcccuuaucuugcacaaagaacaacagccaccauuacaucauggucggaaaugagacuggcuuggagcuaacuuuaacaaauacaaguauuauaaaccacaaguuuuguaaccuuucugaugcacauaaaaggaaucuuuaugaccaugcuuuaaugaguaucaucucaaccuuccacuuaucuauucccaauuuuaaucaguaugaagcaaugagcugugacuucaaugggggaaagauaaguguucaguacaaccuuagccacacuuaugcuguagaugcagccaagcacugugggacuaucgccaauggcguucuucagacuuuuaugaggauggcuugggguggcaguuacauagcacuugauuccggaugcgggaguugggauuguauaaugacuuccuaucaauauuugauaauccagaacaccaccugggaagaucacugcgaguuuucucgcccauccccuaucgguuaucuggggcuacugucacaaaggaccagggacauuuacaucagucgaagacgccgggggacuuuuacuuggacucucucugacucugaagguaaugaaacgccggguggguauugucuaacaagauggaugcugauugaggcugaauugaagugcuuugggaacacagcaguugcgaaaugcaaugagaaacaugaugaagaguuuugugacauguugagacuguuugacuuuaacaaacaagcuauaaggaggcugaaggcacccgcacagaugaguauccaacugauaaacaaagcagugaacgcacugaucaaugaccagcuuauuaugaagaaucacuugagagauaucaugugcauuccuuacugcaauuacagcaaguacugguaucuaaaucacacuguaacagggaagacaucguugccaaggugcuggcuugugucaaaugguuccuaccugaaugagacacauuuuucugaugacauugaacaacaagcagacaacaugauaacagaacuguugcaaaaggaauacauagacaggcaagggaaaacacccuuaggguuaguagaucuuuuugucuucagcaccagcuuuuaucucauuagcaucuuccuccaccuggucaaaaucccaacccacagacaugucauagggaaacccugcccuaaaccacacagacucaaccauaugggcauaugcucaugcggucuauacaagcauccuggugugccaguuaaguggaaaagauag

SEQ ID NO: 3974 - RNA, 1473 nt, Artificial Sequence
  derived and/or modified protein sequence (wt) from LASV(LASV989-NIG-2009;Clade II)__AIT17762__GPCstabilized
auggggcagaucauaacauucuuccaggaaguaccucaugucauagaggaagugaugaacauuguccugauugcccucagccuucuggcaauauugaaagggaucuacaauguugcuaccuguggccucuuuggacuaguguccuuucuucucuugugugggagaucaugcucaacaaccuacaaggguguuuaugagcuacaaacucuagagcuagacauggcaagccuuaauaugacaaugcccuuaucuugcacgaagaauaacagccaccauuacaucauggucggaaaugagacugguuuagagcugacuuuaacaaauacaaguaucaucagccacaaguuuuguaaccuuucugaugcacauaaaaagaaucuuuaugaccaugcuuuaaugaguaucaucucgacuuuccacuuauccauaccuaacuuuaaucaguaugaggcaaugaguugcgacuucaauggggggaagauaaguguucaauacaaccuuagccacacuuaugcuguagaugcagcuaaccauugugggacuauugccaaugguguucuucagacuuucaugaggauggccugggguggcaguuauauagcacuugacuccggaugcgggaguugggauuguauaaugacuuccuaccaguauuugauaauccagaacaccacuugggaagaccacugccaguuuucucgcccaucccccaucgguuaucuggggcuacugucacaaaggaccagggauauuuacaucagucggagacgccgggggacuuuuacuuggacucucucugauucugaaggcaaugaagcaccggguggguauugucugacaagauggaugcugauugaggccgaguugaagugcuucggaaacacagcaguugcgaaaugcaaugagaaacaugaugaagaauuuugugacauguuaagauuguuugacuuuaacaaacaagcuauaaggaggcugaagacacccgcacaaaugaguauccagcuaauaaacaaagcagugaacgcacugaucaaugaccaacugauuaugaagaaucacuugagagauaucaugugcauuccuuacugcaauuacagcagguauugguauuuaaaucauacuguaacagggaagacaucgcugccaagaugcuggcuugugucaaaugguuccuaccugaaugagacacauuuuucugacgacauugaacaacaggcagacaacaugauaacagaacuguugcagaaggaguacauggacaggcaaggaaaaacacccuugggguugguggaucuuuuugucuucagcaccagcuuuuaucucauuagcaucuuccuccaccugguuaaaaucccaacccacagacaugucauagggaaacccugcccuaaaccacacagacucaaccacaugggcauaugcucauguggucuguacaaacauccugguguaccagucaaguggaaaagauag

SEQ ID NO: 3975 - RNA, 1473 nt, Artificial Sequence
  derived and/or modified protein sequence (wt) from LASV(LASV991-NIG-2009;Clade II)__AIT17770__GPCstabilized
augggacaaauuguaacauuuuuccaggaaguaccucaugucauagaggaagugaugaacauuguccugauugcucucagccuucuagcaauacugaaagggaucuacaauguugcuaccuguggccucuuuggauugguguccuuucuccuuuuauguggaagaucaugcucaacaacuuacaaggguguuuaugagcuacaagcuuuggagcuagacaugucaagccuuaauaugacaaugcccuugucuugcacgaagaacaacagccaccauuacaucauggucggaaaugagaccggcuuggagcugacuuuaacaaacacaaguauuauccaccacaaguuuuguaaccuuucugaugcacauaaaaaggaucuuuaugaccaugcuuuaaugaguaucaucucaaccuuccacuuauccauuccuaacuuuaaucaguaugaagcaaugaguugugacuucaauggggggaagauaaguguucaguacaaccuuagccacacuuaugcuguagaugcagccaaccacugugggaccauugccaauggcguucuucagacuuuuaugaggauggcuugggguggcaguuacauagcacuugauuccgggugcggagguugggauugcauaaugacuuccuaccaauuuuugauaauccaaaacaccaccugggaagaucacugccaguuuucucgcccaucccccauugguuaucuggggcugcugucacaaaggaccagggacauuuauaucagucgaagacgccggggaacuuuuacuuggacucucuccgauucugaagguaaugaaacaccggguggguauugucugacaagauggaugcugauugaggccgaguugaagugcuuugggaacacagcaguugcgaaaugcaacgagaaacaugaugaagaguuuugugacauguuaagauuguuugacuuuaacaagcaagcuauaaagaggcugaaaacacccgcacagaugaguauccaucugauaaacaaagcagugaacgcacugaucaaugaccagcugauuaugaagaaucauuugagagauauuaugugcaucccuuacugcaauuacagcaaguauugguaucuaaaucacacuguuacagggaagacaucguugccaagaugcuggcuugugucaaaugguuccuaccugaaugagacacauuuuucugaugacauugaacaacaagcagacaacaugauaacagaacuguugcaaaaggaguacauagauaggcaagggaaaacacccuuaggguuaguagaucuuuuugucuucagcaccagcuuuuaucuuauuagcaucuuccuccaccuaguuaaaauuccaacccacagacauguuauagggaaacccugcccuaaaccacauagacucaaccacaugggcauaugcucauguggucuguacaaacauccugguguaccagucagguggaaaagauag

SEQ ID NO: 3976 - RNA, 1473 nt, Artificial Sequence
  derived and/or modified protein sequence (wt) from LASV(LASV993-NIG-2009;Clade II)__AIT17778__GPCstabilized
augggacaaaucauaacauuuuuccaggaagugccucaugucauagaagaagugaugaacauuguccugauugcccucagccuucuggcaauauugaaagggaucuacaauguugcuaccuguggccucuuuggauugguguccuuccuucucuuauguggaagaucaugcucaacaacuuacaaagguguuuaugagcuacaaacucuagagcuagacauggcaaaccuuaauaugacaaugcccuuaucuugcacaaagaauaacagccaccauuacaucauggucggaaaugagacuggcuuagagcugacuuuaacaaauacaaguaucaucaaccacaaguucuguaaccuuucugaugcacauaaaaagaaucuuuaugaccaugcuuuaaugaguaucauuucaaccuuccacuuauccauuccuaacuuuaaucaguaugaagcaaugaguugugacuucaauggggggaagauaaguguucaguacaaccuuagccacacuuaugcuagagaugcagcuaaccacugugguacuauugcuaauggcguucuccagacuuucaugaggauggcuugggguggcaguuacauagcacuugauuccggaugcgggagcugggauugcauaaugacuuccuaccaauauuugauaauccagaacaccacuugggaagaucacugccaguuuucucgcccaucccccaucgguuaucuggggcugcugucacaaaggaccagggacauuuacaucagucgaagacgccgggggacuuuuacuuggacccucucugauucugaaggcaaugaaacaccggguggguauugucuaacaagauggaugcugauugaggccgaauugaagugcuuugggaacacagcaguugcgaaaugcaaugagaaacaugaugaggaguucugugacauguugagauuguuugacuuuaacaaacaagcuauaaggagacugaagacacccgcacagaugaauauccaacugauaaacaaagcagugaacgcacugaucaaugaccagcugauuaugaagaaucauuuaagagauaucaugugcauuccuuacugcaauuacagcaaguauugguauuuaaaucacacugugacagggaagacaucguugccaagaugcuggcuugugucaaaugguuccuaccugaaugaaacacauuuuucugaugacauugaacaacaagcagacaacaugauaacagaacuguugcagaaggaguacauggacaggcaagggaaaacacccuuaggguuaguagaucuuuuugucuucagcaccaguuucuaucucauuagcaucuuucuccaccuaguuaagaucccaacucacagacaugucauaggaaaacccugcccuaaaccacacagacuuaaccacaugggcauaugcucauguggucuguacaaacauccugguguaccagucaaauggaaaagauag

SEQ ID NO: 3977 - RNA, 1473 nt, Artificial Sequence
  derived and/or modified protein sequence (wt) from LASV(Nig08-04;Clade II)__ADU56610__GPCstabilized
augggacaaauaguaacauucuuucaggaaguuccucaugucauagaagagguaaugaauauuguccuaauugcucuuagucuccuggcgauacugaaggggauuuacaauguugccacuuguggccuuuuugggcugaucuccuuucuucuucuguguggaagaucaugcucaacaaccuacaaaggugucuaugagcuacaaacucuggaguuggacauggcaaaccucaacaugacuaugccucuaucuuguacaaaaaacagcagccaucacuauaucaugguugggaaugaaacaggccuagaacugaccuugacaaacacaaguauaaucaaucacaaguucugcaaccuuucugaugcacacaagaagaaucuuuaugaucaugccuugaugagcaucauuucaacuuuccacuuauccauuccaaauuucaaucaguaugaagcaaugaguugugacuuuaauggagggaaaauaagugugcaauacaaucucagucaugcuuaugcuguagaugcagccaaccacugugggaccauugccaacgguguccuacagacuuucaugagaauggcuuggggcggcaguuacauagcacuugauucuggaugcgggaacugggauugcauaaugacuuccuaucaguacuugauuauccaaaacaccaccugggaagaucacugucaguuuucccgcccguccccuauuggauaccuaggacuguuaucacaaaggacuagagauauuuacauuagucggagacgccggggaacuuucaccuggacccucucugacucugagggcaaugaggcacccgguggauacugccuuacuagauggaugcuaauugaagcugaauugaagugcuuugggaacacagccauugcgaaguguaaugagaagcacgaugaggaauucugugacauguugagacuuuucgacuucaacaaacaagccauaaaaaggcuaaaagcacccgcacagaugagcauccaauugauaaauaaagcaguaaaugcacuaaucaaugaccaauugaucaugaagaaccacuugagggauaucaugugcauucccuauugcaauuacagcaaguacugguaucugaaccauacugugacagggaaaacaucauugccaagguguuggcuuauuucaaaugguucuuaccuaaaugagacacauuucuccgaugauauugaacagcaagcagauaacaugauaacagaacugcugcaaaaggaguauauggacaggcaggggaaaacacccuuaggguuaguggaucuuuuuguuuucagcacuagcuuuuaucucauaaguaucuuccuccacuuagucaaaaucccgacccauaggcacauuguagggagaccuugccccaagccacacagacucaaccacaugggcauaugcucaugugguuuguacaaacauccugguguaccagucaaguggaagagauag

SEQ ID NO: 3978 - RNA, 1473 nt, Artificial Sequence
  derived and/or modified protein sequence (wt) from LASV(Nig08-A41;Clade II)__ADU56626__GPCstabilized
augggacaaaucauaacauuuuuccaggaagugccucaugucauagaggaagugaugaacauuguccugauugcucucagccuucuggcaauacugaaagggaucuacaauguugcuaccugcggccucuuuggauugguguccuuucuccucuuauguggaagaucaugcucaacaaccuacaagggugucuaugagcuacaaacucuagagcuaaacauggcaagccuuaauaugacaaugcccuuaucuugcacaaagaacaacagccaccauuacaucauggucggaaaugagacuggcuuggagcuaacuuuaacaaauacaaguauuaucaaucacaaguuuuguaaccuuucugaugcacauaaaaggaaucucuaugaccaugcuuuaaugaguaucauuucaaccuuccacuuaucuauucccaauuuuaaucaguaugaagcaaugagcugugacuucaauggggggaagauaaguguucaauacaaccuuagccacacuuaugcuguagaugcagccaagcacugugggacuaucgccaauggcguucuucagacuuuuaugaggauggcuugggguggcaguuacauagcacuugauuccggaugcgggaguugggauuguauaaugacuuccuaucaauauuugauaauccaaaacaccaccugggaagaucacugccaguuuucucgcccauccccuaucgguuaucuggggcuacugucacaaaggaccagggacauuuacaucagucgaagacgccgggggacuuucacuuggacucucucugacucugaagguaaugaaacgccggguggguauugucuaacaagauggaugcugauugaggcugaauugaagugcuuugggaacacagcaguugcgaaaugcaaugagaaacaugaugaagaguuuugugacauguugagacuguuugacuuuaauaaacaagcuauaaggaggcugaaggcacccgcacagaugaguauccaacugauaaacaaagcagugaacgcacugaucaaugaccagcuuauuaugaagaaucacuugagagauaucaugugcauuccuuacugcaauuacagcaaguacugguaucuaaaucacacuguaacagggaagacaucguugccaaggugcuggcuugugucaaaugguuccuaccugaaugagacacauuuuucugaugacauugaacaacaagcagacaacaugauaacagaacuguugcaaaaggaauacauagacaggcaagggaaaacacccuuaggguugguagaucuuuuugucuucagcaccagcuuuuaucucauuagcaucuuccuccaccuggucaaaaucccaacccacagacaugucauagggaaacccugcccuaaaccacacagacucaaccauaugggcauaugcucauguggucuauacaagcauccuggugugccagucaaguggaaaagauag

SEQ ID NO: 3979 - RNA, 1473 nt, Artificial Sequence
  derived and/or modified protein sequence (wt) from LASV(Nig08-A47;Clade II)__ADU56630__GPCstabilized
auggggcaaaucauaacauuuuuccaggaaguaccucaugucauagaagaagugaugaacauuguccugauugcccucagccuucuggcaauauugaaagggaucuacaauguugcuaccuguggccucuuuggauugguguccuuucuucucuuguguggaagaucgugcucaacaacuuacaaagguguuuaugagcuacaaacucuagagcuagacauggcaagccuuaauaugacaaugcccuuaucuugcacaaagaauaacagccaccauuacaucauggucggaaaugagacuggcuuagagcugaccuuaacaaauacaaguaucaucaaucacaaauuuuguaaccuuucugaugcacauaaaaagaaucuuuaugaccaugcuuuaaugaguaucaucucaaccuuucauuuauccauuccuaacuuuaaucaguaugaagcaaugaguugugacuucaauggggggaagauaaguguucaguacaaccuuagccacgcuuaugcuguagaugcagcuaaccauugugggacuauugccaauggcguucuucagacuuucaugaggauggcuugggguggcaguuacauagcacuugauuccggaugcgggaguugggauuguauaaugacuuccuaccaauauuugauaauccagaacaccacuugggaagaucacugccaguuuucacgcccaucccccaucgguuaucuggggcuacugucacaaaggaccagggacauuuacaucagucgaagacgccgggggacuuuuacuuggacccucucugauucugaaggcaaugaaacaccggguggguauugucuaacaagauggaugcugauugaggccgaguugaagugcuuuggaaacacagcaguugcgaaaugcaaugagaaacaugaugaagaguucugugacauguuaagauuguuugacuucaacaaacaagcuauaaggaggcugaagacacccgcacagaugaguauccaauugauaaacaaagcagugaacgcacugaucaaugaccagcugauuaugaagaaucauuuaagagauaucaugugcauuccuuacugcaauuacagcaaguauugguauuuaaaucacacugugacagggaagacaucguugccaagaugcuggcuugugucaaaugguuccuaccugaaugagacacauuuuucugaugacauugaacaacaagcagacaacaugauaacagaacugcugcagaaggaguacauggacaggcaagggaaaacacccuuaggguugguagaucuuuuugucuucagcaccaguuuuuaucucauuagcaucuuccuucaccuggucagaaucccaacucacagacaugucauagggaaacccugcccuaaaccacacagacucaaccacaugggcauauguucauguggucuguacaaacauccugguguaccagucaaauggaaaagauag

SEQ ID NO: 3980 - RNA, 1473 nt, Artificial Sequence
  derived and/or modified protein sequence (wt) from LASV(CSF;Clade III)__AAL13212__GPCstabilized
augggucagauagugacauucuuucaggaaguuccucaugucauugaggaaauuaugaacauuguccucaucaccuuaucucugcuugcaaucuugaaggguguguacaauuuggccacguguggccuuauuggucugauaacauuccuuuuccucuguggaaggucauguucgaugaccuacaaagggaguuaucaacuugaaacccuugagcugaacauggagacgcuuaacaugacuaugccucuguccugcacaaaaaauacuagucaccacuacauaaggguggguaaugaaacagggcuugagcugaccuuaaccaauacaagcaucauaaaccacaaguucugcaaucucucugaugcacacaaaaagaaucucuacgaccacucucucaugagcauuaucucuaccuuucaucuguccaucccuaacuuuaaucaguaugaagccaugaguugugacuucaauggagguaagauuagcauccaauacaauuugagccacaccuaugcaggagaugcagccaaacauuguggcacuuuggcaaaugguauacugcaaaccuucaugaggauggcuuggggugggaguuacauugcacuugacucagguugcggaaacugggauuguauaaugacuagcuaccaauacuuaaucauucagaauacaaccugggaggaccauugucaauuuucaagaccaucacccauuggcuaucuugggcuccucucucaaaggaccagagaaauuuacaucaguagaagacgccggggaacauuuacauggacauugucagauucugaaggcaaugaaaauccaggggguuacugcuuaaccagauggauguuaauugaagcugaacugaaauguuuugggaauacugcaguagcuaaaugcaaugagaaacaugaugaggaauuuugugacaugcugaggcuuuuugauuucaacaaacaagccauucagagauugaaggcucccgcucaaaugaguauucagcuuauuaacaaagcagucaaugcccucauaaaugaccagcuuauaaugaaaaaucaucucagagacauuaugugcauaccauauugcaacuauagcaaauauugguaucuuaaucauacgaccacggguagaacuucacuaccaagaugcuggcuuguaucaaacggguccuaucucaaugaaacucguuucucagacgacauagaacaacaagcugacaacaugauaacagaaauguugcagaaagaguacaucgauagacaaggaaagaccccacuaggcuugguugacuuguuuguguucagcacaagcuucuauuugaucaguauuuuucuacacuuaaucaagauaccaacucauagacacauuguaggugggccaugccccaaaccucacaggcuaaaccacaagggcauuugcucuugugggcuauauaaacggccaggagugucugugagguggaagagauaa

SEQ ID NO: 3981 - RNA, 1473 nt, Artificial Sequence
  derived and/or modified protein sequence (wt) from LASV(ISTH2121-NIG-2012;Clade III)__AIT17540__GPCstabilized
augggacaaauagugacauucuuucaagaaguuccucaugucauugaggaaauuaugaacauuguccucaucacuuugucucuacuugcaauucuuaaggggauauacaacuuugccacauguggucuuauuggucugaucacauuccucuuucuuuguggaaggucauguucaacaaucuacaaaggaagcuaucaacuccagacacuugagcuaaacauggaaacacucaauaugaccaugccuuuauccuguacaaaaaacaacagucaccacuauauaagagugggcaaugagacaggacuggaauuaaccuuaacuaacacaagcaucauaaaccauaaguucugcaaucuuucugaagcacacaaaaagaaucucuaugaccaugcccucaugagcaucaucuccaccuuccauuugucuauucccaauuucaaucaguaugaagcaaugaguugugacuucaauggaggcaagaucagcguucaguacaaucuaagucauaguuaugcaguggaugcagccaaucauugcggcacuguagcaaauggugugcugcagacuuuuaugaggauggccugggguggaagcuacaucgcacuugauucaggcugcggaaauugggacugcauaaugacaagcuaccaauacuuaaucauucagaauacgacaugggaagaccacugucaguucucaagaccaucucccauugguuaucuuggacuucuaucacaaagaaccagagauauuuacaucagcagaagacgccggggaacguuuacauggacacuaucagauucugaagguaaagaaaccccaggaggcuacugcuuaacuagauggauguuaauugaagcugaguuaaaguguuucgggaacacugcgguggcuaaaugcaaugagaaacaugaugaggaauuuugugauaugcugaggcuuuuugacuucaacaagcaagccauucagagguugaagacucccgcacagaugagcauucagcuuaucaacaaagcagucaacgcucuuauuaaugaccagcuuauaaugaaaaaccaccucagagacaucaugugcauaccauauuguaauuacaguaaauacugguaucuuaaucauacauccacaggcaggaccucacuaccaaaauguuggcuugugucaaauggauccuaccucaaugagacucauuuuucagaugauauagaacaacaagccgacaauaugauaacggagauguuacagaaggaguacauagauaggcaagggaagaccccacuuggauugguugacuuauuuguauucagcacuaguuucuaccucaucaguauuuuccuucauuugguuaagaucccaacucauaggcacauugugggcaaaucaugucccaaaccucacaggcuaaaccauaugggcaucuguuccuguggacuguacaaacagccagggguaccugugaaguggaagagauaa

SEQ ID NO: 3982 - RNA, 1473 nt, Artificial Sequence
  derived and/or modified protein sequence (wt) from LASV(Nig08-A19;Clade III)__ADU56618__GPCstabilized
augggacaaauugugacauucuuccaggaagucccucauguuaucgaggaagugaugaauaucguccucauagcauugucaauuuuggcaauccuaaaaggacucuacaacauugcuacauguggcuugauaggccuugucacauuccucuuacuuucuggaaggucauguucaaugaccuacaaaggaguuuaugaacuacagacccuugaacugaacaugaacacucugaauaugacuaugccgcuaucuuguacaaagaacaauagucaccacuacaucauggugggaaacgagacagggcuugagcucaccuuaaccaacacaagcuugcuccaucacaaauucugcaaccuaucagaugcucauaagaaaaaucuuuaugaucacacucucaugagcauuaucuccacauuccauuuguccauuccuaacuuuaaucaguaugaggcaaugaguugugauuuuaaugguggcaagaucacugugcaauacaaucugagucauagcuaugcaauugaugcagcaaaccauuguggcacaguggcaaacgguguguugcaaacauuuaugaggauggcuuggggagguaguuacauugcccuugauuccggaugcgggaaaugggauuguauaaugaccaguuaucaauacuuaaucauccagaacacaaccugggaagaucauugucaauuuuccagaccauccccaauuggauaucuugggcuccucucacagagaacuagagacauauacauuaguagaagacgccggggaacauuuacuuggacacuuucugacucagaaggaaaugagacaccaggagguuacugucucacuagauggauguugauugaggcugaacuaaaguguuucgggaauacagcuguagcuaagugcaaugaaaaacacgaugaagaguuuugugacaugcuaaggcuauuugacuucaauaagcaagcuauaaggagguuaaaggcacccgcccaaaugagcauacagcugaucaacaaagcaguuaaugcucuaauaaacgaucagcugaucaugaagaaucaucuaagggacaucaugugcauaccauacugcaauuacagcaaguacugguaucucaaucacaccucaacagggaggaccucauuaccgagauguuggcuuguuucaaaugggucauaucucaaugaaacucacuuuucagaugacauugagcagcaagcugauaacaugauaacugaaauguugcaaaaagaauaccuggacagacaaggaaagaccccauugggauugguagaucuuuuugucuucaguacaaguuuuuacuuaaucaguauuuuccuccaucuggucaaaauaccaacccauagacacauuguagggaagccuugccccaaaccucauagguugaaccacaugggcaucugcucuuguggucuauauaaacagccaggaguacccguuagauggaagagauaa

SEQ ID NO: 3983 - RNA, 1473 nt, Artificial Sequence
  derived and/or modified protein sequence (wt) from LASV(ONM-299;Clade III)__ANH09734__GPCstabilized
auggggcagauagugacauucuuccaagaaguuccucaugucauugaggaaaucaugaacaucguucuaaucacuuugucccuacuugcaaucuugaagggacuguacaacuuugcuacauguggccucauuggauugauaacauuccuuuuccucugugggagaucaugcucgaugauuuacaaaggaagcuaucaacuugaaacccuugaguugaacauggagacacuuaacaugaccaugcccuuauccugcacaaaaaacaacagucaccacuauauaagaguggguaaugaaacagggcucgaauugacucuaaccaacacaagcauuauaggccacaaguuuugcaaucuuucugaugcacacaaaaagaaccuuuaugaucauucucucaugagcaucaucuccacuuuucaccugucuauccccaacuucaaucaauaugaggccaugagcugugacuucaauggggguaaaaucagcauucaguacaaccuaagucacacauaugcaggggaugcagcuaagcauuguggcacuguagcaaaugguguguugcaaaccuucaugagaauggcuuggggcgggaguuauauugcacuugacucaggcugcgggaauugggacugcauaaugaccagcuaccaauacuuaaucauucagaacacgaccugggaggaccacugucaguucucuagaccaucaccuauugguuaucuugggcuucucucccaaaggacuagagacauuuacauuagcaggagacgccgggggacauucacauggacgcuaucagacucugaaggcaaagaaaccccaggagguuacugcuuaaccagauggaugcuaauugaagcugaacugaaauguuuuggaaacaccgcaguagccaaaugcaaugaaaaacaugaugaagaguuuugugacaugcugaggcucuuugacuuuaacaagcaagccauucagagauugaaaacucccgcucagaugagcauucagcucauuaauaaagcagugaaugcucucauaaaugaccagcuuauaaugaaaaaccaucuucgagacauuaugugcauaccauacugcaauuacaguaaauacugguaucucaaccacacgucuacaggcagaacuucacuaccaaagugcuggcuuguuucaaauggauccuaucucaaugaaacucacuuuucagaugauauagagcaacaagcugacaauaugauaacggaaauguuacagaaggaauacauugauagacaggggaagacuccacucggacuaguugacguguuuguguucaguacaagcuucuauuugaucagcauuuuccuucaucuaguuaaaauaccaacucauaggcacauugugggcaaaucaugucccaaaccccauagacuaaaucacauggguauuuguucuugugggcuguacaaacaaccaggaguaccugugagauggaagagauga

SEQ ID NO: 3984 - RNA, 1473 nt, Artificial Sequence
  derived and/or modified protein sequence (wt) from LASV(ONM-700;Clade III)__ANH09738__GPCstabilized
auggggcagauagugacauucuuccaagaaguuccucaugucauugaggaaaucaugaacaucguucuaaucacuuugucccuacuugcaaucuugaagggacuguacaacuuugcuacguguggucucauuggauugauaacauuccuuuuccucugugggagaucaugcucgaugauuuacaaaggaagcuaucaacuugaaacccuugaguugaacauggagacacuuaacaugaccaugcccuuauccugcacaaaaaacaacagucaccacuauauaagaguggguaaugaaacagggcucgaauugacucuaaccaacacaagcauuauaaaccacaaguuuugcaaucuuucugaugcacacaaaaggaaccuuuaugaucauucucucaugagcaucaucuccacuuuucaccugucuauccccaacuucaaucaauaugaggccaugagcugugacuucaauggggguaaaaucagcauucaguacaaccuaagucacacauaugcaggggaugcagcuaagcauuguggcacuguagcaaaugguguguugcaaaccuucaugagaauggcuuggggcgggaguuauauugcacuugacucaggcugcgggaauugggacugcauaaugaccagcuaccaauacuuaaucauucaaaacacgaccugggaggaccacugucaguucucuagaccaucaccuauugguuaucuugggcuucucucccaaaggacuagagacauuuacauuagcaggagacgccgggggacauucacauggacgcuaucagacucugaaggcaaagaaaccccaggagguuacugcuuaaccagauggaugcuaauugaagcugaacugaaauguuuuggaaacaccgcaguagccaaaugcaaugaaaaacaugaugaagaguuuugugacaugcugaggcucuuugacuuuaacaagcaagccauucagagauugaaaacucccgcucagaugagcauucagcucauuaauaaagcagugaaugcucucauaaaugaccagcuuauaaugaaaaaccaucuucgagacauuaugugcauaccauacugcaauuacaguaaauacugguaucucaaccacacgucuacaggcagaacuucacuaccaaagugcuggcuuguuucaaauggauccuaucucaaugaaacucacuuuucagaugauauagagcaacaagcugacaauaugauaacggaaauguuacagaaggaauacauugauagacaggggaagacuccacucggacuaguugacguguuuauguucaguacaagcuucuauuugaucagcauuuuccuucaucuaguuaaaauaccaacucauaggcacauugugggcaaaucaugucccaaaccccauagacuaaaucacauggguauuuguucuugugggcuguacaaacaaccaggaguaccugugagauggaagagauaa

SEQ ID NO: 3985 - RNA, 1473 nt, Artificial Sequence
  derived and/or modified protein sequence (wt) from LASV(Weller;Clade III)__AAT49010__GPCstabilized
augggacagauugugacauucuuccaagaagucccucaugucauugaggagguaaugaacaucguccucauagcauuguccguuuuggcaauuuuaaaggggcucuacaacuuugccacaugcggcuugauaggccuuguaacauuccuccuacuuucugggaggucaugcucaaugaucuacaaaggaguuuaugaacuacagacccuugaauugaacauggagacauugaacaugacuaugccauuguccugcacaaagaacaccagucaucauuacauccgugugggaaaugauacaggacuugaacucacccugaccaacgaaacuuuacuccaccauaaguucugcaaccucucagaugcucauaagagaaaucuuuaugaucaugcccucaugagcaucauuucuacuuuccaucuauccauccccaacuuuaaccaauaugaagcaaugaguugugacuuuaauggugggaagaucacagugcaauacaaccuaagucacaguuaugcaguugaugcagcaaaacacugcggcacaguagcaaaugguguguugcagacauuuaugagaauggcuuggggaggcagcuauauugcccuugauucuagaugcgggaacugggacuguauaaugaccaguuaucaauacuuaauuauccagaauacaacuugggaagaccacugccaguucuccagaccaucuccuauugguuaucucgggcuccucucacaaagaaccagggacauuuacauuaguaggagacgccggggaacguuuacuuggacacucucugacucugaaggaaaugagacgccaggaggauacugucucaccagguggauguuaauugaggcugagcugaaguguuuuggaaacacagcaguugccaagugcaaugaaaaacaugaugaagaguuuugugacaugcuaagacuauuugacuuuaacaaacaagccauuaggagguuaaagacacccgcccaaaugaguauacaauugaucaacaaagcagucaaugccuuaauaaaugaucaguugauuaugaagaaucaucugagagauauuaugugcauaccauacugcaauuacaguaaauauugguaccucaaucacacaucaacagggaagacuucauugccuagauguuggcuuguuucaaacgggucauaccuuaaugaaacucacuucucugaugauauugaacaacaagcugauaacaugauaacugagaugcugcaaaaggaauaccuagauagacaagggaagaccccuuuaggguuaguugaucuuuuugucuuuagcacaaguuuuuauuugaucaguaucuuccuccaucugaucaaaauaccaacccauaggcacauuguggggaaaccuugccccaaaccccacaggcugaaucacaugggcaucugcucuugugguuuauacaaacagccaggggugcccgucagauggaagagauaa

SEQ ID NO: 3986 - RNA, 1476 nt, Artificial Sequence
  derived and/or modified protein sequence (wt) from LASV(BA366;Clade IV)__ADI39451__GPCstabilized
augggacagauugugacauucuuccaagaggugccucaugugauagaggaggugaugaacauugugcucauugcauugucugugcuugcaguacugaaaggccuguacaauguagcaacauguggccucauuggccucauugccuuucuucuacuuuguggcagauccuguacaacaacccuuuauaaggggguguaugaacuucaagcucuggaauugaacauggaaacacucaacaugaccaugccucucuccugcacaaaaaacaacagucaccauuauauaauggugggcaaugagacaggauuggaauugacuuugaccaacacaagcauuaucaaccacaaguucuguaaccucucugaugcucacaaaaagaaucuuuacgaucacgcucucaugagcauaaucucaacuuuccacuuguccauucccaacuucaaucaguaugaggcaaugaguugugacuucaaugggggaaagaucagugugcaguacaaucugagucacacuuaugcuguggacgcagccaaucauuguggcacagucgcuaaugguguuuugcagaccuuuaugaggauggccuggggugggagcuauauugcucuugacucaggcugcgguaguugggacugcauuaugaccaguuaucaguauuugauaauucaaaacacaaccugggaagaccacugucaauucucaagaccaucccccauugguuaucuugggcuccuaucacagagaacaagagauaucuacauuaguaggagacgccggggcacauucaccuggacauugucagauucugaaggcaaagauacaccaggaggauacugcuugaccagguggauguugauugaggcugaguugaaaugcuuugguaacacagcuguggcaaaaugcaaugaaaaacacgaugaagaauucugugacaugcuuagguuguuugauuucaacaagcaagccauucaaagauugaaagcucccgcacaaaugagcauacaauuaauuaacaaagcagugaaugcucuaauaaaugaccagcuaauuaugaagaaucauuugcgugacaucaugugcauaccauacuguaauuauaguaaguauugguaucucaaucacacaaucacugggaggacuucccuaccaaaaugcuggcuuguguccaaugguucauaccugaaugaaacucacuucucugaugauauagagcagcaagcugacaauaugaucacugaaaugcugcaaaaggaauauauagagagacaggggaagacaccauuaggucuaguugaccucuuuguguuuagcacgaguuuuuaucucauaaguauuuuccuacacuuaaucaagauaccaacucauagacacauugugaacaaaccguguccuaaaccccacaggcugaaucacauggguguguguucaugcggucucuacaagcagccuggcguuccugugagauggaagagauga

SEQ ID NO: 3987 - RNA, 1476 nt, Artificial Sequence
  derived and/or modified protein sequence (wt) from LASV(G1180-SLE-2010;Clade IV)__AIT17168__GPCstabilized
augggacagauagugacauucuuccaggaagugccucauguaauagaagaggugaugaacauuguucucauugcacugucuauacuagcagugcugaaaggucuguacaauuuugcaacauguggccucguuggucuacucacuuuccuccuguuguguggcagaucuugcacagcuagucguuacaaagggguuuaugagcuucagacucuggaacuaaacauggagacacucaauaugaccaugccucucuccugcacaaagaacaacagucaucauuauauaaugguggguaaugagacaggacuagaacugacuuugacuaacacgagcaucauuaaucauaaauuuugcaaucugucugaugcccacaaaaagaaccuuuaugaccacgcucuuaugagcauaauuucaacuuuccacuuauccauccccaacuucaaucaguaugaggcaaugagcugcgauuuuaaugggggaaagauuagugugcaguacaaccugagucacagcuaugcuggggaugcagccaaucauugugguacuguugcaaauggugucuugcagaccuucaugaggauggcuuggggugggagcuacauugcucuugacucaggcugcggcaguugggacuguauuaugacuaguuaucaauaucugauaauccaaaauacaaccugggaagaucacugccaguucucaagaccaucucccauugguuaucucgggcuccuuucacaaagaaccagagauauuuacauuaguagaagacgccggggcacauucacauggacacugucagauucugaaggcaaggacacaccagggggauauugucugaccagauggaugcuaauugaagcugaacuaaaaugcuucgggaacacagcuguggcaaaauguaaugagaagcaugaugaggaauuuugugacaugcugaggcuguuugacuucaacaaacaagccauucaaagguugaaagcucccgcacaaaugagcauucaauugaucaacaaggcaguaaaugcuuugauaaaugaccaacuuauaaugaagaaccauuuacgagacaucaugugcaucccauacuguaauuacagcaaguauugguaccucaaccacacaaccacugggaaaacaucacugccuaaguguuggcuuguaucaaaugguucauacuuaaaugagacccacuuuucugaugauauugagcaacaagcugacaacaugaucacugagauguuacagaaggaguauauggaaaggcagggcaagacaccauugggccuaguugaccucuuuguguuuagcacaaguuucuaucucauuagcaucuuccuucaccuggucaaaauaccaacucauaggcauauuguaggcaagucgugucccaaaccucauagauugaaucacaugggcauauguuccuguggacucuacaaacagcccggugugccugugaaauggaagagauga

SEQ ID NO: 3988 - RNA, 1476 nt, Artificial Sequence
  derived and/or modified protein sequence (wt) from LASV(G1190-SLE-2010;Clade IV)__AIT17172__GPCstabilized
augggacaaauagugacauucuuccaggaagugccccaugucauagaagaggugaugaacaucguucucauugcacugucuauacuagcaguguugaaagguuuguacaauuuugcaacauguggccucguuggcuuggucacuuuccuccuguuguguggcaggucuugcacaacuagccuuuacaaggggguuuaugagcuucagacucuggaacuaaacauggaaacacucaauaugaccaugccucucuccugcacaaagaacaauagucaucauuauauaauggugggcaaugagacaggacuagaacugaccuugaccaacacgagcauuauuaaccauaaauuuugcaaucugucugaugcccacaaaaagaaccucuaugaccacgcucuuaugagcauuaucucaacuuuccacuuguccaucccuaacuucaaucaguaugaggcaaugagcugcgauuucaaugggggaaagauuaguguacaguacaaccugagccacagcuaugccggggacgcagccaaccauuguggcacuguugcaaaugguguauuacagacuuucaugaggauggcuuggggugggagcuacaucgcucuugacucaggcugcggcaggugggacuguauuaugacuaguuaucaauaucugauaauccaaaauacaaccugggaagaucacugccaauucucgagaccaucucccaucgguuaucucgggcuccuuucacaaaggaccagagauauuuauauuaguagaaggcgccggggcacauucacauggacacugucagauucugaaggcaaggacacaccagggggauauugucuaaccagauggaugcuaauugaggcugaguuaaagugcuucgggaacacagcuguggcaaaauguaaugagaagcaugaugaggaauuuugugacaugcugagguuauuugacuuuaacaaacaagccauucaaagguugaaagcucccgcacaaaugagcauucaguugaucaacaaagcaguaaaugcuuugauaaaugaccaacuuauaaugaagaaccaucuacgggacaucaugugcauuccauauuguaauuacagcaaguauugguaccucaaccacacaacuacuggaaaaacaucacugcccaaguguuggcuuguaucaaaugguucauaccugaacgagacccacuuuucugaugacauugaacaacaagcugacaacaugaucacugagauguuacagaaggaguauauggagaggcaggggaagacaccauugggucugguugaccucuuuguguucagcacaagcuucuaucucauuagcaucuuccuucaccuaguuaaaauaccaacucauaggcauauuguaggcaagccgugucccagaccucacagguugaaucauaugggcauuuguuccuguggacucuauaaacagccuggugugccuguaaaauggaagagauga

SEQ ID NO: 3989 - RNA, 1476 nt, Artificial Sequence
  derived and/or modified protein sequence (wt) from LASV(G1200-LIB-2010;Clade IV)__AIT17176__GPCstabilized
auggggcagauagucacguuuuuccaagaagugccucauguuauagaggaagugaugaacauugugcucauugcacugucuuugcuagcagugcugaaaggcuuguacaauguugcaacauguggucucauugguuugaucaccuuccuuuuguugugugguaggucuuguacaaccaaucuuuacaagggagucuaugagcuucaagcccuggaauuaaacauggagacgcucaacaugaccaugccucucuccugcacaaagaacaauagucaccacuauauaaugguaggcaaugaaacaggauuggagcugaccuuaaccaacacaagcauuaucaaucacaaguuuugcaaccugucugaugcccacaaaaagaaccucuaugaucacgccuuaaugagcauaaucucaacuuuccacuuauccauuccuaacuuuaaucaguaugaagcaaugagcugcgauuucaaugggggaaggaucagugugcaguauaaccuaagucacagcuaugcuggggaugcagccagccauugugguacaauugcgaaugguguuuugcagacuuuuaugaggauggcuuggggugggaguuauauugcucuugauucaggcugcgguggaugggacugcaucaugacuaguuaccaauaucugauaauucagaacacaaccugggaagaucacugccaguucucaagaccgucuccuaucggcuaccucgggcuccuuucacaaagaaccagagacauuuauaucaguagaagacgccggggcacauucacauggacauugucagauucugaaggcaaggauacaccagggggguacugucuaacuagguggaugcugauugaagcugaauugaaaugcuuuggcaacacagcuguggccaaauguaaugaaaagcaugaugaggaauuuugugauauguugagacuguuugacuucaacaaacaagccauucaaaggcugaaagcacccgcacagaugagcauccagcugaucaauaaagcgguaaaugccuugauaaaugaccaacuaauaaugaaaaaccaucugcgagacauuaugugcauuccauacuguaacuacagcaaguauugguaucucaaccacacagucacugggaaaacaucguugccuaagugcuggcuugugucaaauggcucauaucugaacgaaacccacuucucugaugauauugagcaacaggccgacaacaugauaacugagaugcugcagaaggaauacauggagaggcaggggaagacaccauuaggccugguugaccucuuuguguucagcacaaguuuuuaucucaucaguaucuuccuucaccuagucaaaauaccgacucauaggcauguuguaggaaaaccguguccuaaaccucacagacugaaucacaugggcauaugcucuugugggcucuacaagcaaccugguguaccuguaagauggaagagauga

SEQ ID NO: 3990 - RNA, 1476 nt, Artificial Sequence
  derived and/or modified protein sequence (wt) from LASV(G1442-SLE-2011;Clade IV)__AIT17180__GPCstabilized
augggacaaauagugacauucuuucaggaagugccucaugugauagaggagguaaugaacauugugcucauugcacuauccauacuggcagugcugaagggucuauacaauguugcaacaugcggccugauugguuuagucaccuuccuauuguuaugugguaggucuugcacaacaacucuuuacaaaggaguuuacgaacuucagacucuggaauuaaacauggagacacucaauaugacuaugccucucucuuguacaaagaacaacagucaccacuauauaaggguggguaaugagacaggacuagaguugacccugaccaacacaagcaucaucaaucacaaguuuugcaaucuaucugaugcucacaaaaagaaccucuaugaucaugcuuugaugagcauaaucucgacuuuucacuuguccauucccaacuucaaccaauaugaggcaaugagcugugacuucaauggagggaagauuagugugcaguauaaccugagucacagcuaugcuggagaugcagccaaccauugugguacaguugcaaaugguguuuuacaaaccuucaugaggauggcuuggggugggaguuacaucgcccuugacucagguugcggcaauugggacuguauuaugacuaguuaucaauaccuaauaauucagaauacgaccugggaugaucauugccaauucucaagaccaucccccaucgguuaucuugggcuccucucacaaaggaccagagauguuuauaucaguagaagacgccggggcacauucacauggacacugucagauucugaaggcaaggacacaccaggaggguacugucugaccagguggaugcuaauugaagcugaacugaaaugcuuuggcaacacagcuguagcaaaauguaaugagaaacaugaugaagaauucugugacaugcuaaggcuguuugacuucaauaaacaagcuauucagagguugaaagcccccgcacaaaugaguauucaguugaucaacaaagcagugaaugcuuugauaaaugaccaacuaauaaugaaaaaccaucuacgggacaucaugugcauuccauacugcaauuacagcaaguacugguaucucaacaacacagccacugggaaaacaucacugcccaaauguuggcuuauaucaaauggcucauauuugaacgaaacucacuucucugaugacauugaacaggaagcugacaauaugaucacugagauguuacaaaaagaauacauggagaggcaggggaagacaccauuaggucugguugaccucuuuguguucagcacaaguuucuaucucauuagcaucuuccuucaccuagucaaaauaccaacucacaggcauauugugggcaaaucauguccuaaaccccauagguugaaucacauggguauuugcucuuguggacuuuauaaacaacccggugugccuguaagauggaagagauga

SEQ ID NO: 3991 - RNA, 1476 nt, Artificial Sequence
  derived and/or modified protein sequence (wt) from LASV(G1529-SLE-2011;Clade IV)__AIT17184__GPCstabilized
augggacaaauagugacauuuuuccaggaagugccucaugugauagaggaagugaugaacauuguacucaucgcacugucuauucuugcaguguugaaggguuuguacaauguugcaacauguggccuuauugguuugguuaccuuucuuuuacugugugguagaucuugcacaaccacucuguacaaaggagucuaugaacuucaggcccuggaauuaaacauggagacacucaauaugaccaugccucucucuugcacaaagaacaauagucaccacuauauaaggguggguaaugagacaggacuagaacuaacccugaccaacacaagcaucaucgaucauaaguuuugcaacuugucugaugcccacaaaaagaaccuuuaugaucaugcacuuaugagcauaaucucaacuuuccacuuguccauuccuaacuuuaaucaauaugaagcaaugaguugugacuuuaauggagggaaaauuagugugcaguacaaccuaagucacagcuaugcuggagaugcagccaaccauuguggcacaguugcaaauggcguuuugcagaccuucaugaggauggccuggggugggagcuacauugcucuugauucaggcugcaauggaugggauugcauuaugacuaguuaucaauaucugauaauucagaauacaaccugggacgaucacugccaauucucaagaccaucucccauugguuaccuugggcuccucucacaaagaaccagagacaucuacauuagcaggagacgccggggcacauucacauggacacugucagauucugaagguaaggacacaccagggggguacugucugaccagauggaugcuaauugaggcugaacuuaaauguuucggcaacacagcuguggccaaauguaaugagaagcaugaugaagaauucugugacaugcugaggcuauuugauuucaacaaacaagcuauccgaagguugaaggcucccgcacaaaugagcauucaguugaucaacaaggcugugaacgcuuuaauaaaugaucaacugauaaugaaaaaccaucugcgggauaucaugugcauuccauacuguaauuacagcaaguacugguaucucaacaacacagccacugggaaaacaucacugccuagaugcuggcuugugucaaauggcucauaccuaaaugagacccacuucucugaugacauugaacaacaagcugacaacaugaucacugagauguuacaaagggaguacauggagagacagggaaagacaccauuaggucuggucgaccucuuuguguucagcacaaguuuuuaucuuauuaguaucuuccuucaccuagucaaaauaccaacucauagacacauugugggcaaaccgugucccaaaccucacagguugaaucauaugggcauaugcuccuguggacucuauaaacaaccugguguaccuguaaaauggaagagauaa

SEQ ID NO: 3992 - RNA, 1476 nt, Artificial Sequence
  derived and/or modified protein sequence (wt) from LASV(G1618-SLE-2011;Clade IV)__AIT17188__GPCstabilized
augggacaaauagugacauuuuuccaggaagugccucauguuauagaagaagugaugaacauuguucucauugcacuguccauacuagcagugcugaagggucuguacaacuuugcaacauguggcuucguugguuuggucaguuuccucuuguuguguggcaggucuugcacaaccagucuuuacaaagggguuuaugagcuucagacucuggaguuaaacauggagacacucaacaugaccaugccucucucuugcacaaagaacaacagucaucauuacauaauggugggcaaugagacaggacuggaauugaccuugaccaacacgagcauuauuaaucauaaauuuugcaaucugucugaugcccauaagaagaaccucuaugaucacgcucuuaugagcauaaucucaaccuuccacuuguccauccccaacuucaaucaguaugaagcaaugagcugugauuuuaaugggggaaagauuaguguacaguacaaccugagucacagcuaugcuguagaugcagccaaccauuguggcacaguugcaaauggugucuuacagacuuucaugaggauggccuggggugggagcuauauugcucuugacucaggcugcggcagcugggacugcauaaugaccagcuaucaauaucugauaauccaaaacacaaccugggaagaccacugccaauucucaagaccaucucccaucggcuaucuugggcuccucucacaaaggaccagagauaucuauauuaguaggagacgccgggguacauucacauggacacugucagauucugaaggcaaggacacaccagggggguauugucugacaagguggaugcuaauugaagcugaauugaaaugcuucgggaacacagcuguggcaaaauguaaugagaaacaugaugaggaauuuugugacaugcugaggcuguuugacuucaacaaacaagccauucaaagguuaagagcucccgcacaaaugagcauucaguugauuaacaaagcagugaaugcuuugauaaaugaccaacuaauaaugaagaaccaucuacgggacaucaugugcauuccauacuguaauuacagcaaguacugguaccuuaaccacacaacuacugggagaacaucacuacccaaauguuggcuuguaucgaaugguucauacuuaaacgagacccacuuuucugaugauauugaacagcaagcugacaacaugaucacugagauguuacaaaaagaguacauggaaaggcaggggaagacaccauugggucuaguugaccucuuuguguucagcacaaguuucuaucucauuagcaucuuccuucauuuagucaagauaccaacucauaggcauauuguaggcaagucgugucccaaaccucacagauugaaucauaugggcauaugcuccugcggacucuauggacagcccggugugccugugaaauggaagagauga

SEQ ID NO: 3993 - RNA, 1476 nt, Artificial Sequence
  derived and/or modified protein sequence (wt) from LASV(G1646-SLE-2011;Clade IV)__AIT17192__GPCstabilized
augggacaaauagugacauuuuuccaggaagugccucauguuauagaagaagugaugaacauuguucucauugcacuguccauacuagcagugcugaagggucuguacaacuuugcaacauguggcuucauugguuuggucaguuuccucuuguuguguggcaggucuugcacaaccagucuuuacaaagggguuuaugagcuucagacucuggaguuaaacauggagacacucaacaugaccaugccucucucuugcacaaagaacaacagucaucauuacauaauggugggcaaugagacaggacuggaacugaccuugaccaacacgagcauuauuaaucauaaauuuugcaaucugucugaugcccauaagaagaaccucuaugaucacgcucuuaugagcauaaucucaaccuuccaccuguccauccccaacuucaaucaguuugaagcaaugagcugugauuuuaaugggggaaagauuaguguacaguacaaccugagucacagcuaugcuguggaugcagccaaccauuguggcacaguugcaaauggugucuuacagacuuucaugaggauggccuggggugggagcuacauugcucuugacucaggcugcggcagcugggacugcauaaugacuaguuaucaauaucugauaauccaaaacacaaccugggaagaccacugccaauucucaagaccaucuccuaucgguuaucuugggcuccucucacaaaggaccagagauaucuauauuaguaggagacgccgggguacauucacauggacacugucagauucugaaggcaaggacacaccagggggguauugucugacaagguggaugcuaauugaagcugaacugaaaugcuucgggaacacagcuguggcaaaauguaaugagaaacaugaugaggaauuuugugacaugcugaggcuguuugacuuuaacaaacaagccauucaaagguuaaaagcucccgcacaaaugagcauucaguugauuaacaaagcagugaaugcuuugauaaaugaccaacuaauaaugaagaaccaucuacgggacaucaugugcauuccauacuguaauuacagcaaguacugguaccuuaaccacacaacuacugggagaacaucacugcccaaauguuggcuuguaucgaaugguucauacuuaaacgagacccacuuuucugaugauauugaacaacaagcugacaacaugaucacugagauguuacaaaaagaguauauggaaaggcaggggaagacaccauugggucuaguugaccucuuuguguucagcacaaguuucuaucucauuagcaucuuccuucauuuagucaagauaccaacucauaggcauauuguaggcaagucgugucccaaaccucacagauugaaucacaugggcauaugcuccugcggacucuauggacagcccggugugccugugaaauggaagagauga

SEQ ID NO: 3994 - RNA, 1476 nt, Artificial Sequence
  derived and/or modified protein sequence (wt) from LASV(G1647-SLE-2011;Clade IV)__AIT17196__GPCstabilized
augggacaaauagugacauucuuccaggaagugccccaugugauagaagaggugaugaacauuguucucauugcacugucuauacuagcagugcugaagggucuguacaaucuugcaacauguggccucguuggcuuggucacuuuucuccuguuguguggcaggucuuguacaacuagccuuuacaaagggguuuaugagcuucagacucuggaacuaaacauggaaacacucaauaugaccaugccucucuccuguacaaagaacaauagccaucauuacauaauggugggcaaugagacaggacuagaacugaccuugaccaacacgagcauuauaaaccauaaauuuugcaaucugucugaugcccacaaaaagaaccucuaugaccacgcucuuaugagcauuaucucaaccuuccacuuguccaucccuaacuucaaucaauaugaggcaaugagcugcgauuuuaaugggggaaagaucagugugcaguacaaccugagucacagcuaugccggggaugcagccaaccauuguggcacuguugcaaaugguguauuacagacuuucaugaggauggcuuggggugggagcuacauugcucuugacucaggcugcggcaggugggacuguauuaugacuaguuaucaauaucugauaauccaaaauacaaccugggaagaucacugccaauucucgagaccaucucccaucgguuaucucgggcuccucucacaaaggaccagagauauuuauauuaguagaaggcgccggggcacauucacauggacacugucagauucugaaggcaaggacacaccagggggauauugucuaaccagauggaugcuaauugaggcugaacuaaagugcuucgggaacacagcuguggcaaaauguaaugagaagcaugaugaggaguuuugugacaugcugaggcuguuugacuucaacaagcaagccauucaaagguugaaagcucccgcacaaaugaacauucaguugauuaacaaagcaguaaaugcuuugauaaaugaccaacuuauaaugaagaaccaucuacgggauaucaugugcauuccauacuguaauuacaguaaguauugguaccucaaccacacaacuacugggaaaacaucacugcccagauguuggcuuguaucaaaugguucauaccugaacgagacccacuuuucugaugauauugaacaacaagcugacaacaugaucacugagauguuacagaaggaguauauggagaggcaggggaagacaccauugggucugguugaccucuuuguguucagcacaagcuucuaucucaucagcaucuuccuucaccuaguuaaaauaccaacucauaggcauauuguaggcaagccgugucccaaaccucacagguugaaucauaugggcauuuguuccuguggauucuauaaacagccuggugugccugugaaauggaagagauga

SEQ ID NO: 3995 - RNA, 1476 nt, Artificial Sequence
  derived and/or modified protein sequence (wt) from LASV(G1774-SLE-2011;Clade IV)__AIT17204__GPCstabilized
augggacaaauagugacauucuuccaggaagugccccauguaauagaagaggugaugaacauuguucucauugcacuguccauacuagcagugcugaaaggucuguacaaccuugcaacauguggccucguuggcuuggucacuuuccucuuguuguguggcaggucuugcacaagcagccuuuauaaagggguuuaugagcuucagacucuggaacugaacauggaaacacucaauaugaccaugccucucuccugcacaaaaaacagcagucaucauuacauaagggugggcaaugagacaggacuagaacugaccuugaccaacacgagcauuauuaaucauaaauuuugcaaucugucugaugcccacaaaaagaaccucuaugaccacgcucucaugagcauuaucucuacuuuccacuuguccaucccuaacuucaaucaguaugaggcaaugagcugcgauuucaaugggggaaagauuagugugcaguacaaccuaagucacagcuacgccggggaugcagccaaccauuguggcacuguugcaaaugguguacuacagacuuucaugaggauggcuuggggugggagcuacauugcucuugacucaggcugcgacaggugggacuguauuaugacuaguuaucaauaccugauaauucaaaauacaaccugggaagaucacugccaguucucgagaccaucuccuaucgguuaucuugggcuccucucacaaaggaccagagauauuuacauuaguagaaggcgccggggcacauucacauggacacugucagauucugaaggcaaggacacaccagggggauauugucugaccagauggaugcuaauugaggcugaacuaaagugcuucgggaacacagcuguggcaaaauguaaugagaagcaugaugaagaauuuugugacaugcugaggcuguuugacuucaacaagcaggccauucaaagguugaaggcccccgcacaaaugagcauucaguugaucaacaaagcaguaaaugcuuugauaaaugaccaacuuauaaugaagaaccaucugcgggacaucaugugcauuccauacuguaauuacagcaaguauugguaccucaaccacacaauuacugggaaaacaucacugcccaaauguuggcuuguaucaaaugguucauacuugaacaagacccacuuuucugaugacauugaacaacaagcugacaacaugaucacugagauguuacagaaggaguauauggagaggcaggggaagacaccauugggucuaguugaccuuuuuguguucagcacaaguuuuuaucucauuagcaucuuccuucaccuaaucaagauaccaacucauaggcacauuguaggcaaaccgugucccaaaccucacagguugaaucauaugggcaucuguuccuguggacucuacaaacagccuggugugccugugaaauggaagagauga

SEQ ID NO: 3996 - RNA, 1476 nt, Artificial Sequence
  derived and/or modified protein sequence (wt) from LASV(G1792-SLE-2011;Clade IV)__AIT17208__GPCstabilized
augggacagauagugacauucuuccaggaagugccucauguaauagaagaggugaugaacauuguucucauugcacuguccauacuggcagugcugaaaggucuguacaauuuugcaacauguggccucauugguuuggucacuuuccuccuguuguguggcaggucuugcacaacuagucuuuauaaagggguuuaugagcuucagacucuggaacuaaauauggagacacucaauaugaccaugccucucuccugcacaaagaacaacagucaucauuacauaaugguggguaaugagacaggacuggaacugaccuugaccaacacaagcaucauuaaucauaaauuuugcaaucugucugaugcccacaaaaagaaccucuaugaccaugcccuuaugagcauaauuucaacuuuccacuuguccauccccaacuucaaucaguaugaggcaaugagcugcgacuucaaugggggaaagauuagugugcaguacaaccugagucacagcuaugcuggggaugcggccaaccacuguggcacuguugcaaauggugucuuacagacuuucaugaggauggcuuggggugggaguuacauugcucuugacucaggcugcggccagugggacuguauuaugacuaguuaucaauaucugauaauccaaaauacgaccugggaagaucacugccaauucucaagaccaucacccaucgguuaucucgggcuccucucacagaggaccagagauauuuauauuaguagaagacgccggggcacauuuacauggacacugucagauucugaagguaaggacacaccagggggauauugucugaccagguggaugcuaauugaagcugaauuaaaaugcuucggaaacacagcuguagcaaaauguaaugagaagcaugaugaggaauuuugugacaugcuaaggcuguuugacuucaacaaacaggcuauucaaaggcugaaagcucccgcacaaaugaguauucaguugaucaacaaggcaguaaaugcuuugauaaaugaccaacuuauaaugaagaaucaucuccgggacaucaugugcauuccauacuguaauuacagcaaguauugguaccucaaccacacaacuacugggaaaacaucacugcccaaauguuggcuuguaucaaaugguucauacuugaacgagacccacuuuucugaugauauugaacaacaagcugacaacaugaucacugagauguugcagaaggaguacauggagaggcaggggaagacaccauugggccugguugaccucuuuguguucagcacaaguuucuaucucauuagcaucuuccuucaccuaguuaaaauaccaacucauaggcauauuguaggcaagucaugucccaaaccucacagauugaaucauaugggcauauguucuuguggacucuauaaacaacccggugugccugugaaauggaagagauga

SEQ ID NO: 3997 - RNA, 1476 nt, Artificial Sequence
  derived and/or modified protein sequence (wt) from LASV(G1897-SLE-2011;Clade IV)__AIT17210__GPCstabilized
augggacaaauagugacauucuuccaggaggugccccauguaauagaagaggugaugaacauuguucucauugcacugucuauacuagcagugcugaaagguuuauacaaucuugcaacauguggccucguuggccuggucacuuuccuccuguuguguggaaggucuugcacaaccagccuuuacaaagggguuuaugagcuucagacucuggaacuaaacauggaaacacucaauaugaccaugccucucuccugcacaaagaacaacagucaucauuacauaauggugggcaaugagacaggauuagagcugaccuugaccaacacgagcauuauuaaccauaaauuuugcaaucugucugaugcccacaaaaagaaccucuaugaccacgcucuuaugagcaucaucucaacuuuccacuuguccaucccuaacuucaaucaguaugaggcaaugagcugcgauuucaaugggggaaagaucagugugcaguacaaccugagccacagcuaugccggggaugcagccaaccauuguggcacuguugcaaaugguguguugcagaccuucaugaggauggcuuggggugggagcuacauugcucuugacucaggcugcgacaggugggauuguaucaugacuaguuaucaauaucuaauaauccagaauacaaccugggaagaucacugucaauucucgagaccauccccuaucgguuaucucggacuccucucacaaaggaccagagauauuuauauuaguagaaggcgccggggcacauucacauggacacugucagauucugaaggcaaggacacaccagggggauauugucugaccagauggaugcuaauugaggcugaacuaaagugcuuugggaacacagcuguggcaaaauguaaugagaagcaugaugaggaauuuugugacaugcugaggcuguuugacuucaacaaacaagccauucaaagguugaaagcucccgcacaaaugagcauucaguugaucaacaaagcaguaaaugcuuuaauaaaugaccaacuuauaaugaagaaccaucuacgggacaucaugugcauuccauacugcaauuacagcaaguauugguaccucaaccacacaacuacugggaaaacaucacugcccaaauguuggcuuguaucaaaugguucauaccugaaugagacccacuuuucugaugauauugaacaacaagcugacaacaugaucacugaaauguuacagaaggaguauauggagaggcaggggaagacaccauugggucuaguugaccucuuuguguuuagcacaaguuucuaucucaucagcaucuuccuucgccuagucaaaauaccaacucacaggcauauugugggcaagccgugucccaaaccucacagguugaaucauaugggcauuuguucuuguggacucuacaaacagccuggcgugccugugaaauggaagagauga

SEQ ID NO: 3998 - RNA, 1476 nt, Artificial Sequence
  derived and/or modified protein sequence (wt) from LASV(G1932-SLE-2011;Clade IV)__AIT17212__GPCstabilized
augggacaaauagugacuuucuuccaggaaguaccccaugugauagaagaggugaugaacauuguucucauugcacugucuauacuagcagugcugaagggucuguacaaucuugcaacauguggccucguuggcuugguuacuuuucuccuguuguguggcaggucuuguacgacuagccuuuacaaagggguuuaugagcuucagacucuggaacuaaacauggaaacacucaauaugaccaugccucucuccuguacaaagaacaauagccaucauuacauaauggugggcaaugagacaggacuagaacugaccuugaccaauacgagcauuauaaaccauaaauuuugcaaucugucugaugcccacagaaagaaccucuaugaccacgcucuuaugagcauuaucucaaccuuccacuuguccaucccuaacuucaaucaguaugaggcaaugagcugcgauuuuaaugggggaaagaucagugugcaguacaaccugagucacagcuaugccggggaugcagccaaccauuguggcacuguugcaaaugguguauuacagacuuucaugaggauggcuuggggugggagcuacauugcucuugacucaggcugcgguaagugggacuguauuaugacuaguuaucaauaucugauaauccaaaauacaaccugggaagaucacugccaauucucgagaccaucucccaucgguuaccucgggcuccucucacaaaggaccagagauauuuauauuaguagaaggcgccggggcacauucacauggacacugucagauucugaaggcaaggacacaccagggggauauugucuaaccagauggaugcuaauugaggcugaacuaaagugcuucgggaacacagcuguggcaaaauguaaugagaagcaugaugaggaauuuugugacaugcugaggcuguuugacuucaacaagcaagccauucaaagguugaaagcucccgcacaaaugagcauucaguugaucaacaaagcaguaaaugcuuugauaaaugaccaacuuauaaugaagaaccaucuacgggauaucaugugcauuccauacuguaauuacaguaaguauugguaccucaaccacacaacuacugggaaaacaucacugcccagaugcuggcuuguaucaaaugguucauaucugaacgagacccacuuuucugaugauauugaacaacaagcugacaacaugaucacugagauguuacagaaggaguacauggagaggcaggggaagacaccauugggucugguugaccucuuuguguucagcacaagcuucuaucucaucagcaucuuccuucaccuaguuaaaauaccaacucauaggcauauuguaggcaagccgugucccaaaccucacagguugaaucauaugggcauuuguuccuguggacucuauaaacagccuggugugccugugaaauggaagagauga

SEQ ID NO: 3999 - RNA, 1476 nt, Artificial Sequence
  derived and/or modified protein sequence (wt) from LASV(G1959-SLE-2011;Clade IV)__AIT17216__GPCstabilized
augggacagauagugacauucuuccaggaaguaccucaugugauagaagaggugaugaacauuguccucauugcacugucuauacuagcagugcugaaaggucuguacaauuuugcaacauguggccucguugguuugguuaccuuccuccuguuguguggcaggucuugcacaaccagucuuuacaaaggggucuaugagcuucagacucuggaauuaaacauggagacacucaauaugaccaugccccucuccuguacaaagaacaacagucaucauuauauuaugguggguaaugagacaggucuagagcugaccuugaccaacacgagcaucauuaaucauaaauuuugcaaucugucugaugcccacaaaaagaaccucuaugaucacgcucuuaugagcauaauuucaacuuuccaucuguccauucccaacuucaaucaguaugaggcaaugagcugugauuucaaugggggaaagauuagugugcaguacaaccugagucacaguuaugcuggggaugcggccaaccauuguggcacuguugcaaaugguguccuacagaccuucaugaggauggcuugggguggaagcuacauugcucuugacucaggcugcggcaggugggacugcauuaugacuaguuaucaguaccugauaauccaaaauacaaccugggaagaucacugccaguucucaagaccaucucccaucggcuaucucggacuccucucacaaaggaccagagauauuuauauuaguagaagacgccggggcacauucacauggacacugucagauucugaagguaaggacacaccagggggauauuguuugaccagauggaugcuaauugaagcugaacuaaagugcuucgggaacacagcuguggcaaaauguaaugagaagcaugaugaggaauuuugugacaugcugaggcuguuugacuucaacaaacaagccauucaaagauugaaagcucccgcacaaaugagcauucaauugaucaacaaggcaguaaaugccuugauaaaugaccagcuuauaaugaagaaccaucuacgagacauaaugugcauuccauacuguaauuacagcaaguauugguaccucaaccacacaaccacugggaaaacaucacugccuaaauguuggcuuguauccaaugguucauacuugaaugagacccacuuuucugaugauauugaacaacaagcugacaacaugaucacugagauguuacagaaagaguacauggagaggcaggggaagacaccauugggccuagucgaccucuuuguguucagcacaaguuucuaucucauuagcaucuuucuucaccuagucaaaauaccaacucauagacauauuguaggcaagccgugucccaaaccucacagauugaacuacaugggcauauguuccuguggacucuacaaacagcccggugugccugugagauggaagagauga

SEQ ID NO: 4000 - RNA, 1476 nt, Artificial Sequence
  derived and/or modified protein sequence (wt) from LASV(G2141-SLE-2011;Clade IV)__AIT17224__GPCstabilized
auggggcaaauaguaacauuuuuccaggaaguuccucaugugauagaggaagugaugaacauuguacucaucgcauugucuauacuagcagugcuaaaaggacuguacaauguugcaacauguggccuuauuggcuuggucaccuuccuccuguugugcgguagaucuugcacaaccacucucuacaaaggagucuaugagcuucaggcucuggaauuaaacauggagacacucaauaugaccaugccucucuccugcacaaagaacaacagucaccauuauauaaggguaggcaaugacacaggacuugaacugacccuaaccaacacaagcauuauccaacacaaauuuuguaaucugucugaugcucacaaaaagaaccucuaugaccacacucucaugagcauaauuucaacuuuccacuuguccauccccaauuucaaucaguaugaggcuaugagcugugacuucaauggggggaagauuagugugcaauacaacuuaagucacagcuaugcuggggaugcagccagccauugugggacaguugcaaaugguguucugcaaacuuucaugagaauggcuuggggugggagcuauauugcucuugacucugguugcggcaauugggacuguaucaugacuaguuaccaauaucugauaauucagaauacaaccugggaggaucauugccaauucucaagaccaucccccaucgguuaccuugggcuccucucacaaaggaccagagauauuuacauuaguagaaggcgccgggguacauucacauggacauugucagacuccgaaggcagagacacaccaggaggguacugucugaccagauggauguuaauugaggcugaacuaaaaugcuuugguaacacagcuguagcaaaaugcaaugaaaagcaugaugaggaauucugugauaugcugaggcuguuugacuucaacaaacaggccauccaaagauugaaaacucccgcacaaaugagcauccaguugaucaacaaagcagugaaugcuuugauaaaugaccaacuaaucaugaagaaccauuugcgggacaucaugugcauuccauacugcaauuacaguaaguacugguaccuuaacaacacaaucacugggaagucaucauugccuaaaugcuggcuuguguccaacgguucauaucuaaaugagacccauuucucugaugacauugagcaagaagccgacaauaugaucacugagauguugcaaaaagaguacauggaaaggcagggaaagacaccacugggcuugguugaccucuuuguuuuuaguacaaguuucuaucuuauuagcaucuuccuccaccuagucaaaauaccaacccauaggcauauuguagguaaaccgugucccaaaccucacaggcuaaaccacaugggaguaugcucuuguggacucuacaaacaacccggugugccuguaagauggaagagauga

SEQ ID NO: 4001 - RNA, 1476 nt, Artificial Sequence
  derived and/or modified protein sequence (wt) from LASV(G2147-SLE-2011;Clade IV)__AIT17228__GPCstabilized
augggacagauagugacauucuuccaggaagugccucauguaauagaagaggugaugaacauuguacucauugcacugucuauacuagcagugcugaagggucuguacaauuuugcaacauguggccuuguuggucugcuuacuuuccucuuguuauguggcaggucuugcacaaccagucuuuacaaagggguuuaugagcuucagacucuggaacuaaacauggagacacucaauaugaccaugccucucuccugcacaaagaacaacagccaucauuauauaaugguggguaaugagacaggacuagaauugacuuugaccaacacgagcauuauugaucauaaauuuugcaaucugucugaugcccacaaaaagaaccuuuaugaccacgcucuuaugagcauaaucucaacuuuccauuuguccauucccaacuucaaucaguaugaggcaaugagcugugauuuuaauggaggaaagauuagugugcaguacaaucugagucacagcuaugcuggggaugcggccaaccauuguggcacuguugcaaauggugucuuacagacuuucaugaggauggccuggggugggagcuauauugcucuugacucaggcugcggcggaugggacugcauuaugacuaguuaucaguaucugauaauccaaaacacaaccugggaagaucacugccaguucucaagaccaucucccaucgguuaucuugggcuccucucacaaagaaccagagauauuuacauuaguagaaggcgccggggcacauucacauggacacuaucagauucugaaggcaaggacacaccagggggauauuguuugaccagauggaugcuaauugaagcugaacuaaaaugcuucgggaacacagcuguagcaaaauguaaugagaagcaugaugaggaauuuugugacaugcugaggcuguuugacuucaacaaacaagccauucaaagguugaaagcucccgcacaaaugagcauucaauugaucaacaaggcaguaaaugcucugauaaaugaccaacucauaaugaagaaccauuuacgggacaucaugugcauuccauacuguaauuacagcaaguauugguaccucaaccauacaaccacugggaaaacaucacugccaaaauguuggcuugugucaaaugguucauacuuaaacgagacccacuuuucugaugauauugagcaacaagcugacaacaugauuacugagaugcugcagaaggaguauauggaaaggcagggaaagacaccauugggucuaguugaccucuuuguguucagcacaaguuucuaucucauuagcaucuuccuucaccuggucaaaauaccaacucauagacauauuguaggcaagucgugucccaaaccucacagauugaaucacaugggcauauguuccuguggacucuacaaacagcccggugugccuguaaaguggaagagauga

SEQ ID NO: 4002 - RNA, 1476 nt, Artificial Sequence
  derived and/or modified protein sequence (wt) from LASV(G2165-SLE-2011;Clade IV)__AIT17232__GPCstabilized
augggacagauagugacauucuuccaggaagugccucauguaauagaagaggugaugaacauuguccucauugcgcugucuauauuagcagugcugaaaggucuauacaacuuugcaacauguggccucguugguuugguuacuuuccuccuguuguguggcaggucuugcacaaccagucuuuauaaaggggucuaugagcuucagacucuggaguuaaacauggagacacucaauaugaccaugccucucuccugcacaaagaauaacagucaucauuauauaaggguggguaaugagacaggacuagaacugaccuugaccaacacaaguauuauuaaucauaaauuuugcaaucugucugaugcccacaaaaagaaccucuaugaccacgcucuuaugagcauaauuucaacuuuccacuuguccauccccaauuucaaucaguaugaggcaaugagcugcgauuuuaaugagggaaagaucagugugcaguacaaccugagucacagcuaugcuggggaugcugccaaccauuguggcacuguugcaaauggugucuuacagacuuucaugaggauggcuuggggugggagcuacauugcccuugacucaggcugcggcaagugggacuguauuaugacuaguuaucaauaucugauaauucagaauacaaccugggaagaucacugccaauucucaagaccaucuccuaucgguuaccuugggcuccucucacagaggaccagagauauuuauaucaguagaagacgccggggcacauucacauggacacugucagauucugaaggcaaggacacaccagggggauauugucugaccagauggaugcugauugaagcugaauugaaaugcuucgggaacacagcuguagcaaaauguaaugagaagcaugaugaggaauuuugugacauguugagguuguuugacuucaacaaacaagccauugaaagguugaaagcucccgcacaaaugagcauucaguugaucaacaaggcaguaaaugccuugauaaaugaucaacuuauaaugaagaaccaucuacgggacaucaugugcauuccauacuguaauuacagcaaauauugguaccucaaccacacaacuacugggaaaacaucacugccuaaauguuggcuuguaucaaaugggucauacuugaacgagacccacuuuucugaugauauugaacaacaagcugacaacaugaucacugagauguuacagaaggaguauauggagaggcaagggaagacaccauugggccuaguugaccucuuuguguucagcacaaguuucuaucucaucaguauuuuccuucaccuagucaagauaccaacccauaggcauauuguaggcaagucguguccuaaaccucacagauugaaucacaugggcauauguuccuguggacucuauaaacaacccggugugccugugaaguggaaaagauga

SEQ ID NO: 4003 - RNA, 1476 nt, Artificial Sequence
  derived and/or modified protein sequence (wt) from LASV(G2184-SLE-2011;Clade IV)__AIT17236__GPCstabilized
augggacagauagugacauucuuccaagaagugccucaugugauagaagaggugaugaacauuguucucauugcgcugucuauauuagcagugcugaaaggucuauacaacuuugcaacauguggccucguugguuugguuacuuuccuccuguuguguggcaggucuugcacaaccagucuuuauaaaggagucuaugagcuucagacucuggaguuaaacauggagacacucaauaugaccaugccucucuccugcacaaagaauaacagucaucauuauauaaugguagguaaugagacaggacuagaacugaccuugaccaacacaaguauuauuaaucauaaauuuugcaaucugucugaugcccacaaaaagaaccucuaugaccacgcucuuaugagcauaauuucaacuuuccacuuguccauccccaacuucaaucaauaugaagcaaugagcugugauuuuaaugggggaaggauuagugugcaguacaaccugagucacagcuaugcuggggaagcugccaaccauuguggcacuguugcaaauggugucuuacagacuuucaugaggauggcuuggggugggagcuacauugcucuugacucaggcugcggcaagugggacuguauuaugacuaguuaucaauaucugauaauccaaaauacaaccugggaagaucacugccaauucucaagaccaucuccuaucgguuaucuugggcuucucucacaacggaccagagauauuuacaucaguagaagacgccggggcacauucacauggacacugucagauucugaaggcaaggacacaccagggggauauugucugaccagauggaugcugauugaagcugaauuaaaaugcuucgggaacacagcuguagcaaaauguaaugagaagcaugaugaggaauuuugugacauguugaggcuguuugacuucaacaaacaagccauucaaagguugaaagcucccgcacaaaugagcauucaguugaucaacaaggcaguaaaugccuugauaaaugaucaacuuauaaugaagaaccaucuacgggacaucaugugcauuccauacuguaauuacagcagauauugguaccucaaccacacaacuacugggaaaacaucacugccuaaguguuggcuugucucaaaugggucauacuugaacgagacccacuuuucugaugauauugaacaacaagcugacaacaugaucacugagauguuacagaaggaguauauggagagacaggggaagacaccauugggccuaguugaccucuuuguguucagcacaaguuucuaucucaucagcaucuuccuucaccuagucaaaauaccaacucauaggcauauuguaggcaagucguguccuaaaccucacagauugaaucacaugggcauauguuccuguggacucuacaaacagcccggugugccugugaaauggaaaagauga

SEQ ID NO: 4004 - RNA, 1476 nt, Artificial Sequence
  derived and/or modified protein sequence (wt) from LASV(G2197-SLE-2011;Clade IV)__AIT17240__GPCstabilized
augggacagauagugacauucuuccaggaagugccucauguaauagaagaggugaugaacauuguucucauugcacuguccauacuggcagugcugaagggucuguacaaucuugcaacguguggccuuguuggguuaguuacuuuccucuuguuguguggcaggucuugcacaaccagucuuuauaaaggguuuuaugagcuucagacucuggaacuaaauauggaaacacucaauaugaccaugccucuuuccugcacaaagaacaacagucaucauuacauaaggguggguaaugagacaggacuggaacugaccuuaaccaauacgagcauuauugaucauaaauuuuguaaucugucugaugcccacaaaaagaaccucuaugaccaugcccucaugaguauaauaucaacuuuccacuuguccauccccaacuucaaucaguaugaggcaaugagcugcgauuuuaaugggggaaagauuagugugcaguacaaccugagucacagcuaugcuggggaugcggccaaccacuguggcacuguugcaaauggugucuuacagacuuucaugaggauggcuuggggugggaguuacauugcucuugacucaggcugcggacggugggacuguauuaugacuaguuaucaauaucugauaauccaaaauacaaccugggaagaucacugccaauucucaagaccaucacccaucgguuaucucgggcuccuuucacaaaagaccagagacauuuauauuaguagaagacgccggggcacauucacauggacacugucagauucagaaggcaaggacacaccagggggauauugucugaccagauggaugcugauugaagcugaauuaaaaugcuucggaaacacagcuguagcaaaauguaaugagaagcaugaugaggaauuuugugacaugcugaggcuguuugacuucaacaagcaagccauucagaggcugaaagcucccgcacaaaugagcauucaguugaucaacaaggcaguaaaugcuuugauaaaugaccaacuuauaaugaagaaccaucuacgggacaucaugugcauuccauacuguaauuacagcaaguauugguaccucaaccacacaacuacugggaaaacaucacuacccaaauguuggcuuguaucaaaugguucauacuugaacgagacucacuuuucugaugauauugaacaacaagcugacaacaugaucacugaaauguugcagaaggaguauauggagagacaggggaagacaccauugggucuaguugaccucuuuguguucagcacaaguuucuaucucauuagcaucuuccuucaccuagucaaaauaccaacucauaggcauauuguaggcaagucauguccuaaaccucacagauugaaucauaugggcauauguuccuguggacucuauaaacagcccggugugccugugaaauggaagagauga

SEQ ID NO: 4005 - RNA, 1476 nt, Artificial Sequence
  derived and/or modified protein sequence (wt) from LASV(G2222-SLE-2011;Clade IV)__AIT17244__GPCstabilized
augggacaaauaguuacauucuuccaggaagugccccauguaauagaagaggugaugaacauuguucucauugcacuguccauacuagcaguacugaaaggucuguacaaucuugcaacauguggccucguuggcuuggucacuuuccuccuguuguguggcaggucuugcacaaccaaccuuuauaaagggguuuaugagcuucagacucuggaacugaacauggaaacacucaauaugaccaugccucucuccugcacaaaaaacagcagucaucauuacauaagggugggcaaugagacaggacuagaacugaccuugaccaacacgagcauuaucgaucauaaauuuugcaaucugucugaugcccacaaaaagaaccucuaugaccacgcucuuaugagcauuaucuccacuuuccacuuguccaucccuaacuucaaucaguaugaggcaaugagcugcgauuucaauggggggaagauuagugugcaguacaaccugagucauagcuacgucggggaugcagccgaccauuguggcacuguugcaaaugguguacuacagacuuucaugaggauggcuuggggugggagcuacauugcucuugacucaggcugcggcaagugggacuguauuauaacuaguuaucaauaccugauaauucaaaauacaaccugggaagaucacugccaguucucgagaccaucucccaucgguuaucuugggcuccucucacaaaggaccagagauauuuacauuaguagaaggcgccggggcacauucacauggacacugucagauucugaaggcaaggacacaccagggggauauugucugaccagauggaugcuaauugaggcugaacuaaagugcuucgggaacacagcuguggcaaaauguaaugagaagcaugaugaagaauuuugugacaugcugaggcuguuugacuucaacaagcaggccauucaaagguugaaggcucccgcacaaaugagcauucaguugaucaacaaagcaguaaaugcuuugauaaaugaccaacuuauaaugaagaaccaucuacgggacaucaugugcauuccauacuguaauuacagcaaguauugguaccucaaucacacaauuacugggaaaacaucacugcccagauguuggcuuguaucaaaugguucauacuugaacgagacccgcuuuucugaugacauugaacaacaagcugacaacaugaucacugagauguuacagaaggaguauauggagaggcaggggaagacaccauugggucuaguugaccucuuuguguucagcacaaguuucuaucucauuagcaucuuccuucaccuagucaagauaccaacucauaggcauauuguaggcaaaccgugucccaaaccucacagguugaaucauaugggcaucuguuccuguggacucuacaaacagccuggugugccugugaaauggaagagauga

SEQ ID NO: 4006 - RNA, 1476 nt, Artificial Sequence
  derived and/or modified protein sequence (wt) from LASV(G2230-SLE-2012;Clade IV)__AIT17246__GPCstabilized
augggacaaauagugacuuucuuucaggaagugccucaugugauagaggaggugaugaacauugugcucaucgcauugucucuacuggcaguguugaaaggucuguacaaugucgcaacauguggccucauuggucugaucaccuuccuuuuacugugugguagauccugcacaaccaaucuuuacaaaggagucuaugagcuucagacucuggaacuaaacauggagacacucaauaugaccaugccucucucuugcacaaagaacaguagccaccacuauauaaugguggguaaugagacgggacuggaauugaccuugaccaacacaagcaucaucaaccacaaguuuuguaaucugucugaugcucacaaaaagaaucucuaugaucacacccuuaugagcauaauuucgacuuuucaccuguccauucccaacuucaaucaguaugaagcaaugagcugugacuucaacggagggaaaauuagugugcaguacaacuuaagccacagcuaugcuguggaugcagccaaccauuguggcacaguugcaaaugguauccuacagacuuucaugaggauggccuggggugggaguuauauugcccuugauucaggcugcggcaauugggauuguauuaugacuaguuaccaauaucuaauaauucagaauacaaccugggaagaucacugccaguucucaagaccaucucccaucggcuaucuugggcuccucucacaaaggaccagagacauuuauauuaguagaagacgccggggcacauucacauggacacuaucagauucugaaggcaaugacacaccagggggauacugucugaccagguggauguuaauugaggcugagcugaaaugcuucgguaauacagcuguggccaaaugcaaugaaaaacaugaugaagaauucugugacaugcugagacuguuugacuuuaacaaacaagccauucaaagauuaaaggcucccgcacaaaugaguauccaguugaucaacaaggcagugaaugcucugauuaaugaccaauuaauaaugaaaaaccaucuacgggacaucaugugcauuccauacuguaacuauaguaaguauugguaucucaaccacacaaccacuggaaaaacaucguugcccaaaugcuggcuuguaucuaaugguucauaucuaaacgagacccacuuuucugaugacauugaacagcaagccgacaacaugauaacugagaugcuacaaaaagaguacauggagagacaggggaagacaccauuaggucugguugaucucuuuguguucagcacaaguuucuaccucauuagcauuuuccuucaccuagucaaaauaccaacacauaggcacauuguuggcaaaccguguccgaaaccucacaggcugaaucacaugggcauauguucuuguggacucuacaaacaaccugguguaccugugagauggaagagauaa

SEQ ID NO: 4007 - RNA, 1476 nt, Artificial Sequence
  derived and/or modified protein sequence (wt) from LASV(G2259-SLE-2012;Clade IV)__AIT17250__GPCstabilized
augggacaaauagugacuuucuuccaggaagugccucaugugauagaggaggugaugaacauugugcucaucgcauugucucuacuggcaguguugaaaggucuguacaauguugcaacauguggccucauuggucuggucaccuuccuuuuacugugugguagauccugcacaaccaaucuuuacaaaggagucuaugagcuucagacucuggaacuaaacauggagacacucaauaugaccaugccucucucuugcacaaagaacaacagccaccacuauauaaugguggguaaugagacgggacuggaauugaccuugaccaacacaagcaucaucaaccacaaguuuuguaaucugucugaugcucacaaaaagaaucucuaugaucacacccuuaugagcauaauuucgacuuuucaccuguccauucccaacuucaaucaguaugaagcaaugagcugugacuucaauggagggaaaauuagugugcaguacaacuuaagccacagcuaugcuguggaugcagccaaccauuguggcacaguugcaaaugguguccuacagacuuucaugaggauggccuggggugggagcuauauugcccuugauucaggcugcggcaauugggauugcauuaugacuaguuaccaauaucuaauaauucagaauacaaccugggaagaucacugccaguucucaagaccaucucccaucggcuaucuugggcuccucucacaaaggaccagagacauuuauauuaguagaagacgccggggcacauucacauggacacuaucagauucugaaggcaaugacacaccagggggauacugucugaccagguggauguuaauugaggcugagcugaaaugcuucgguaauacagcuguagccaaaugcaaugaaaaacaugaugaagaauucugugacaugcugagacuguuugacuuuaacaaacaagccauucaaagauuaaaggcucccgcacaaaugaguauccaguugaucaacaaggcagugaaugcucugauuaaugaccaauuaauaaugaaaaaccaucuacgagacaucaugugcauuccauacuguaacuauaguaaguauugguaucucaaccacacaaccacuggaaaaacaucguugcccaaaugcuggcuuguaucuaaugguucauaucuaaacgagacccacuuuucugaugacauugaacagcaagccgacaacaugauaacugagaugcuacaaaaagaguacauggagagacaggggaagacaccauuaggucugguugaucucuuuguguucagcacaaguuucuaccucauuagcauuuuccuucaccuagucaaaauaccaacacauaggcacauuguuggcaaaccguguccgaaaccucacaggcugaaucacaugggcauauguuccuguggacucuacaaacaaccugguguaccugugagauggaagagauaa

SEQ ID NO: 4008 - RNA, 1476 nt, Artificial Sequence
  derived and/or modified protein sequence (wt) from LASV(G2263-SLE-2012;Clade IV)__AIT17254__GPCstabilized
auggggcaaauagugacauucuuccaggaaguaccucaugugauagaagaggugaugaacauuguucucauugcacugucuauacuagcagugcugaaagguuuguacaauuuugcaacaugugguaucguugguuuggucacuuuccucuuguuguguggcaggucuugcacaaccagccucuacaaagggguuuaugaacuucagacgcuggaacuaaacauggagacacucaauaugaccaugccucucuccugcacaaagaacaacagucaccauuacauaauggugggcaaugagacgggacuagaacugaccuugaccaacacgagcauuauaaaucauaaauuuugcaaucugucugaugcccacaaaaagaaccucuaugaccacgcucuuaugagcauaauuucaacuuuccacuuguccauccccaacuucaaucaguaugaggcaaugagcugugauuucaaugggggaaaaaucagugugcaguauaaccugagucauagcuaugcuggggaugcagccaaucauuguggcacagucgcaaauggugucuuacaaacuuucaugaggauggccuggggugggagcuacauugcucuugacucaggcugcgacaggugggacuguauuaugacuaguuaucaauaucugauaauccaaaacacaaccugggaagaucacugccaguucucaagaccaucucccaucggcuaucucgggcuccucucacaaagaaccagagauauuuacauuagcagaagacgccggggcacauucacauggacacugucagacucugagggcaagaacacaccaggaggauauugucugaccagauggaugcuaauugaggcugaacugaaaugcuuugggaacacagcuguggcaaaaugcaaugagaagcaugaugaggaauuuugugacaugcugaggcuguuugacuucaacaaacaagccauucaaagguugaaagcccccgcacaaaugagcaucagcuugaucaacaaagccguaaaugcuuugauaaaugaccaauuaauaaugaagaaccaucuacgggacaucaugugcauuccauacuguaauuacagcaaguauugguaccucaaccacacaacuacugggaaaacaucacuacccagauguuggcuuguaucaaaugguucauacuugaacgagacccacuucucugaugauauugaacaacaagcugacaacaugaucacugagauguuacagaaggaguauauggauaggcaggggaagacaccauugggucuaguugaccucuuuguauuuaguacaaguuucuaucucauuagcaucuuccuucaccuggucaaaauaccaacucauagacauauuguaggcaagacaugccccaaaccucacagguugaaucacaugggcauauguuccugcggacucuauaaacagcccggugugccuguaaaauggaagagauga

SEQ ID NO: 4009 - RNA, 1476 nt, Artificial Sequence
  derived and/or modified protein sequence (wt) from LASV(G2280-SLE-2012;Clade IV)__AIT17258__GPCstabilized
augggacaaauagugacauucuuccaggaaguaccccauguaauagaagaggugaugaacauuguucucauugcacugucuauacuagcaguguugaaaggucuguacaauauugcgacauguggccucguuggcuuggucacuuuccuccuguuguguggcaggucuuguacaacuagccuuuacaaagggguuuaugagcuucagacucuggaacuaaacauggaaacacucaauaugaccaugccucucuccugcacaaagaacaauagucaucauuacauaauggugggcaaugagacaggauuagaacugaccuugaccaacacgagcaucauuaaucauaaauuuugcaaucugucugaugcccacaaaaagaaccucuaugaccacgcucucaugagcauugucucaaccuuccacuuguccaucccuaacuucaaucaguaugaggcaaugagcugcgauuucaaugggggaaagauuagugugcaguacaaccugagucacagcuaugccguggaugcagccaaccauuguggcacuguugcaaaugguguauuacagacuuucaugaggauggcuuggggugggagcuacauugcucuugacucaggcugcggcgggugggacuguauaaugacuaguuaucaauaucugauaauccaaaauguaaccugggaagaucacugccaauucucgagaccaucucccaucgguuaccucgggcuccucucacaaagaaccagggauguuuauauuaguagaaggcgccggggcacauucacauggacacugucagauucugaaggcaaugacacaccagggggauauugucuaaccagauggaugcuaauugaagcugaacuaaagugcuuugggaacacagcuguggcaaaguguaaugagaagcaugaugaggaauuuugugacaugcugaggcuguuugacuucaacaaacaagccauucaaagguugaaagcucccgcacaaaugagcauucaguugaucaacaaagcaguaaaugcuuugauaaaugaccaacuuauaaugaagaaccauuuacgagacauuaugugcauuccauacuguaauuacagcaaguauugguaccucaaccacacaacuacugggaaaacaucacugcccaaauguuggcuuguaucaaaugguucauaccugaacgagacccacuuuucugaugauauugaacaacaagcugacaacaugaucacugagauguuacagaaggaguauauggagaggcaggggaagacaccacugggucugguugaccucuuuguguucagcacaagcuucuaucucauuagcaucuuccuucaccuaguuaaaauaccaacucauaggcauauuguaggcaagccgugucccaaaccucacagguugaaucauaugggcauuuguuccuguggacucuauaaacagccuggugugccuguuaaauggaagagauga

SEQ ID NO: 4010 - RNA, 1476 nt, Artificial Sequence
  derived and/or modified protein sequence (wt) from LASV(G2295-SLE-2012;Clade IV)__AIT17262__GPCstabilized
augggacaaauagugacauucuuccaggaggugccccaugugauagaagaggugaugaacauuguucucauugcacugucuauacuagcaguguugaagggucuguacaaucuugcaacauguggccuuguuggcuuggucacuuuccuccuguuguguggcaggucuuguacaacuagccuuuacaaagggguuuaugagcuucagacucuggaacuaaacauggaaacacucaauaugaccaugccucucuccugcacaaagaacaauagucaucauuacauaauggugggcaaugagacaggacuggaacugaccuugaccaacacgagcaucauuaaucauaaauuuugcaaucugucugaugcccacaaaaagaaucucuaugaccacgcucuuaugagcauuaucucaaccuuccacuuguccaucccuaacuucaaucaguaugaggcaaugagcugcgauuuuaaugggggaaagaucagugugcaguacaaccugagucacagcuaugccggggaugcagccacucacuguggcacugucgcaaaugguguauuacagacuuucaugaggauggcuuggggugggagcuacauugcucuugacucaggcugcggcaagugggacuguaucaugacuaguuaucaauaucugauaauccaaaauacaaccugggaagaucacugccaauucucgagaccaucucccauugguuaucuugggcuccuuucacaaaggaccagagauauuuacauuaguagaaggcgccggggcacauucacauggacacugucagauucugaaggcaaggacacaccagggggauauugucuaaccagauggaugcugauugaagcugaacuaaagugcuucgggaacacagcuguggcaaaauguaaugagaagcaugaugaggaauuuugugacaugcugagguuguuugacuuuaauaaacaagccauucaaagguugaaaacucccgcacaaaugagcauucaguugaucaacaaagcaguaaaugcuuugauaaaugaccaacuuauaaugaagaaccaucuacgggauaucaugugcauuccauacuguaauuacagcaaguauugguaccucaaccacacaacuacugggaaaacaucacugcccagauguuggcuuguaucaaaugguucauaccugaacgagacccacuuuucugaugauaucgaacaacaagcugacaauaugaucacugagaugcuacagaaggaauauauggagaggcaggggaagacaccauugggucugguugaccucuuugucuucagcacaagcuucuaucucaucagcaucuuccuucaccuaguuaagauaccaacucauaggcauauuguaggcaagccgugucccaaaccucacaggcugaaucauaugggcauuuguuccuguggacucuacaaacagccuggugugccugugaaauggaagagauga

SEQ ID NO: 4011 - RNA, 1476 nt, Artificial Sequence
  derived and/or modified protein sequence (wt) from LASV(G2315-SLE-2012;Clade IV)__AIT17266__GPCstabilized
augggacagauagugacauucuuccaggaagugccucauguaauagaagaggugaugaacauuguucucauugcacuguccauacuggcagugcugaaaggucuguacaaucuugcaacauguggccucguugguuuggucacuuuccuccuguugugugguaggucuugcacaaccagucuuuacaaagggguuuaugagcuucagacucuggaacuaaacauggagacacucaacaugaccaugccucucuccugcacaaagaacaacagucaucauuauauaaugguggguaaugagacaggacuagaacugaccuugaccaacacgagccuuauuaaucacaaauuuugcaaccugucugaugcccacaaaaagaaccucuaugaccacgcucuuaugagcauaaucucaacuuuccacuuguccauccccaacuucaaucaguaugaggcaaugagcugcgauuuuaaugggggaaagauuagugugcaguacaaccugagucacagcuaugccguggaugcagccaaccauuguggcacugucgcaaaugguguacuacagacuuucaugaggauggcuuggggugggagcuacauugcucuugacucaggcugcgguggaugggacuguauuaugacuaguuaucaauaucugauaauccaaaauacaacuugggaagaucacugccaauucucgagaccaucuccuaucgguuaucucgggcuccucucacaaaggaccagagauauuuauaucaguagaagacgccggggcacauucacauggacauugucagauucugaaggcaaggacacaccagggggauauuguuugaccagguggaugcugauugaggcugaacuaaaaugcuucgggaacacagcuguggcaaaauguaaugagaaacaugaugaggaauuuugugacaugcugaggcuguuugacuucaacaaacaagccauucaaaggcugaaagcucccgcacaaaugagcauucaguugaucaacaaagcaguaaaugcuuugauaaaugaucaacuuauaaugaagaaccaucuacgggauaucaugugcaucccauacuguaauuacagcaaguauugguaccucaaccacacaacuacugggagaacaucacugccuagauguuggcuuguaucaaaugguucauaccugaacgagacccacuuuucugaugauauugaacaacaagcugacaacaugaucacugagauguuacagaaggaguauauggaaaggcaggggaagacaccauugggccuaguugaucucuuuguguuuagcacaaguuucuaucucauuagcaucuuucuucaccuagucaaaauaccaacgcauaggcauauuguaggcaagucgugucccaaaccucacagacugaaucacaugggcauuuguuccugugggcuuuauaaacagccuggugugccuguaaaauggaagagauga

SEQ ID NO: 4012 - RNA, 1476 nt, Artificial Sequence
  derived and/or modified protein sequence (wt) from LASV(G2318-SLE-2012;Clade IV)__AIT17270__GPCstabilized
augggacagauagugacauucuuccaggaagugccucauguaauagaagaggugaugaacauuguucucauugcgcugucuguacuagcagugcugaaaggucuguacaauuuugcaacauguggccucguugguuuggucacuuuccuccuguuguguggcaggucuugcucaacuaguguuuauaaagggguuuaugagcuucagacucuggaacuaaauauggagacacucaacaugaccaugccucucuccugcacaaagaacaacagucaucauuauauaaugguggguaaugagacaggacuagaacugaccuugaccaacacuagcaucaucaaucauaaauuuuguaaucugucugaugcccacaaaaagaaccucuacgaccaugcucuuaugagcauaaucucaacuuuucacuuguccauccccaauuucaaucaguaugaggcaaugagcugcgauuucaaugggggaaagauuagugugcaguacaaccugagucacagcuaugcuguggaugcggccaaccauuguggcacuguugcaaauggugucuuacagacuuucaugaggauggcuuggggugggagcuacauugcucuugacucaggcugcggugggugggauugcauuaugacuaacuaucaauaucugauaauccagaauacaaccugggaggaucacugccaauucucaagaccaucucccaucgguuaucucgggcuccuuucacaaaggaccagagauauuuauauuaguagaagacgccggggcacauucacauggacacugucagauucugagggcaaggacacaccagggggauauugucugaccagauggauguugauugaagcugaacuaaaauguuucgggaacacagcuguagcaaaauguaaugagaagcaugaugaggaauuuugugacaugcugaggcuguuugacuucaacaaacaagccauucaaagguugaaagcucccgcacaaaugagcauucaguugaucaacaaggcagugaaugcauugauaaaugaccaacuuauaaugaagaaccaucuacgggacaucaugugcauuccguacuguaauuauagcaaguauugguaccucaaccacaccacuacugggagaacaucacuacccaaauguuggcuugugucaaaugguucauacuugaacgagacucacuuuucugaugauauugaacaacaagcugacaacaugaucacugagauguuacaaagggaguauauggagaggcaggggaagacaccauugggucuaguugaccucuuuguguucagcacaaguuucuaucucauuagcaucuuccuucaccuggucaaaauaccaacucauaggcauauugugggcaagucgugccccaaaccucacagacugaaucacaugggcauauguuccuguggucucuauaaacagccaggugugccugugaaguggaagagauga

SEQ ID NO: 4013 - RNA, 1476 nt, Artificial Sequence
  derived and/or modified protein sequence (wt) from LASV(G2363-SLE-2012;Clade IV)__AIT17274__GPCstabilized
augggacaaauagugacauuuuuccaggaagugccucaugugauagaggaggugaugaacauuguacucaucgcacugucuauacuugcagugcuaaaaggucuguacaauguugcaacauguggccuuacugguuugguugccuuucuuuuacugugugguagaucuuguacaaccacucuguacaaaggaguuuaugaacuucaggcccuggaauuaaacauggagacacucaauaugaccaugccucucuccugcacaaagaacaauagucaccacuacauaaggguaggcaaugagacaggacuagaacuaaccuugaccaauacaagcaucaucgagcauagguuuuguaacuuaucugaugcccacaaaaagaaccucuaugaucaugcucuuaugaguauaaucucaacuuuccacuuguccauucccaacuucaaucaguaugaagcaaugaguugugacuuuaauggggggaaaauuagugugcaauacaaccuaagucacagcuaugcuguagaugcagccaaccauuguggcacagucgcaaauggcguuuugcagacuuucaugaggauggccuggggugggaguuacauugcucuugauucaggcugcaaugggugggauuguaucaugaccaguuaucaauaccuaauuauucagaacacaacuugggaagaucacugccaauucucaagaccaucucccauugguuaccuugggcuccuuucacaaaggaccagagacauuuacaucaguaggagacgccggggcacauucacauggacacugucggauucugaagguaaagauacaccagggggguacugucugaccagauggaugcuaauugaggcugagcugaaauguuucggcaacacagcuguagccaaauguaaugagaagcaugaugaagaauucugugacaugcugaggcuauuugacuucaacaaacaagcuauccaaagguuaaaggcucccgcacaaaugagcauucaguugaucaacaaggcugugaacgcuuuaauaaaugaucaacugauaaugaaaaaccaucugcgggauaucaugugcauuccauacuguaacuacagcaaguacugguaucucaacaacacagccacugggaaaacaucacuaccuagaugcuggcuugugucaaaugguucauaccugaacgagacccacuucucugaugacauugaacaacaagcugacaacaugaucacugagauguugcagaaggaguacauggagaggcaggggaagacaccauugggccugguugaccucuuuguguuuagcacaaguuuuuaucuuaucaguaucuuccuucaccuagucaaaauaccaacucauagacacauuguaggcaaaccguguccuaaaccucacaggcugaaucauaugggcauaugcuccuguggacucuauaaacaacccggugcaccuguaagauggaagagauaa

SEQ ID NO: 4014 - RNA, 1476 nt, Artificial Sequence
  derived and/or modified protein sequence (wt) from LASV(G2384-SLE-2012;Clade IV)__AIT17276__GPCstabilized
augggacagauagugacauucuuccaggaagugccucauguaauagaagaggugaugaacauuguccucauugcgcugucuauauuagcagugcugaaaggucuguacaacuuugcaacauguggccucguugguuugguuacuuuccuccuguuguguggcaggucuugcacaaccagucuuuauaaaggggucuaugagcuucagacucuggaguuaaacauggagacacucaauaugaccaugccucucuccugcacaaagaauaacagucaucauuauauaaugguagguaaugagacaggacuagaacugaccuugaccaacacaagcauuauuaaucauaaauuuugcaaucugucugaugcccacaaaaagaaccucuaugaccaugcccuuaugagcauaauuucaacuuuccacuuguccauccccaacuucaaucaguaugaagcaaugagcugugauuucaaugggggaaagauuagugugcaguacaaccugagucacagcuaugcuggggaugcugccaaccauuguggcacuguugcaaauggugucuuacagacuuucaugaggauggcuuggggugggagcuacauugcucuugacucaggcugcggcaagugggacuguauuaugacuaguuaucaauaucugauaauccaaaauacaaccugggaagaucacugccaauucucaagaccaucuccuaucgguuaucuugggcuucucucacaaaggaccagagauauuuauaucaguagaagacgccggggcacauucacauggacacugucagauucugaaggcaaggacacaccagggggauauugucugaccagauggaugcugauugaagcugaauuaaaaugcuucgggaacacagcuguagcaaaauguaaugagaagcaugaugaggaauuuugugacauguugaggcuguuugacuucaacaaacaagccauucaaagguugaaagcucccgcacaaaugagcauucaguugaucaacaaggcaguaaaugccuugauaaaugaucaacuuauaaugaagaaccaucuacgggacaucaugugcaucccauacuguaauuacagcaaauauugguaccucaaccacacaacuacugggaaaacaucacugccuaaauguuggcuugucucaaaugggucauacuugaacgagacccacuuuucugaugauauugaacaacaagcugacaacaugaucacugagauguuacagaaggaguauauggagaggcaggggaagacaccauugggccuaguugaccucuuuguguucagcacaaguuucuaucucaucagcaucuuccuucaccuagucaaaauaccaacucauaggcauauuguaggcaagucguguccuaaaccucacagauugaaucacaugggcauauguuccuguggacucuacaaacagcccggugugccugugagauggaaaagauga

SEQ ID NO: 4015 - RNA, 1473 nt, Artificial Sequence
  derived and/or modified protein sequence (wt) from LASV(G2392-SLE-2012;Clade IV)__AIT17280__GPCstabilized
augggacaaauagugacauucuuccaggaagugccucauguaauagaagaggugaugaacauuguucucauugcacugucaauauuggcagugcuaaaaggucuguauaauuuugcuacauguggccucguugguuugguuacuuuccucuuacuguguggcaggucuugcacaaccagccuuuacaaaggaguuuaugagcuucagacucuagaacuaaacauggagacucucaauaugaccaugccccucucuugcacaaagaacaauagucaucauuacauaagggugggcaaugagacagggcuagaacugacuuuaaccaacacgagcauuauugaucauaaauuuugcaaucugucugaugcccacaaaaagaaccuuuaugaccacgcucuuaugagcauaaucucaacuuuccacuuguccaucccuaacuucaaucaguaugaggcaaugagcugugauuuuaaugggggaaagauuagugugcaguacaaccuaagucacagcuaugcuggggaugcagccaaccauuguggcacaguugcaaaugguguccugcagacuuucaugaggauggccugggguggaagcuacauugcucuugacucaggcugcgaaugggacugcauuaugaccagcuaucaauaccugauaauccaaaauacaaccugggacaaucauugccaguucucaagaccaucucccaucgguuaucucggucuccuuucgcaaaggaccagagacauuuauauuaguagaagacgccggggcacauucacauggacacugucagauucugaaggcaaggacacaccagggggguauugucugacuagauggaugcuaauugaggcugaacuaaaaugcuucgggaacacagcuguggcaaaaugcaaugagaaacaugacgaagaauucugugauaugcugaggcuguuugacuucaacaagcaggccauucaaagguuaaaaguccccgcacaaaugagcauucaguuaaucaacaaagcaguaaaugcucugauaaaugaucaacuaauaaugaagaaccauuuacgggauauuaugugcauuccauacuguaauuacagcaaguacugguaccucaaccacacaacuacugggaaaacaucacugcccaaauguuggcuuguaucaaauggaucauauuugaacgagacccacuuuuccgaugacauugagcaacaagcugacaauaugaucacugagauguugcagaaagaguauauggagagacaggggaaaacaccauugggccuaguugaccucuuuguguucagcacaaguuucuaucucauuagcaucuuccuucaccuagucaaaauaccaacucauaggcacauugugggcaagucauguccaaaaccucacagguugaaucacaugggcauauguuccugcggauucuauaaacagcccggugugccuguaaaauggaagagauga

SEQ ID NO: 4016 - RNA, 1476 nt, Artificial Sequence
  derived and/or modified protein sequence (wt) from LASV(G2405-SLE-2012;Clade IV)__AIT17284__GPCstabilized
augggacaaauagugacauucuuccaagaagugccccauguaauagaagaggugaugaacauuguucucauugcacuaucuguacuagcaguguugaaaggucuguacaauuuugcaacauguggcauuguuggcuuggucacuuuccuccuguuguguggcaggucuugcacaacuagccuuuacaaagggguuuaugagcuucagacccuggaacuaaacauggaaacacucaauaugaccaugccucucuccugcacaaagaacaauagucaucauuauauaauggugggcaaugauacaggacuagaacuaaccuugaccaacacgagcauuauuaaucauaaauuuugcaaucugucugaugcccacaaaaagaaccucuaugaccacgcucuuaugagcaucaucucaacuuuccacuuguccaucccuaacuucaaucaguaugaggcaaugagcugcgauuuuaaugggggaaagauuaguguucaguacaaccugagucacaguuaugccggagaugcagccgaccauuguggcacuguugcaaaugguguauuacagacuuucaugaggauggcuuggggugggagcuacauugcucuugacucaggcugcggcaggugggacuguauuaugacuaguuaucaauaucugauaauccaaaauacaaccugggaagaucacugccaauucucgagaccaucuccuaucgguuaucucgggcuccucucacaaaggaccagggauauuuauauuaguagaaggcgccgggguacauucacauggacacugucagacucugaaggcaaggacacaccagggggauauugucuaaccagauggaugcuaauugaggcugaacuaaagugcuucgggaacacagcuguggcaaaauguaaugagaaacaugaugaggaauuuugugacaugcugaggcuguuugacuucaacaaacaagccauucaaagauugaaagcucccgcacaaaugagcauucagcugaucaacaaagcagugaaugcuuugauaaaugaccaacuuauaaugaagaaccaucuacgggacaucaugugcauuccguacuguaauuacagcaaguauugguaccucaaccacacaacuacugggaaaacaucacugcccaaauguuggcuuguaucaaaugguucauaccugaacgagacccacuuuucugaugauauugaacaacaagcugacaacaugaucacugagauguuacagaaggaguauauggagaggcaggggaagacaccguugggucuaguugaccucuuuguguucagcacaagcuucuaucucauuagcaucuuucuucaccuaguuaaaauaccaacucauaggcauauuguaggcaagccgugucccaaaccucacagguugaaucauaugggcauuuguuccuguggacucuacaaacagccuggugugccugugaaguggaaaagauga

SEQ ID NO: 4017 - RNA, 1476 nt, Artificial Sequence
  derived and/or modified protein sequence (wt) from LASV(G2427-SLE-2012;Clade IV)__AIT17288__GPCstabilized
augggacaaauagugacauucuuccaggaagugccucauguaauugaagaggugaugaacauuguucucauugcacuguccauauuggcagugcugaaaggccuguacaauuuugcuacauguggccucguugguuugguuacuuuccucuuauuguguggcaggucuugcacaacuagucuuuacaaagggguuuaugaacuucagacucuggaacuaaacauggagacacucaauaugaccaugccucucucuugcacaaagaacaauagucaucauuacauaauggugggcaaugagacagggcuggaacuaaccuugaccaacacgagcauuauuaaucacaaguuuuguaaucugucugaugcccacaaaaagaaccucuaugaccacgcucuuaugaguauaaucucaacuuuccacuuguccauccccaacuuuaaucaguaugaggcaaugagcugugauuuuaauggaggaaagauuagugugcaguacaaccugagucacagcuaugcuguggaugcagccaaccauuguggcacaguugcaaauggugucuuacagacuuucaugaggauggccugggguggaggauacauugcucuugacucaggcugcggcaauugggauugcauuaugaccagcuaucaauaucugauaauccaaaacacaaccugggaggaccacugccaauucucaagacccucucccaucgguuaucucggucuccuuucacaaaggaccagagauauuuauaucagcagaagacgccggggcacauuuacauggacacugucagacucugaaggcaaggacacaccaggaggguauuguuugacuagauggaugcuaauugaggcugaacugaaauguuucgggaacacagcuguggcaaaaugcaaugagaaacaugaugaggaauuuugugauaugcugaggcuguuugacuucaacaaacaagccauucaaagguuaaaagcucccgcacaaaugagcauucaguugaucaacaaagcaguaaaugcuuugauaaaugaucaacugauaaugaagaaccaucuacgggacauuaugugcauuccauacuguaauuacagcaaauacugguaccucaaucacacaguuacugggaaaacaucacugccuaaauguuggcuuguaucaaaugguucauauuugaaugagacucacuuuucugaugacauugagcaacaagcugacaauaugaucacugagauguugcagaaagaguacauggagaggcaagggaaaacaccauugggucuaguugaccucuuuguguucagcacaaguuuuuaucucauuagcaucuuccuucauuuggucaaaauaccuacucauaggcauauugugggcaagucgugcccaaaaccucauagguugaaucacauggguauauguuccugcggacucuacaaacagcccggugugccuguaagauggaagagauga

SEQ ID NO: 4018 - RNA, 1476 nt, Artificial Sequence
  derived and/or modified protein sequence (wt) from LASV(G2431-SLE-2012;Clade IV)__AIT17292__GPCstabilized
auggggcaaauaguaacauucuuccaagaagugccucaugugauagaggagguaaugaauauuguacucaucgcacugucgauaauggcaguacugaaagguuuguacaauauugcaacauguggccucgucgguuuaguuaccuuucucuugcugugugguagguccugcacaaccacccucuacaagggggucuaugagcugcagacccuggaacugaacauggaaacacucaacaugaccaugccucucucuugcacaaagaauaauagucaccacuauauuaugguggguaaugagacaggacuagaacugaccuuaaccaauacaagcauuaucaaccacaaauuuugcaaucugucugaugcucacaaaaagaaccucuaugaucaugcucuuaugagcauaaucucaacuuuccauuuauccauuccuaacuucaaucaguaugaggcaaugagcugugacuucaaugggggaaagaucagugugcaguacaaccugagucacagcuaugcuggagaugcagcuaaccauuguggcacaguugcaaaugguguccuucagacuuucaugaggauggcuugggguggaaguuauauugcucuugauucaggcugcgguggaugggacuguauuaugaccaguuaucaguaucuaauaauucaaaauacaaccugggaagaucacugccaauucacaagaccaucucccaucgguuaucuugggcuccucucacaaagaaccagagauauuuauauuaguagaagacgccggggaacauucacauggacacugucagauucugaagggaaugacacaccagggggguauuguuugacuagauggaugcuaauugaagcugaguugaagugcuuuggcaauacagcuguugcaaaauguaaugaaaagcaugaugaagaguuuugugacaugcuaaggcuguuugauuuuaacaaacaggcuauccaaagacugagagcucccgcacaaaugaguauucaauuaaucaacaaagcagugaaugcccugauaaaugaucaacuaauaaugaaaaaccauuuacgggacauuaugugcauuccauacuguaacuacagcaaguauugguaucuuaaccacacaaccaccggaagaacaucauugccuagaugcuggcuuguaucuaaugguucauaccucaaugaaacucacuucucagaugacauugaacagcaggcugacaacaugauuacugagauguuacaaaaggaguacauggagagacaggggaaaacaccauuggguuugguugaucuuuuuguuuucagcacaaguuucuaucucauuagcaucuuucuucaccugaucaaaauaccaacucacaggcauauugugggcaaaccaugucccaaaccucacagguuaaaccacauggguguuugcuccuguggacucuauaagcaaccuggugugcccguaagguggaagagauga

SEQ ID NO: 4019 - RNA, 1476 nt, Artificial Sequence
  derived and/or modified protein sequence (wt) from LASV(G2511-SLE-2012;Clade IV)__AIT17294__GPCstabilized
augggacaaauagugacauucuuccaggaagugccccaugugauagaagaggugaugaacauuguucucauugcacugucuauacuagcaguguugaagggucuguacaaucuugcaacauguggccucguuggcuuggucacuuuccuccuguuguguggcaggucuuguacaacuagccuuuacaaagggguuuaugagcuucagacucuggaacuaaacauggaaacacucaacaugaccaugccucucuccugcacaaagaacaauagucaucauuacauaauggugggcaaugagacaggacuagaacugaccuugaccaacacaagcauuauugaucauaaauuuugcaaucuaucugaugcccacaaaaagaaccucuaugaccacgcucuuaugagcauuaucucaaccuuccacuuguccaucccuaacuucaaucaguaugaggcaaugagcugcgauuuuaaugggggaaagaucagugugcaguacaaccugagucacagcuaugccggggaugcagccaaccauuguggcacugucgcaaaugguguauuacagacuuucaugaggauggcuuggggugggagcuacauugcucuugacucaggcugcggcgggugggacuguauuaugacuaguuaucaauaucugauaauccaaaauacaacuugggaagaucacugccaauucucgagaccaucucccgucgguuaucucggacuccucucacaaaggaccagagauauuuacauuaguagaaggcgccggggcacauucacauggacacugucagauucugaaggcaaggacacaccagggggauauugucuaaccagauggaugcuaauugaagcugaacuaaagugcuucgggaacacagcuguggcaaaauguaaugagaaacaugaugaggaauuuugugacaugcugaggcuguuugacuucaauaaacaagccauucaaagguugaaaacucccgcacaaaugagcauucaguugaucaacaaagcaguaaaugcuuugauaaaugaccaacuuauaaugaagaaccaucuacgggauaucaugugcauuccauacuguaauuacagcaaguauugguaccucaaccacacaacuacugggaaaacaucacugcccagauguuggcuuguaucaaaugguucauaccugaaugagacccacuuuucugaugauaucgaacaacaagcugacaauaugaucacugagaugcuacagaaggaguauauggagaggcaggggaagacaccauugggucugguugaccucuuuguguucagcacaagcuucuaucucaucagcaucuuccuucaccuaguuaagauaccaacucauaggcauauugugggcaagccgugucccaaaccucacagauugaaucauaugggcauuuguuccuguggacucuacaaacagccuggugugccugugaaauggaagagauga

SEQ ID NO: 4020 - RNA, 1476 nt, Artificial Sequence
  derived and/or modified protein sequence (wt) from LASV(G2554-SLE-2012;Clade IV)__AIT17298__GPCstabilized
augggacaaauagugacauucuuccaagaagugccucauguaauagaagaggugaugaacauuguucucaucgcacugucuauacuagcagugcugaagggucuguacaacauugcaacauguggccuccuuggcuuggucugcuuccucuuguuguguggcaggucuugcacaaccagucuuuacaaagggguuuaugagcuucagacucuggagcuaaacauggagacacucaacaugaccaugccucucucuugcacaaagaacaacagucaucauuacauaauggugggcaaugagacaggacuggaacugacuuugaccaacacaagcauuauuaaucauaaauuuugcaaucugucugacgcccauaagaagaaccucuaugaccacgcucuuaugagcauaaucucaacuuuccacuuguccauccccaacuucaaucaguaugaagcaaugagcugugauuuuaaugggggaaagaucaguguacaguacaaucuuagucacagcuaugcuguggaugcagccagccauuguggcacaaucgcaaauggugucuuacagacuuucaugaggauggccuggggugggaguuacauugcucuugauucuggcugcggagggugggacugcauaaugaccaguuaucaauauuugauaauccaaaacacaaccugggaagaucacugccaauucucaagaccaucuccuauugguuaucuugggcuccucucgcagagaaccagagauauuuauauuaguaggagacgccggggcacauucacauggacauugucagauucugaaggcaaggacacaccagggggguauugucugaccagauggaugcugauugaggcugaacugaaaugcuucgggaauacagcuguggcaaaguguaaugagaaacacgaugaggaauuuugugauaugcugaggcuguuugacuucaacaaacaagccauucaaagguuaaaagcucccgcacaaaugagcauucaguugaucaacaaagcaguaaaugcucuaauaaaugaccaacuaauaaugaagaaccaucuacgggacaucaugugcauuccauacuguaauuacagcaaguacugguaccucaaccacacaacuacugggaaaacaucacugcccaaauguuggcuuguaucgaaugguucauacuuaaacgagacccacuuuucugaugauauugaacaacaggcugacaacaugaucacugagauguuacagaaagaguacauggaaaggcaggggaagacaccauugggucuaguugaccucuuuguguucagcacaaguuucuaucucauuagcaucuuccuucauuuagucaagauaccaacucacaggcauguuguaggcaagccgugucccaaaccucacagauugaaucacaugggcauaugcuccugcggacucuauggacagccugguguaccugugaaauggaagagauga

SEQ ID NO: 4021 - RNA, 1476 nt, Artificial Sequence
  derived and/or modified protein sequence (wt) from LASV(G2557-SLE-2012;Clade IV)__AIT17302__GPCstabilized
augggacaaauagugacuuucuuccaggaggugccucaugugauagaggaggugaugaacauugugcucaucgcauugucucuacuggcaguguugaaaggucuguacaauguugcaacauguggccucauuggucuggucaccuuccuuuugcugugugguagauccuguacaaccaaucuuuacaaaggaguuuaugagcuucagacucuggaacuaaauauggagacacucaauaugaccaugccucucucuugcacaaagaacaauagucaccacuauauaaugguggguaaugagacgggacuggaacugaccuugaccaacacaaguaucaucagccacaaguuuuguaaucugucugaugcucacaaaaagaaucucuaugaucacacccuuaugagcauaauuucgacuuuucauuuguccauucccaacuucaaucaguaugaagcaaugagcugugacuucaauggagggaaaauuagugugcaauacaaccuaagccacagcuaugcuguggaugcagccaaccauuguggcacaguugcaaaugguguccuacagacuuucaugaggauggcuuggggugggagcuauauugcccuugauucaggcugcgguaauugggauuguauuaugacuaguuaccaauaucuaauaauucaaaauacaaccugggaagaucacugccaguucucaagaccaucucccaucggcuaucuugggcuccucucacaaaggaccagagacauuuacauuaguagaagacgccggggcacauucacauggacacuaucggauucugaaggcaaugacacaccagggggauacugccugaccagguggauguuaauugaagcugaguugaaaugcuucgguaacacagcuguagccaaaugcaaugaaaaacaugaugaagaauucugugacaugcugagacuguuugacuuuaacaaacaagccauucaaagauuaaaggcucccgcacaaaugaguauccaguugaucaacaaggcagugaaugcucugauuaaugaccaauugauaaugaaaaaccaucuacgggacaucaugugcauuccauacuguaacuauaguaaguacugguaucucaaccacacaaccacugggaaaacaucguugcccaaauguuggcuugugucuaaugguucauaucuaaacgagacccacuuuucugaugacauugaacagcaagccgacaacaugauaacugaaauguugcaaaaagaguacauggagagacaggggaagacaccauuaggucugguugaccucuuuguguucagcacaaguuucuaccucauuagcaucuuucuucaccuggucaaaauaccaacacauagacacauuguuggcaaaccguguccgaaaccucacaggcugaaucacaugggcauauguuccuguggacucuacaaacaaccugguguaccugucagauggaagagauga

SEQ ID NO: 4022 - RNA, 1476 nt, Artificial Sequence
  derived and/or modified protein sequence (wt) from LASV(G2587-SLE-2012;Clade IV)__AIT17310__GPCstabilized
augggacaaauagugacauucuuccaggaggugccccaugugauagaagaggugaugaacauuguucucauugcacugucuauacuagcaguguugaagggucuguacaaucuugcaacauguggccuuguuggcuuggucacuuuccuccuguuguguggcaggucuuguacaacuagccuuuacaaagggguuuaugagcuucagacucuggaacuaaacauggaaacacucaauaugaccaugccucucuccugcacaaagaacaauagucaucauuacauaauggugggcaaugagacaggacuggaacugaccuugaccaacacgagcaucauuaaucauaaauuuugcaaucugucugaugcccacaaaaagaaucucuaugaccacgcucuuaugagcauuaucucaaccuuccacuuguccaucccuaacuucaaucaguaugaggcaaugagcugcgauuuuaaugggggaaagaucagugugcaguacaaccugagucacagcuaugccggggaugcagccacucacuguggcacugucgcaaaugguguauuacagacuuucaugaggauggcuuggggugggagcuacauugcucuugacucaggcugcggcaagugggacuguaucaugacuaguuaucaauaucugauaauccaaaauacaaccugggaagaucacugccaauucucgagaccaucucccauugguuaucuugggcuccuuucacaaaggaccagagauauuuacauuaguagaaggcgccggggcacauucacauggacacugucagauucugaaggcaaggacacaccagggggauauugucuaaccagauggaugcugauugaagcugaacuaaagugcuucgggaacacagcuguggcaaaauguaaugagaagcaugaugaggaauuuugugacaugcugagguuguuugacuuuaauaaacaagccauucaaagguuaaaaacucccgcacaaaugagcauucaguugaucaacaaagcaguaaaugcuuugauaaaugaccaacuuauaaugaagaaccaucuacgggauaucaugugcauuccauacuguaauuacagcaaguauugguaccucaaccacacaacuacugggaaaacaucacugcccagauguuggcuuguaucaaaugguucauaccugaacgagacccacuuuucugaugauaucgaacaacaagcugacaauaugaucacugagaugcuacagaaggaauauauggagaggcaggggaagacaccauugggucugguugaccucuuugucuucagcacaagcuucuaucucaucagcaucuuccuucaccuaguuaagauaccaacucauaggcauauuguaggcaagccgugucccaaaccucacaggcugaauuauaugggcauuuguuccuguggacucuacaaacagccuggugugccugugaaauggaagagauga

SEQ ID NO: 4023 - RNA, 1476 nt, Artificial Sequence
  derived and/or modified protein sequence (wt) from LASV(G2612-SLE-2012;Clade IV)__AIT17314__GPCstabilized
augggacaaauagugacauucuuccaagaaguaccccauguaauagaagaggugaugaacauuguucucauuacauugucuauacuagcaguguugaaaggucuguacaauguugcgacauguggccucguuggcuuggucacuuuccuccuguuguguggcaggucuugcacaaccagccuuuacaaagggguuuaugagcuucagacucuggaacuaaacauggaaacacucaauaugaccaugccucucuccugcacaaagaacaauagucaucauuacauaauggugggcaaugagacaggacuagaacugaccuugaccaacacgagcauuauuaaucauaaauuuugcaaucugucugaugcccacaaaaaagaccucuaugaccacgcucucaugagcaucaucucaaccuuccacuuguccaucccuaacuucaaucaguaugaggcaaugagcugcgauuuuaaugggggaaagauuagugugcaguacaaccugagucacagcuaugccguggaugcagccaaccauuguggcacuguugcaaaugguguauuacagacuuucaugaggauggcuuggggugggagcuacauugcucuugacucaggcugcggcgggugggacuguauuaugacuaguuaucaauaucugauaauccaaaauacaaccugggaagaucacugccaauucucgagaccaucucccaucgguuaucucgggcuccucucacaaaggaccagggauauuuauaucaguagaaggcgccggggcacauucacauggacacugucagauucugaaggcaaugacacaccagggggauauugucuaaccagauggaugcuaauugaagcugaacuaaagugcuucgggaacacagcuguggcaaaguguaaugagaagcaugaugaggaauuuugugacaugcugaggcuguuugacuucaacaaacaagccauucaaagguugaaagcucccgcacaaaugagcauucaguugaucaacaaagcaguaaaugcuuugauaaaugaccaacuuauaaugaaaaaccaucuacgagacaucaugugcauuccauacuguaauuacagcaaguauugguaccucaaccacacaacuacugggaaaacaucacugcccaaauguuggcuuguaucaaaugguucauaccugaacgagacccacuuuucugaugauauugaacaacaagcugacaacaugaucacugagauguuacagaaggaguauauggagaggcaggggaagacaccauugggucugguugaccucuuuguguucagcacaagcuucuaucucauuagcaucuuccuucaccuaguuaaaauaccaacucauaggcauauuguaggcaagccgugucccaaaccucacagacugaaucauauggguauuuguuccuguggacucuacaaacagccuggugugccuguuaaauggaagagauga

SEQ ID NO: 4024 - RNA, 1476 nt, Artificial Sequence
  derived and/or modified protein sequence (wt) from LASV(G2615-SLE-2012;Clade IV)__AIT17318__GPCstabilized
augggacaaauagugacuuucuuccaggaagugccucaugugauagaggaggugaugaacauugugcucaucgcauugucuuuacuggcaguuuugaaaggucuguacaauguugcaacauguggccucauuggucuggucaccuuccuuuuacuguguggcagauccugcacaaccaaucuuuacaaaggagucuaugagcuucagacucuggaacuaaauauggagacacucaauaugaccaugccucucucuugcacaaagaacaauagucaccacuauauaaugguggguaaugagacgggacuggaauugaccuugaccaacacaagcaucaucaaccacaaguuuuguaaucugucugaugcucacaaaaagaaucucuaugaucacgcccuuaugagcauaaucucgacuuuucacuuguccauucccaacuucaaucaguaugaagcaaugagcugugacuucaauggagggaaaauuagugugcaguacaacuuaagccacagcuaugcuguggaugcagccaaccacuguggcacaguugcaaaugguguccugcagacuuucaugaggauggccuggggugggagcuauauugcccuugauucaggcugcgguaauugggauuguaucaugacuaguuaccaauaucuaauaauucagaauauaaccugggaagaucacugccaguucucaagaccaucucccaucggcuaucuugggcuucucucacaaaggaccagagacauuuacauuaguagaagacgccggggcacauucacauggacacuaucagauucugaaggcaaugacacaccagggggauacugucugaccagguggauguuaauugaagcugaacugaaaugcuucgguaacacagcuguggccaaaugcaaugaaaaacaugaugaagaauucugugacaugcugagacuguuugacuuuaacaaacaagccauucaaagauuaaaggcucccgcacaaaugaguauccaguugaucaacaaggcagugaaugcucuaauuaaugaccaauugauaaugaaaaaccaucuacgggacaucaugugcauuccauacugcaacuauaguaaguauugguaucucaaccacacaaccacuggaaaaacaucguuacccaaaugcuggcuugugucuaaugguucauaccuaaacgagacccacuuuucugaugacauugaacagcaagccgacaacaugauaacugaaauguuacaaaaagaguacauggagagacaggggaagacaccauuaggucugguugaccucuuuguguucagcacaaguuucuaccucauuagcauuuuucuucaccuagucaaaauaccaacacauaggcacauuguuggcaaaccguguccgaaaccucacaggcugaaucacaugggcauauguuccuguggacucuacaaacaaccugguguaccugucagauggaagagauga

SEQ ID NO: 4025 - RNA, 1476 nt, Artificial Sequence
  derived and/or modified protein sequence (wt) from LASV(G2723-SLE-2012;Clade IV)__AIT17322__GPCstabilized
augggacaaauaguaacuuucuuccaggaggugccucaugugauagaggaggugaugaacauugugcucaucgcauugucucuacuggcaguguugaaaggucuguacaauguugcaacauguggccucauuggucuggucaccuuccuuuuacugugugguagauccugcacaaccaaucuuuacaaaggagccuaugagcuucagacucuggaacuaaauauggagacacucaauaugaccaugccucucucuugcacaaagaacaauagucaccacuauauaaugguggguaaugagacgggacuggaauugaccuugaccaacacaagcaucaucaaccacaaguuuugcaaucugucugaugcucacaaaaagaaucucuaugaucacacccuuaugagcauaaucucgacuuuucacuuguccauucccaacuucaaucaguaugaagcaaugagcugugacuucaauggagggaaaauuagugugcaguacaacuuaagccacagcuaugcuguggaugcagccaaccauugugguacaguugcaaaugguguccuacagacuuucaugaggauggccuggggugggagcuacauugcccuugauucaggcugcgguaauugggauuguauuaugaccaguuaccaauaucuaauaauucagaauacaaccugggaagaucacugccaguucucaagaccaucucccaucggcuaucuugggcuccucucacaaaggaccagagacauuuacauuaguagaagacgccggggcacauucacauggacacuaucagauucugaaggcaaugacacaccagggggauacugucugaccagguggauguuaauugaggcugagcugaagugcuucgguaacacagcuguagccaaaugcaaugaaaaacaugaugaagaauucugugacaugcugagacuguuugacuuuaacaaacaagcuauucaaagauuaaaggcucccgcacaaaugaguauccaguugaucaacaaggcagugaaugcucuaauuaaugaccaauuaauaaugaaaaaccaucuacgggacaucaugugcauuccauacuguaacuauaguaaguauugguaucucaaccacacaaccacuggaaaaacaucauugcccaagugcuggcuuguaucuaaugguucauaucuaaacgagacccacuuuucugaugacauugaacagcaagccgacaacaugauaacugaaauguugcaaaaggaguacauggagagacaggggaagacaccauuaggucugguugaccucuuuguguucagcacaaguuucuaccucauuaguauuuuucuucaccuagucaaaauaccaacacauaggcacauuguuggcaaaccguguccgaaaccucacaggcugaaucauaugggcauauguucuuguggacucuauaaacaaccugguguaccugucagauggaagagauga

SEQ ID NO: 4026 - RNA, 1476 nt, Artificial Sequence
  derived and/or modified protein sequence (wt) from LASV(G2868-SLE-2012;Clade IV)__AIT17328__GPCstabilized
augggacaaauagugacauucuuccaagaagugccucauguaauagaagaggugaugaacauuguucucauuacacugucuauacuggcaguguugaaaggucuguacaacauugcaacauguggccuuguugguuuggucacuuuccuccuguugugugguaagucuugcacaaccagccucuauaaagggguuuaugagcuccagacucuggaacuaaacauggagacacucaauaugaccaugccucucuccugcacaaagaacaacagucaucauuauauaagggugggcaaugagacaggacuagaacugaccuugacuaacacgagcauuauuaaucauaaauuuuguaaucugucugaugcccacaaaaagaaccucuaugaccacgcucuuaugagcauaaucucaacuuuccacuuguccauccccaacuucaaucaguaugaggcgaugagcugcgauuuuaaugggggaaaaauuagugugcaguacaacuugagucauagcuaugcuguagaugcagccaaccauuguggcacuguugcaaaugguguauugcagacuuucaugaggauggcuuggggugggagcuacauugcucuugacucagguugcgguaauugggacuguaucaugacuaguuaucaauauuuaauaauccaaaauacaaccugggaagaucacugccaauucucgagaccaucuccuaucgguuaccuugggcuccucucacaaaggaccagagauauuuacauuagcagaagacgccggggcacauucacauggacacuaucagauucugaaggcaaugacgcaccagggggauauugucugaccagauggaugcuaauugaggcugaacuaaaaugcuucgggaacacagcuguagcaaaauguaaugagaaacaugaugaggaguuuugugacaugcugaggcuguuugacuucaauaaacaagccauucaaagguugaaagcucccgcacaaaugagcauucaguugaucaacaaagcaguaaaugcuuuaauaaaugaccaacucauaaugaagaaccaccugcgggacaucaugugcauuccauacuguaauuacagcaaguauugguaccucaaccacacaacuacugggaaaacaucacugcccaaauguuggcuuguaucaaaugguucguacuugaacgagacucacuuuucugaugauauugaacaacaagcugacaacaugaucacugagauguuacagaaggaguacauggagaggcaggggaagacaccauugggccugguugaccucuuuguguucagcacaaguuucuaucucauuagcaucuuccuccaccuggucaaaauaccaacucauaggcauguuguaggcaagucgugucccaaaccucacagacugaaucacaugggcauauguucuuguggacucuacaaacagccuggugugccuguaaaauggaagagauga

SEQ ID NO: 4027 - RNA, 1476 nt, Artificial Sequence
  derived and/or modified protein sequence (wt) from LASV(G2903-SLE-2012;Clade IV)__AIT17332__GPCstabilized
augggacaaauagugacauucuuccaggaagugccucauguaauagaagaggugaugaacauuguucucauugcacugucuauacuggcagugcugaaaggucuguacaaucuugcaacauguggccucguugguuuggucacuuuccuccuguugugugguaggucuugcacaaccagucuuuacaaagggguuuaugagcuucagacucuggaacuaaacauggagacacucaacaugaccaugccucucuccugcacaaagaacaacagucaucauuauauaagggugggcaaugagacaggacuagaacugaccuugaccaacacgagcauuauuaaucacaaguuuugcaaccugucugaugcccacaaaaagaaccucuaugaccacgcccucaugagcauaaucucaacuuuccacuuguccauccccaacuucaaucaguaugaggcaaugagcugcgauuucaaugggggaaagauuagugugcaguacaaccugagucacagcuaugccguagaugcagccaaucauuguggcacuguugcaaaugguguacugcagacuuucaugaggauggcuuggggugggagcuacauugcucuugacucagguugcgguagaugggacuguaucaugacuaguuaucaauaucugauaauccaaaauacaaccugggaagaucacugccuauucucgagaccaucucccaucgguuaucucgggcuccucucacaaagaacuagagauauuuauaucaguagaagacgccggggcacauucacauggacauugucagauucugaaggcagggacacaccagggggauauugucuaaccagguggaugcuaauugaggcugaacuaaaaugcuucgggaacacagcuguggcaaaauguaaugaaaaacaugaugaggaauuuugugacaugcugaggcuguuugacuucaacaaacaagccauucaaagguugaaagcucccgcacaaaugagcauucaguuaaucaacaaagcaguaaaugcuuugauaaaugaucaacuuauaaugaagaaccaucuacgggacaucaugugcaucccauacuguaauuacagcaaauauugguaccucaaccacacaacuacuggaagaacaucacugccuagauguuggcuuguaucaaaugguucauaccugaacgaaacccacuuuucugaugauauugaacaacaagcugacaacaugaucacugagauguuacaaaaagaguauauggaaaggcaggggaagacaccauugggccuaguugaucucuuuguguuuagcacaaguuucuaccuuauuagcaucuuucuucaccuagucaaaauaccaacucauaggcauauuguaggcaagucgugucccaaaccucacagacugaaucacaugggcauuuguuccugugggcucuacaaacagccuggugugccuguaaaauggaagagauga

SEQ ID NO: 4028 - RNA, 1476 nt, Artificial Sequence
  derived and/or modified protein sequence (wt) from LASV(G2944-SLE-2012;Clade IV)__AIT17340__GPCstabilized
augggacaaauagugacauucuuccaggaagugccccaugucauagaagaggugaugaacaucguucucauugcacugucuauacuagcaguguugaaaggucuguacaacuucgcaacauguggccucguuggcuuggucacuuuccuccuguuguguggcaggucuugcacaacuagccuuuacaaggggguuuaugagcuucagacucuggaacuaaacauggaaacacucaauaugaccaugccucucuccugcacaaagaacaauagucaucauuauauaauggugggcaaugagacaggacuagaacugaccuugaccaacauaagcauuauuaaccauaaauuuugcaaucugucugaugcccacaaaaagaaccucuaugaccacgcucucaugagcauuaucucaacuuuccacuuguccaucccuaacuucaaucaguaugaggcaaugagcugcgauuucaaugggggaaagauuaguguacaauacaaccugagccacagcuaugccggggacgcagccaaccauuguggcacuguugcaaaugguguauuacagacuuucaugaggauggcuuggggugggagcuacaucgcucuugacucaggcugcggcgagugggacuguauuaugacgaguuaucaauaucugauaauccaaaauacaaccugggaagaucacugccaauucucgagaccaucucccaucgguuaucucgggcuccucucacaaaggaccagagauauuuauauuaguagaaggcgccggggcacauucacauggacacugucagauucugaaggcaaggacacaccagggggauauugucuaaccagauggaugcuaauugaggcugagcuaaagugcuucgggaacacagcuguggcaaaauguaaugagaagcaugaugaggaauuuugugacaugcugagguuguuugacuuuaacaaacaagccauucaaagguugaaagcucccgcacaaaugagcauucaguuaaucaacaaagcaguaaaugcuuugauaaaugaccaacuuauaaugaagaaccaucuacgggacaucaugugcauuccauacuguaauuacagcaaguauugguaccucaaccacacaacuacuggaaaaacaucacugcccaaguguuggcuuguuucaaaugguucauaccugaacgagacccacuuuucugaugacauugaacaacaagcugacaacaugaucacugagauguuacagaaggaguauauggagaggcaggggaagacaccauugggucugguugaccucuuuguguucagcacaagcuucuaucucauuagcaucuuccuucaccuaguuaaaauaccaacucauaggcauauuguaggcaagccgugucccagaccucacagguugaaucauaugggcauuuguuccuguggacucuauaaacagccuggugugccuguaaaauggaagagauga

SEQ ID NO: 4029 - RNA, 1476 nt, Artificial Sequence
  derived and/or modified protein sequence (wt) from LASV(G3010-SLE-2013;Clade IV)__AIT17344__GPCstabilized
augggacagauaguaacauucuuccaggaagugccucaugugauagaagaggugaugaacauuguucucauugcacugucuauauuagcagugcugaaaggucuguacaauuuugcaacauguggccucguugguuugguuaccuuccuccuguuaugugguaggucuugcacaaccagucuuuacaaagggguuuaugagcuucagacucuggaacuaaacauggagacacucaauaugaccaugccucucuccuguacaaagaacaacagucaucauuauauuaugguggguaaugagacaggacuagaacugaccuugaccaacacgagcaucauuaaucauaaauuuugcaaucugucugaugcccacaaaaagaaccucuauaaucacgcucuuaugagcauaauuucaacuuuccaucuguccauucccaacuucaaucaguaugaggcaaugagcugcgauuucaaugggggaaagauuagugugcaguacaaccugagucacaguuaugcuggggaugcggccagccauuguggcacuguugcaaauggugucuuacagacuuucaugaggauggcuugggguggaagcuauauugcucuugacucaggcugcggcaagugggacugcauuaugacuaguuaucaguaccugauaauucaaaauacaaccugggaagaucacugccaauucucaagaccaucucccauuggcuaucucgggcuccucucacaaaggaccagagauauuuauauuaguagaagacgccggggcacauucacauggacacugucggauucugaagguaaggacacaccagggggauauuguuugaccagauggaugcuaauugaagcugaacuaaagugcuucgggaacacagcuguagcaaaauguaaugagaagcaugaugaggaauuuugugacaugcugaggcuguuugacuucaacaaacaagccauucaaagauugaaaacucccgcacaaaugagcauucaguugaucaacaaggcaguaaaugccuuaauaaaugaccagcuuauaaugaagaaccaucuacgagacauaaugugcauuccauacuguaacuacagcaaguauugguaccucaaccacacaaccacugggaaaacaucacugccuaaauguuggcuuguaucaaauggcucauacuugaaugagacccacuuuucugaugauauugaacaacaggcugacaacaugaucacugagauguuacagaaagaguacauggagaggcaggggaagacaccauugggccuggucgaccuuuuuguguucagcacaaguuucuaucucaucaguaucuuucuucaccuagucaaaauaccaacucauagacauauuguaggaaagucgugucccaaaccucacagauugaaucacaugggcauauguuccuguggacucuacaaacagcccggugugccugugagauggaagagauga

SEQ ID NO: 4030 - RNA, 1476 nt, Artificial Sequence
  derived and/or modified protein sequence (wt) from LASV(G3016-SLE-2013;Clade IV)__AIT17348__GPCstabilized
augggacaaauagugacauucuuccaagaaguaccccauguaauagaagaggugaugaacauuguucucauugcacugucuauacuagcaguguugaaaggucuguacaauauugcgacauguggccucauuggcuuggucacuuuccuccuguuguguggcaggucuugcacaacuagccuuuacaaagggguuuaugaacuucagacucuggaacuaaacauggaaacacucaauaugaccaugccucucuccugcacaaagaacaauagucaucauuacauaauggugggcaaugagacaggauuagaacugaccuugaccaacacgagcauuauuaaucauaaauuuuguaaucugucugaugcccacaaaaagaaccucuaugaccacgcucucaugagcauuaucucaaccuuccacuuguccaucccuaacuucaaucaguaugaggcaaugagcugcgauuuuaaugggggaaagaucagugugcaguauaaccugagucacagcuaugccggggaugcagccaaccacuguggcacuguugcaaaugguguacuacagacuuucaugaggauggcuuggggugggagcuacauugcucuugacucaggcugcggcaggugggauuguauuaugacuaguuaucaauaucugauaauccaaaauacaaccugggaagaucacugccaauucucgagaccaucucccaucggcuaucucgggcuccucucacaaaggaccagggacauuuacauuaguagaaggcgccggggcacauucacauggacacugucagauuccgaaggcaaugacacaccagggggauauugucuaaccagauggaugcuaauugaagcugaacuaaagugcuucgggaacacagcuguggcaaaguguaaugagaagcaugaugaggaauuuugugacaugcugaggcuguuugacuucaacaaacaagccauucaaagguugaaagcucccgcacaaaugagcauucaguugaucaacaaagcaguaaaugcuuuaauaaaugaccaacucauaaugaagaaccaucuacgagacaucaugugcauuccauacuguaauuacagcaaguauugguaccucaaccacacaacuacugggaaaacaucacugcccaaauguuggcuuguaucaaauggaucauaccugaacgagacccacuuuucugaugauauugaacaacaagcugacaacaugaucacugagauguuacagaaggaguauauggagaggcaggggaagacaccauugggucugguugaccucuuuguguucagcacaagcuucuaucucauuagcaucuuccuucaccuaguuaaaauaccaacucauaggcauauuguaggcaagccgugucccaaaccucacagguugaaucauaugggcauuuguuccuguggacucuauaaacagccuggugugccuguuaaauggaagagauga

SEQ ID NO: 4031 - RNA, 1476 nt, Artificial Sequence
  derived and/or modified protein sequence (wt) from LASV(G3034-SLE-2013;Clade IV)__AIT17350__GPCstabilized
auggggcaaauagugacuuuuuuccaggaagugccucaugugauagaggaggugaugaacauuguacucaucgcacugucuauacuugcggugcuaaaagguuuguacaauguugcaacauguggucuuauugguuugguuaccuuucuuuuacugugugguagaucuuguacaaccacucuguacaaaggaguuuaugaacuucaggccuuggaauugaacauggagacacucaauaugaccaugccucucucuugcacaaagaacaauagccaucauuauauaaugguaggcaaugagacaggacuggaacuaaccuugaccaauacaaguaucaucgaucacaaguuuugcaaccugucugaugcccacaaaaagaaccucuaugaucaugcucuuaugaguauaaucucaacuuuccacuuguccauucccaacuuuaaucaguaugaagcaaugaguugugacuuuaauggagggaaaauuaguguacaauacaaccuaagucacagcuaugcuggagaugcagccaagcauuguggcacaguugcgaauggcguuuugcagaccuucaugagaauggccuggggugggaguuacauugcucuugacucagguugcaauggaugggauuguguuaugacuaguuaucaauaucuaauaauucaaaacacaaccugggaagaucacugccaguucucaagaccaucucccauuggcuaccuugggcuccucucacaaaggaccagagacauuuacauuaguagaagacgccggggcacauucacauggacacugucagauucugaaggcaaagauacaccagggggguacugucugacuagauggaugcuaauugaggcugaacugaaauguuucggcaacacagcuguugccaaauguaaugagaagcaugaugaagaauucugugauaugcugaggcuauuugacuucaacaagcaagccauccaaagguuaaagacucccgcacaaaugagcauucaguugaucaacaaggcugugaaugcuuuaauaaaugaucaacugauaaugaaaaaccaucugcgggauaucaugugcauuccauacuguaacuacagcaaguacugguaucucaaccacacaguuacugggaaaacaucacugccuagaugcuggcuuguaucaaauggcucauauuuaaacgagacccacuucucugaugacauugagcaacaagcugacaacaugaucacugagauguugcaaaaggaguacauagagaggcaggggaagacaccauugggucugguugaccucuuuguguucagcacaaguuuuuaucucauuaguaucuuccuucaccuagucaaaauaccaacucauagacacauuauaggcaaaccguguccaaaaccucacaggcugaaucauaugggcauaugcuccugugggcucuauaaacaaccuggugugccuguaagauggaagagauaa

SEQ ID NO: 4032 - RNA, 1476 nt, Artificial Sequence
  derived and/or modified protein sequence (wt) from LASV(G3101-SLE-2013;Clade IV)__AIT17354__GPCstabilized
augggacaaauagugacauucuuccaggaagugccccauguuauagaagaggugaugaacaucguucucauugcacugucuauacuagcaguguugaaaggucuguacaacuucgcaacauguggccucguuggcuuggucacuuuccuccuguuguguggcaggucuugcacaacuagccuuuacaaggggguuuaugagcuucagacucuggaacuaaacauggaaacacucaauaugaccaugccucucuccugcacaaagaacaauagucaucauuauauaauggugggcaaugagacaggacuagaacugaccuugaccaacauaagcauuauuaaccauaaauuuugcaaucugucugaugcccacaaaaagaaccucuaugaccacgcucuuaugagcauuaucucaacuuuccacuuguccaucccuaacuucaaucaguaugaggcaaugagcugcgauuucaaugggggaaagauuaguguacaguacaaccugagccacagcuaugccggggacgcagccaaccauuguggcacuguugcaaaugguguauuacagacuuucaugaggauggcuuggggugggagcuacaucgcucuugacucaggcugcggcgggugggacuguauuaugacgaguuaucaauaucugauaauccaaaauacaaccugggaagaucacugccaauucucgagaccaucucccaucgguuaucucgggcuccucucacaaaggaccagagauauuuauauuaguagaaggcgccggggcacauucacauggacacugucagauucugaaggcaaggacacaccagggggauauugucuaaccagauggaugcuaauugaggcugagcuaaagugcuucgggaacacagcuguggcaaaauguaaugagaagcaugaugaggaauuuugugacaugcugagguuguuugacuuuaacaaacaagccauucaaagguugaaagcucccgcacaaaugagcauucaguugaucaacaaagcaguaaaugcucugauaaaugaccaacuuauaaugaagaaccaucuacgggacaucaugugcauuccauacuguaauuacagcaaguauugguaccucaaccacacaacuacuggaaaaacaucacugcccaaguguuggcuuguuucaaaugguucauaccugaacgagacccacuuuucugaugacauugaacaacaagcugacaacaugaucacugagauguuacagaaggaguauauggagaggcaggggaagacaccauugggucugguugaccucuuuguguucagcacaagcuucuaucucauuagcaucuuccuucaccuaguuaaaauaccaacucauaggcauauuguaggcaagccgugucccagaccucacagguugaaucauaugggcauuuguuccuguggacucuauaaacagccuggugugccuguaaaauggaagagauga

SEQ ID NO: 4033 - RNA, 1476 nt, Artificial Sequence
  derived and/or modified protein sequence (wt) from LASV(G3110-SLE-2013;Clade IV)__AIT17360__GPCstabilized
augggacaaauagugacauucuuccaggaagugccucauguaauagaagaggugaugaacauuguucucauugcacugucaauauuggcagugcuaaaaggucuguauaauuuugcuacauguggccucguugguuuggucacuuuccucuuacuguguggcaggucuugcacaaccagccuuuacaaaggaguuuaugagcuucagacucuggaacuaaacauggagacucucaauaugaccaugccucucucuugcacaaagaacaauagucaucauuacauaagggugggcaaugagacagggcuagaacugaccuuaaccaacacaagcauuauuaaucaucgauuuugcaaucugucugaugcccacaaaaagaaccuuuaugaccacgcucuuaugagcauaaucucaacuuuccacuuguccaucccuaacuucaaucaguaugaggcaaugagcugugauuuuaaugggggaaagauuagugugcaauacaaccuaagucacagcuaugcuggggaugcagccaaccauuguggcacaguugcaaaugguguccugcagacuuucaugaggauggccugggguggaagcuacauugcucuugacucaggcugcggcaagugggacuguauuaugaccagcuaucaauaccugauaauccaaaauacaaccugggacgaucauugccaguucucgagaccaucucccaucgguuaucucggucuccuuucgcaaaggaccagagacauuuauauuaguagaagacgccggggcacauucacauggacacugucagauucugaaggcaaggacacaccagggggauauugucugacuagauggaugcugauugaggcugaacuaaaaugcuucgggaacacagcuguggcaaaaugcaaugagaaacaugacgaagaauucugugauaugcugaggcuguuugacuucaacaaacaggccauucgaagguuaaaagcccccgcacaaaugagcauucaguuaauuaacaaagcaguaaaugcucugauaaaugaucaacuaauaaugaagaaccaucuacgggauaucaugugcauuccauacuguaauuacagcaaauacugguaccucaaccacacaacuacugggaaaacaucacugcccagauguuggcuuguaucaaauggaucauauuugaaugagacccacuuuuccgaugacauugagcaacaagcugacaauaugaucacugagauguugcagaaagaguauauggagagacaggggaaaacaccauuaggccuaguugaccucuuuguguucagcacaaguuuuuaucucauuagcaucuuccuucacuuagucaaaauaccaacucauaggcauauuguaggcaagucguguccaaaaccucacagguugaaucacauggguauauguuccugcgguuucuauaaacagcccggugugccugugaaauggaagagauga

SEQ ID NO: 4034 - RNA, 1476 nt, Artificial Sequence
  derived and/or modified protein sequence (wt) from LASV(G3148-SLE-2013;Clade IV)__AIT17364__GPCstabilized
augggacaaauagugacauucuuccaggaagugccccaugucauagaagagguaaugaacaucguucucauugcacugucuauacuagcaguguugaaaggucuguauaauuuugcaacauguggccucguuggcuuagucacuuuccuccuguuguguggcaggucuugcacaacuagccuuuacaaggggguuuaugagcuucagacucuggaacuaaacauggaaacacucaauaugaccaugccucucuccugcacaaagaacaacagucaucauuauauaauggugggcaaugaaacaggacuagaacugaccuugaccaacacgagcauuauuaaucauaaauuuugcaaucugucugaugcccacaagaagaaccucuaugaccacgcucuuaugagcauuaucucaacuuuccacuuguccaucccuaacuucaaucaguaugaggcaaugagcugcgauuucaaugggggaaagauuagugugcaguacaaccugagucacagcuaugccggggacgcagccaaccauuguggcacuguugcaaaugguguauuacagacuuucaugaggauggcuuggggugggagcuacauugcucuugacucaggcugcgacaggugggacuguauuaugacuaguuaucaauaucugauaauccaaaauacaaccugggaagaucacugucaauucucgagaccaucucccaucgguuaucucgggcuccucucacaaaggaccagagauauuuauauuaguagaaggcgccggggcacauucacauggacacugucagauucugaaggcaaggacacaccagggggauauugucuaaccagauggaugcuaauugaggcugagcuaaagugcuucgggaacacagcuguggcaaaguguaaugagaagcaugaugaggaauuuugugacaugcugaggcuguuugacuuuaacaaacaagccauucaaagguugaaagcucccgcacaaaugagcauucaguugaucaacaaggcaguaaaugcuuugauaaaugaccaacuuauaaugaagaaccaucuacgggacaucaugugcauuccauacuguaauuacagcaaguauugguaccucaaccacacaacuacuggaaaaacaucacugcccaaguguuggcuuguaucaaaugguucauaccugaacgagacccacuuuucugaugacauugaacaacaagcugacaacaugaucacugagauguuacagaaggaguauauagagaggcaggggaagacaccauugggucugguugaccucuuuguguucagcacaagcuucuaucucauuagcaucuuccuucaccuaguuaaaauaccaacucauaggcauauugugggcaagccguguccuaaaccucacagguugaaucauaugggcauuuguuccuguggacucuauaaacagccuggugugucugugaaauggaagagauga

SEQ ID NO: 4035 - RNA, 1476 nt, Artificial Sequence
  derived and/or modified protein sequence (wt) from LASV(G3151-SLE-2013;Clade IV)__AIT17368__GPCstabilized
augggacaaauagugacauucuuccaggaagugccucauguaauagaagaggugaugaacauuguucucauugcacugucaauauuggcagugcuaaaaggucuguauaauuuugcuacauguggccucguugguuugguuacuuuccucuuacuguguggcaggucuugcacaaccagccuuuacaaaggaguuuaugagcuucagacucuggaacuaaacauggagacucucaauaugacuaugccucucucuugcacaaagaacaauagucaucauuacauaauggugggcaaugagacagggcuagaacugaccuuaaccaacacgagcauuauuaaucauaaauuuugcaaucugucugaugcccacaaaaagaaccuuuaugaccacgcucuuaugagcauaaucucaacuuuccacuuguccaucccuaacuucaaucaguuugaggcaaugagcugugauuuuaaugggggaaagauuagugugcaguacaaccuaagucacagcuaugcuggggaugcagccaaccauuguggcacaguugcaaaugguguccugcagacuuucaugaggauggccugggguggaagcuacauugcucuugacucaggcugcagcaagugggacugcauuaugaccagcuaucaauaccugauaauccaaaacacaaccugggacgaucauugccaguucucaagaccaucucccaucgguuaucuuggucuccuuucgcaaaggaccagagacauuuauauuaguagaagacgccggggcacauucacauggacucuaucagauucugaaggcaaggacacaccagggggguauugucugacuagauggaugcuaauugaggcugaacuaaaaugcuucgggaacacagcuguggcaaaaugcaaugagaaacaugacgaagaauucugugauaugcugaggcuguuugacuucaacaaacaggccauucaaagguuaaaagcccccgcacaaaugagcauucaguuaauuaacaaggcaguaaaugcucugauaaaugaucaacuaauaaugaagaaccaucuacgggauauuaugugcauuccauacuguaauuacagcaaauacugguaccucaaccacacaacuacugggaaaacaucacugcccaaauguuggcuuguaucaaauggaucauauuugaacgagacccacuuuuccgaugacauugagcaacaagcugacaauaugaucacugagauguugcagaaagaguauauggagagacagggaaaaacaccauugggccuaguugaccucuuuguguucagcacaaguuucuaucucauuagcaucuuccuucacuuagucaaaauaccaacucacaggcauauuguagguaagucguguccaaaaccucacagguugaauuacaugggcauauguuccugcggauucuauaaacagcccggugugccuguaaaauggaagagauga

SEQ ID NO: 4036 - RNA, 1476 nt, Artificial Sequence
  derived and/or modified protein sequence (wt) from LASV(G3157-SLE-2013;Clade IV)__AIT17370__GPCstabilized
augggacaaauagugacauucuuccaggaagugccccaugucauagaagaggugaugaacaucguucucauugcacugucuauacuagcaguguugaaaggucuguacaauuuugcaacauguggccucguuggcuuagucacuuuccuccuguuguguggcaggucuugcacaacuagccuuuacaaggggguuuaugagcuucagacucuggaacuaaacauggaaacacucaauaugaccaugccucucuccugcacaaagaacaacagucaucauuauauaauggugggcaaugaaacaggacuagaacugaccuugaccaacacgagcauuauuaaucauaaauuuugcaaucugucugaugcccacaaaaagaaccucuaugaccacgcucuuaugagcauuaucucaacuuuccacuuguccaucccuaacuucaaucaguaugaggcaaugagcugcgauuucaaugguggaaagauuagugugcaguacaaccugagucacagcuaugccggggacgcagccaaccauuguggcacuguugcaaaugguguauuacagacuuucaugaggauggcuuggggugggagcuacauugcucuugacucaggcugcgacaggugggacuguauuaugacuaguuaucaauaucugauaauccaaaacacaaccugggaagaucacugucaauucucgagaccaucucccaucgguuaucucgggcuccucucacaaaggaccagagauauuuauauuaguagaaggcgccggggcacauucacauggacacugucagauucugaaggcaaggacacaccagggggauauugucuaaccagauggaugcuaauugaggcugagcuaaagugcuucgggaacacagcuguggcaaaguguaaugagaagcaugaugaggaauuuugugacaugcugaggcuguuugacuuuaacaaacaagccauucaaagguugaaagcucccgcacaaaugagcauucaguugaucaacaaggcaguaaaugcuuugauaaaugaccaacuuauaaugaagaaccaucuacgggacaucaugugcauuccauacuguaauuacagcaaguauugguaccucaaccacacaacuacuggaaaaacaucacugcccaaguguuggcuuguaucaaaugguucauaccugaacgagacccacuuuucugaugacauugaacaacaagcugacaacaugaucacugagauguuacagaaggaguauauggagaggcaggggaagacaccauugggucugguugaccucuuuguguucagcacaagcuucuaucucauuagcaucuuccuucaccuaguuaaaauaccaacucauaggcauauugugggcaagccguguccuaaaccucacagguugaaucauaugggcauuuguuccuguggacucuauaaacagccuggugugucugugaaauggaagagauga

SEQ ID NO: 4037 - RNA, 1476 nt, Artificial Sequence
  derived and/or modified protein sequence (wt) from LASV(G3206-SLE-2013;Clade IV)__AIT17378__GPCstabilized
augggacaaauagugacauucuuccaggaagugccucauguaauagaagaggugaugaacauuguucucauugcacugucuauacuagcagugcugaaaggucuguacaaucuugcaacauguggccucguugguuuggucacuuuccuccuguugugugguaggucuugcacaaccagucuuuacaaagggguuuaugagcuucagacucuggaacuaaacauggagacacucaacaugaccaugccucucuccugcacaaagaacaacagucaucauuauauaauggugggcaaugagacaggacuagaacugaccuugaccaacacgagcauuauuaaucauaaauuuugcaaccugucugaugcccacaaaaagaaccucuaugaucacacucuuaugagcauaaucucaacuuuccacuuguccauccccaacuucaaucaguaugaggcaaugagcugcgauuuuaaugggggaaagaucagugugcaguacaaccugagucacagcuaugccguggaugcagccaaccauuguggcacuguugcaaaugguguacuacagacuuucaugaggauggcuuggggugggagcuacauugcucuugacucaggcugcagugggugggacugcauuaugacuaguuaucaauaucugguaauccaaaauacgaccugggaagaucacugccaauucucgagaccaucuccuaucgguuaucucgggcuccucucacaaaggaccagagauauuuauaucaguagaagacgccggggcacauucacauggacacugucagauuccgaaggcaagaacacaccagggggauauugucugaccagguggaugcuaauugaggcugaauuaaaaugcuucgggaacacagcuguggccaaauguaacgagaaacaugaugaggaguuuugugacaugcuaaggcuguuugacuucaacaaacaagccauucaaagguugaaagcucccgcacaaaugagcauucaguugaucaacaaagcagugaaugcuuugauaaaugaucaacuuauaaugaagaaccaucuacgggacauuaugugcaucccauacuguaauuacagcaaguauugguaccucaaccacacaacuacugggagaacaucacugccuagauguuggcuuguaucaaaugguucauaccugaacgagacccacuuuucugaugauauugaacaacaagcugacaacaugaucacugagauguuacagaaggaguauauggaaaggcaggggaagacaccacugggucuaguugaucucuuuguguucagcacaaguuucuaucucauuagcaucuuccuucaccuagucaaaauaccaacucauaggcauauuguaggcaagucaugucccaaaccucacagacugaaucacaugggcauuuguuccuguggguucuauaaacagccuggugugccugugaaauggaagagauga

SEQ ID NO: 4038 - RNA, 1476 nt, Artificial Sequence
  derived and/or modified protein sequence (wt) from LASV(G3234-SLE-2013;Clade IV)__AIT17388__GPCstabilized
augggacaaauagugacauuuuuccaggaagugccucaugugauagaggaagugaugaacauuguacucaucgcacugucuauucuugcaguguuaaaggguuuguacaauguugcaacauguggccucauugguuugguuaccuuucuuuuacugugugguagaucuugcacaaccacucuguacaaaggagucuaugaacuucaggcccuggaauuaaacauggagacacucaauaugaccaugccucucucuugcacaaagaacaauagucaccacuauauaaggguggguaaugagacaggacuagaacuaaccuugaccaacacauccaucaucaaucauaaguuuugcaacuuaucugaugcccacaaaaagaaccucuaugaucaugcacuuaugagcauaauuucaacuuuccacuuguccauuccuaacuuuaaucaguaugaagcaaugaguugugacuuuaauggagggauaaucagugugcaguacaaccuaagucacagcuaugcuggagacgcagccaaccauuguggcacaguugcaaauggcguuuugcagaccuucaugaggauggccuggggugggagcuacauugcucuugauucaggcugcaaugggugggauugcauuaugaccaguuaucaauaucugauaauucagaauacaaccugggacgaucacugccaauuuucaagaccaucucccauugguuaccuugggcuccucucacaaagaaccagagacaucuacauuagcaggagacgccggggcacauucacauggacacugucagauucugaagguaaggauacaccagggggguacugucugaccagauggaugcuaauugaagcugaacuuaaauguuucggcaacacagcuguagcuaaauguaaugagaagcaugaugaagaauucugugacaugcugaggcuauuugauuucaacaaacaagcuauccaaagguuaaagacucccgcacaaaugaacauucaguugaucaacaaggcugugaacgcuuuaauaaaugaucaauugauaaugaaaaaccaucugcgggauaucaugugcauuccauauuguaacuacagcaaguacugguaucucaacaacacagccacugggaaaacaucacugccuagaugcuggcuugugucaaauggcucauaucuaaacgagacccacuucucugaugacauugaacaacaagcugacaacaugaucacugagauguugcaaaaggaguacauggagagacagggaaagacaccauuaggucuggucgaccucuuuguguucagcacaaguuuuuaucucauuaguaucuuccuucaccuagucaaaauaccaacucauagacacauugugggcaaaccguguccuaaaccucacagguugaaucauauaggcauaugcuccuguggacucuauaaacaaccugguguaccuguaaaauggaagagauaa

SEQ ID NO: 4039 - RNA, 1476 nt, Artificial Sequence
  derived and/or modified protein sequence (wt) from LASV(G502-SLE-2009;Clade IV)__AIT17126__GPCstabilized
augggacagauagugacauucuuccaggaaguaccucauguaauagaagaggugaugaacauuguucucauugcacugucuauacuagcagugcugaaaggucuguauaauuuugcaacauguggccucguuggucuacucaccuuccuccuauuguguggcaggucuugcacaaccggacuuuacaaagggguuuaugagcuucaaacucuggaacuaaacauggagacacucaauaugaccaugccucucuccugcacaaagaacaacagucaucauuauauaaugguggguaaugagacaggacuagaacugacuuugacuaacacgagcaucauuaaucauaaauuuugcaaucugucugaugcccacaaaaagaaccuuuaugaccacgcucuuaugagcauaauuucaacuuuccacuuguccauccccaacuucaaucaguaugaggcaaugagcugcgauuuuaaugggggaaagauuaguguacaguacaaccugagccacaguuaugcuggggaugcggcugaucauuguggcacuguugcaaauggugucuugcagacuuucaugaggauggccuggggugggagcuacauugcucuugacucagguugcggcaggugggacuguauuaugacuaguuaucaauauuugauaauccaaaauacaaccugggaagaucacugccaguucucaagaccaucucccaucgguuaucucgggcuccucucacaaagaacuagagacauuuacauuaguagaaggcgccggggcacauucacauggacacugucagauucugaaggcaaggacacaccaggaggauauugucugacuagauggaugcugauugaggcugaauuaaaaugcuucgggaacacagcuguagcaaaauguaaugagaagcaugaugaggaauuuugugacaugcugaggcuguuugacuucaacaaacaagccauucaaagguuaaaagcucccgcacagaugagcauucaauugaucaacaaggcaguaaaugcuuugauaaaugaccaacuuguaaugaagaaccacuuacgggacaucaugugcauuccauacuguaauuacagcagguauugguaucucaaccacacaaccacuggaagaacaucacugccuaaauguuggcuugugucaaauggcucauacuuaaacgagacccacuuuucugaugauauugagcaacaagcugacaacaugaucacugagauguuacagaaggaauauauggaaaggcagggaaagacaccauuaggucugguugaccucuuuguguucagcacaaguuucuaucuuauuagcaucuuccuucaccuggucaagauaccaacucauaggcauauugugggcaagucgugucccaaaccucauagauugaaucacaugggcauauguuccuguggacucuacaaacagcccgguguaccugugaaauggaagagauga

SEQ ID NO: 4040 - RNA, 1476 nt, Artificial Sequence
  derived and/or modified protein sequence (wt) from LASV(G503-SLE-2009;Clade IV)__AIT17130__GPCstabilized
augggacagauagugacauucuuccaggaagugccucauguaauagaagaggugaugaacauuguucucauugcacugucuauauuagcagugcugaaaggucuguacaauuuugcaacauguggcuuuguuggcuuggucacuuuccuccuguuguguggcaggucuuguacaaccagucuuuacaaaggggucuaugagcuucagacucuggaacuaaacauggagacacucaauaugaccaugccucucucuugcacaaagaacaacagucaucauuacauaaggguggguaaugacacaggacuagaacugaccuugaccaacacguccauuauuaaucauaaguuuugcaauuugucugaugcccacaaaaagaaccuuuaugaccacgcucuuaugagcauaauuucaacuuuccacuugucuauccccaacuucaaucaguaugaggcaaugagcugcgauuuuaaugggggaaagauuagugugcaguacaaccugagucacagcuaugcuguggaugcggccagccauuguggcacuauugcaaaugguguuuugcagaccuucaugaggauggcuuggggugggagcuacauugcccuugacucaggcugcgacaggugggacuguauuaugacuaguuaucaauaucugauaauucaaaacacaaccugggaagaucacugccaauucucaagaccaucucccaucgguuaucucgggcuucucucacaaaggaccagagacaucuauauuaguagaagacgccggggcacauucacauggacacugucagauucugaaggcaaggacacaccagggggauauugucugaccagauggaugcuaauugaagcugaacuaaaaugcuucgggaacacagcuguagcaaaguguaaugagaaacaugaugaggaauuuugugacaugcugaggcuguuugacuucaacaaacaagccauucaaagguugaaagcucccgcacagaugagcauucaguugaucaacaaggcaguaaaugcuuugauaaaugaccaacuuauaaugaagaaccaucuacgggacaucaugugcauuccauacuguaauuacagcaaguauugguaccuuaaucacacaacuacugggaaaacaucacuaccuaaauguuggcuugugucaaauggcucauacuugaacgagacccacuuuucugaugauauugagcaacaagcugacaacaugaucacugagauguuacagaaggaguauauggagaggcagggaaagacaccauugggucuaguugaccucuuuguguuuagcacaaguuucuaucucauuaguaucuuccuucaccuagucaaaauaccaacccauaggcauauugugggcaagucgugucccaagccccacagauugaaccacauggguauauguuccuguggacucuauaaacagcccggugugccugugaaauggaagagauga

SEQ ID NO: 4041 - RNA, 1476 nt, Artificial Sequence
  derived and/or modified protein sequence (wt) from LASV(G610-SLE-2009;Clade IV)__AIT17134__GPCstabilized
augggacagauagugacauucuuccaggaagugccucauguaauagaagaggugaugaacauuguucucauugcacuguccauacuggcagugcugaaaggucuguacaauuuugcaacauguggccucguugguuugguuacuuuccuccuguuguguggcaggucuugcacaacuagucuuuauaaagggguuuaugagcuucagacucuggaacuaaauauggagacacucaauaugaccaugccucucuccugcacaaagaacaacagucaucauuacauaaugguggguaaugagacaggacuggaacugaccuugaccaacacaagcauuauuaaucauaaauuuugcaaucugucugaugcccacaaaaagaaccucuaugaccaugcccuuaugagcauaauuucaacuuuccacuuguccauccccaacuucaaucaguaugaggcaaugagcugcgacuucaaugggggaaagauuagugugcaguacaaccugagucacagcuaugcuggggaugcggccaaccacuguggcacuguugcaaauggugucuuacagacuuucaugaggauggcuuggggugggaguuacauugcucuugacucaggcugcggccggugggacuguauuaugacuaguuaucaauaucugauaauccaaaauacgaccugggaagaucacugccaauucucaagaccaucacccaucgguuaucucgggcuccucucacagaggaccagagauauuuauauuaguagaagacgccggggcacauuuacauggacacugucagauucugaagguaaggacacaccagggggauauugucugaccagauggaugcuaauugaagcugaauuaaaaugcuucggaaacacagcuguagcaaaauguaaugagaagcaugaugaggaauuuugugacaugcuaaggcuguuugacuucaacaaacaggcuauucaaaggcugaaagcucccgcacaaaugaguauucaguugaucaacaaggcaguaaaugcuuugauaaaugaccaacuuauaaugaagaaccaucuccgggacaucaugugcauuccauacuguaauuacagcaaguauugguaccucaaccacacaacuacugggaaaacaucacugcccaaauguuggcuuguaucaaauggcucauacuugaacgagacccacuuuucugaugauauugaacaacaagcugacaacaugaucacugagauguugcagaaggaguauauggagaggcaggggaagacaccauugggccugguugaccucuuuguguucagcacaaguuucuaucucauuagcaucuuccuucaccuaguuaaaauaccaacucauaggcauauuguaggcaagucaugucccaaaccucacagauugaaucauaugggcauauguucuuguggacucuauaaacaacccggugugccugugaaguggaagagauga

SEQ ID NO: 4042 - RNA, 1476 nt, Artificial Sequence
  derived and/or modified protein sequence (wt) from LASV(G636-SLE-2009;Clade IV)__AIT17138__GPCstabilized
auggggcaaauagugacauucuuccaggaagugccucauguaauagaagaggugaugaacauuguucucauugcacuguccauacuggcagugcugaaaggucuguacaaucuugcaacauguggccucguugguuuggucacuuuccuccuguugugugguaggucuugcacaaccagucuuuacaaagggguuuaugagcuucagacucuggaacuaaacauggagacacucaacaugaccaugccucucuccugcacaaagaacaacagucaucauuauauaaugguggguaaugagacaggacuagaacugaccuugaccaacacgagccuuauuaaucacaaauuuugcaaccugucugaugcccacaaaaagaaccucuaugaccacgcucuuaugagcauaaucucaacuuuccacuuguccauccccaacuucaaucaguaugaggcaaugagcugcgauuuuaaugggggaaagauuagugugcaguacaaccugagucacagcuaugccguggaugcagccagccauuguggcacuguugcaaaugguguacuacagacuuucaugaggauggcuuggggugggagcuacauugcucuugacucaggcugcgguggaugggacuguauuaugacuaguuaucaauaucugauaauccaaaauacaacuugggaagaucacugccaauucucgagaccaucuccuaucgguuaucucgggcuccucucacaaaggaccagagauauuuauaucaguagaagacgccggggcacauucacauggacauugucagauucugaaggcaaggacacaccagggggauauuguuugaccagauggaugcugauugaggcugaacuaaaaugcuucgggaauacagcuguggcaaaauguaaugagaaacaugaugaggaauuuugugacaugcugaggcuguuugacuucaacaaacaagccauucaaagguugaaagcucccgcacaaaugagcauucaguugaucaacaaagcaguaaaugcuuugauaaaugaucaacuuauaaugaagaaccaucuacgggauaucaugugcaucccauacuguaauuacagcaaguauugguaccucaaccacacaacuacugggagaacaucacugccuagauguuggcuuguaucaaaugguucauaccugaacgagacccacuuuucugaugauauugaacaacaagcugacaacaugaucacugagauguuacagaaggaguauauggaaaggcaggggaagacaccauugggccuaguugaucucuuuguguuuagcacaaguuucuaucucauuagcaucuuucuucaccuagucaaaauaccaacgcauaggcauauuguaggcaagucgugucccaaaccucacagacugaaucacaugggcauuuguuccugugggcuuuauaaacagccuggugugccuguaaaauggaagagauga

SEQ ID NO: 4043 - RNA, 1476 nt, Artificial Sequence
  derived and/or modified protein sequence (wt) from LASV(G692-SLE-2009;Clade IV)__AIT17146__GPCstabilized
augggacaaauagucacauucuuucaggaagugccccauguaauagaagaggugaugaacauuguucucauugcacugucuauacuagcagugcugaaaggucuguacaaucuugcaacauguggccucguuggcuuggucacuuuccuccuguuauguggaaggucuuguacaaccagccuuuacaaagggguuuaugagcuucagacucuggaacuaaacauggaaacacucaacaugacuaugccucucuccugcacaaagaacaacagucaucauuauauaaugguggguaaugagacaggauuagaacugaccuugaccaacacgagcauuauuaaccauaaauuuugcaaucugucugaugcccacaaaaagaaccucuaugaccacgcccuuaugagcauuaucucaacuuuccacuuguccauccccaacuucaaucaguaugaggcaaugagcugcgauuuuaaugggggaaagauuagugugcaguacaaccugagucauagcuaugccggggaugcagccaaccauuguggcacuguugcaaaugguguguuacagaccuucaugaggauggcuuggggugggagcuacauugcucuugacucaggcugcggcaggugggacuguaucaugacuaguuaucaauaucugauaauccagaauacaaccugggaagaucacugcaguuucucgagaccaucucccaucgguuaucucgggcuccucucacaaaggaccagagauauuuauauuaguagaaggcgccggggcacauucacauggacacugucagauucugaaggcaaggacacaccagggggauauugucugaccagauggaugcuaauugaggcugaacuaaagugcuuugggaauacagccguggcaaaauguaaugagaagcaugaugaggaauuuugugacaugcugaggcuguuugacuuuaacaaacaagccauucaaagguugaaagcucccgcacaaaugagcauucaguugaucaacaaagcaguaaaugcuuuaauaaaugaccaacuuauaaugaagaaccaucuacgggacaucaugugcauuccauacuguaauuacagcaaguauugguaccucaaccacacaacuacugggaaaacaucacugccuaaauguuggcuuguaucaaaugguucauaccugaaugagacccacuuuucugaugauauugaacaacaagcugacaacaugaucacugaaauguuacagaaggaguauauggagaggcagggaaagacaccauugggucuaguugaccucuuuguguuuagcacaaguuucuaucucaucagcaucuuccuucaccuagucaaaauaccaacucauaggcauauugugggcaagucaugucccaaaccucacagguugaaucauaugggcauuuguuccuguggauucuauaaacaaccuggugugccugugaaauggaagagauga

SEQ ID NO: 4044 - RNA, 1476 nt, Artificial Sequence
  derived and/or modified protein sequence (wt) from LASV(G733-SLE-2010;Clade IV)__AIT17154__GPCstabilized
augggacagauagugacauucuuccaggaagugccucauguaauagaagaggugaugaacauuguucucauugcacugucuauacuagcaguccugaagggucuguacaacuuugcaacauguggcaucguugguuuggucagcuuucuccuguuguguggcaggucuugcacaaccagucuuuacaaagggguuuaugagcuucagacucuggagcuaaacauggagacacuuaacaugaccaugccucucucuugcacaaagaacaacagucaucauuauauaauggugggcaaugagacgggauuggaacugaccuugaccaacacgagcauuaucaaucauaaauuuugcaaucuaucugaugcccauaagaagaaccucuaugaccacgcccuuaugaguauaaucucaaccuuccacuuguccauccccaacuucaaucaguaugaagcaaugagcugugauuucaaugggggaaagauuaguguacaguacaaccugagucacagcuaugcuggggaugcagccaaccauuguggcacaauugcaaauggugucuuacagacuuucaugaggauggccuggggugggagcuacauugcucuugacucaggcugcgacaggugggacugcauaaugaccaguuaucaauaucugauaauccaaaacacaaccugggaagaucacugccaauucucaagaccaucucccaucgguuaucuugggcuccucucacaaaggaccagagauauauauauuaguaggagacgccggggcacauuuacauggacauugucagauucugaagguaaggacacaccaggaggguauugucuaaccagauggaugcugauugaggcugagcugaaaugcuuugggaacacagcuguggcaaaaugcaaugagaaacaugaugaggaauuuugugauaugcuaaggcuguuugacuucaacaaacaagccauucaaagguuaaaagcucccgcacaaaugagcauucaguugaucaacaaagcagugaaugcuuugauaaacgaccaacuaauaaugaagaaccaucuacgggacaucaugugcauuccauacuguaauuacagcaaguacugguaccucaaccacacaacuacugggaaaacaucacugccuaaauguuggcuugugucgaaugguucauacuuaaacgagacucacuuuucugaugacauugaacaacaagcugacaauaugaucacugagauguuacagaaggaauacauggaaaggcaggggaagacaccauugggucuaguugaccucuuuguguucagcacaaguuucuaucucauuagcaucuuccuucauuuggucaaaauaccaacucauaggcauguuguaggcaagucgugucccaagccucacagauugaaucacaugggcauaugcuccugcggacucuauggacagccugguguaccugugaaauggaagagauga

SEQ ID NO: 4045 - RNA, 1476 nt, Artificial Sequence
  derived and/or modified protein sequence (wt) from LASV(G771-SLE-2010;Clade IV)__AIT17158__GPCstabilized
augggacagauagugacauucuuccaggaagugccucauguaauagaagaggugaugaacauuguucucauugcacuguccauacuggcagugcugaaaggucuguacaauuuugcaacauguggccucguugguuugguuacuuuccuccuguuguguggcaggucuugcacaacuagucuuuauaaagggguuuaugagcuucagacucuggaacuaaauauggagacacucaauaugaccaugccucucuccugcacaaagaacaacagucaucauuacauaaugguggguaaugagacaggacuggaacugaccuugaccaacacaagcauuauuaaucauaaauuuugcaaucugucugaugcccacaaaaagaaccucuaugaccaugcccuuaugagcauaauuucaacuuuccacuuguccauccccaacuucaaucaguaugaggcaaugagcugcgacuucaaugggggaaagauuagugugcaguacaaccugagucacagcuaugcuggggaugcggccaaccacuguggcacuguugcaaauggugucuuacagacuuucaugaggauggcuuggggugggaguuacauugcucuugacucaggcugcgaccggugggacuguauuaugacuaguuaucaauaucugauaauccaaaauacgaccugggaagaucacugccaauucucaagaccaucacccaucgguuaucucgggcuccucucacagaggaccagagauauuuauauuaguagaagacgccggggcacauuuacauggacacugucagauucugaagguaaggacacaccagggggauauugucugaccagauggaugcuaauugaagcugaauuaaaaugcuucggaaacacagcuguagcaaaauguaaugagaagcaugaugaggaauuuugugacaugcuaaggcuguuugacuucaacaaacaggcuauucaaaggcugaaagcucccgcacaaaugaguauucaguugaucaacaaggcaguaaaugcuuugauaaaugaccaacuuauaaugaagaaccaucuccgggacaucaugugcauuccauacuguaauuacagcaaguauugguaccucaaccacacaacuacugggaaaacaucacugcccaaauguuggcuuguaucaaaugguucauacuugaacgagacccacuuuucugaugauauugaacaacaagcugacaacaugaucacugagauguugcagaaggaguauauggagaggcaggggaagacaccauugggccugguugaccucuuuguguucagcacaaguuucuaucucauuagcaucuuccuucaccuaguuaaaauaccaacucauaggcauauuguaggcaagucaugucccaaaccucacagauugaaucauaugggcauauguucuuguggacucuauaaacaacccggugugccugugaaguggaagagauga

SEQ ID NO: 4046 - RNA, 1476 nt, Artificial Sequence
  derived and/or modified protein sequence (wt) from LASV(G808-SLE-2010;Clade IV)__AIT17164__GPCstabilized
augggacaaauagugacauucuuucaggaagugccucauguaauagaagaggugaugaacauuguucucauugcacucucuauacuagcagugcugaaaggucuguacaauuucgcaacauguggccucguugguuuggucacuuuccuccuguugugugguaggucuugcacaagcagucucuauaagggaguuuaugagcuucagacucuagaacuaaacauggagacacucaauaugaccaugccucucuccugcacaaagaacaacagccaccauuauauaagggugggcaaugagacaggacuagagcugaccuugaccaacacgagcauuauugaucauaaauuuugcaaucugucugaugcccacaaaaagaaccucuaugaccacgcucuuaugagcauaaucucaacuuuccauuuguccaucccuaacuucaaucaguaugaggcaaugagcugcgauuuuaaugggggaaagauuagugugcaguacaaccugagucacaguuaugcuggggaugcagccaaacauuguggcacuguugcaaauggugugcugcagacuuucaugaggauggcuuggggugggagcuacauugcucuugacucaggcugcggcaacugggacuguauuaugacuaguuaucaauauuugauaauccaaaauacaaccugggaagaucacugccaauucucgagaccaucucccaucgguuaucucgggcuccucucacaaaggaccagagauauuuauauuaguagaagacgccggggcacauucacauggacauugucagauucugaaggcaaugaugcaccagggggauauugucugacuagauggaugcugauucaggcugaacuaaaaugcuucgggaacacagcuguggcaaaauguaaugagaagcaugaugaggaguuuugugacaugcugaggcuguuugacuucaacaaacaggccauucaaagguugaaagcucccgcacaaaugagcauucaguugaucaacaaagcagugaaugcuuuaauaaaugaucaacuuauaaugaagaaccaccuacgggacauuaugugcauuccauacuguaauuacagcaaguauugguaccucaaccacacgacuacugggagaacaucacugcccagauguuggcuuguaucaaaugguucuuauuugaacgagacccacuuuucugaugauauugaacaacaagcugacaacaugaucacugagauguuacagaaggaguacauggagaggcaaggaaagacaccauugggucugguugaccuauuuguguucaguacgaguuucuaucucauuagcaucuuccuucaccuagucaaaauaccaacucauaggcauauuguaggcaagucguguccuaaaccucacagguuaaaccacaugggcauauguucuuguggucucuuuaaacagccuggugugccugugaaauggaagagauga

SEQ ID NO: 4047 - RNA, 1476 nt, Artificial Sequence
  derived and/or modified protein sequence (wt) from LASV(Guinea Faranah;Clade IV)__AMZ00381__GPCstabilized
augggacagauugugacauucuuccaagagguaccucaugugauagaggagguaaugaacauuguacucauugcauugucuauacuugcaguguugaaagguuuguacaauguggcaacauguggucucaucggccucauugcuuuucuucuacuguguggcagaucuuguacaucaacccuuuacaaagggguguaugaacuucaggcuuuagaauuaaacauggaaacacucaacaugaccaugccucucuccugcacaaaaaacaauucucaccauuacauuaugguggguaaugagacaggauuggaauuaacccugaccaacacaaguaucaucaaccacaaguuuugcaaccucucugaugcucauaaaaagaaucuauacaaccacgcucucaugagcauaauuucgacuuuccacuugucuauuccuaauuucaaucaguaugaggcaaugaguugugacuucaaugggggaaagaucagugugcaguacaaccugagccacaguuaugcuguggaugcagccaaccauuguggcacaguugccaauggcauucugcagaccuucaugaggauggccuggggugggagcuacauugcucuugacucaggcugcggugggugggacugcauuaugagcaguuaccaauauuugguaauucaaaacacaaccugggaagaccacugucaauucucgagaccaucccccauugguuaucuugggcuccuaucacagagaacuagagacaucuacauuaguaggagacgccgggguacauucaccuggacauuaucagauucugaaggcaaagacacaccaggaggauauuguuugaccagguggauguugauugaagcugaauugaaaugcuuuggaaacacagcuguagcaaaauguaaugaaaaacaugaugaagaauucugugacaugcuuagguuauuugauuucaacaagcaagccauucaaagauugaaagcucccgcacaaaugagcauacaauuaaucaacaaagcagugaaugcucuaauaaacgaucagcuaauuaugaagaaucauuugcgugacaucaugugcauaccauacugcaauuacaguaaguauugguaucuuaaccacacaaucacugggagaacuucccuaccaaaauguuggcuuguauccaauggcucauacuugaaugaaacccacuucuccgaugacaucgagcaacaagcugacaacaugaucacugagaugcugcagaaagaauaucuagagagacaagggaaaacaccacuagguuugguugaccuuuuuguguuuagcacgaguuuuuaccucauaagcauuuuccuacacuuaaucaaaauaccaacucauagacacauugugggcaaaucauguccuaaaccccacaggcuaaaucacauggguguaugcucauguggucucuacaaacagccuggcguuccugugagauggaagagauaa

SEQ ID NO: 4048 - RNA, 1476 nt, Artificial Sequence
  derived and/or modified protein sequence (wt) from LASV(GUINEA Z-185a;Clade IV)__AMZ00377__GPCstabilized
auggggcaaauagucacauuuuuccaggaagucccucauguaauagaggaggucaugaacauuguacuuauugcacuguccauacuagcugugcugaaagguuuguacaauguugcaacauguggccuuauuggcuuggucaccuuucucuuccuaugugguaggucuuguucaaccucucuuuacaagggaguuuaugagcuucagaccuuggaguugaacauggaaacacugaauaugacaaugccccucucuugcacaaagaacaacagucaccauuacauaaugguggguaaugagacaggacuagaacugacuuugaccaacacaaguauuauaaaucacaaguucugcaaucuaucugaugcccacaaaaagaaucucuaugaccacacucuuaugagcauaaucucaacuuuccaucugucuauacccaauuucaaucaguaugaagcaaugaguugugacuuuaauggggguaagaucagugugcaauacaaccugagucacaguuaugcuguagaugcagcuaaucauugugguacaguggcaaaugguguuuugcagaccuucaugaggauggcuuggggcggaaguuacauugcccuugauucagguugcggcaacugggacugcaucaugacuaguuaccaauaucuuguaauucagaacacaaccugggaagaccauugucaguucucaagaccaucucccaucggcuaucuugggcuccuuucacagagaaccagagauauuuacaucagcaggagacgccggggaacauucacauggacacuaucagauucugaagguaaggacacaccagggggguacuguuugaccagguggaugcugauugaagcugaguuaaagugcuuuggcaacacagccguggcaaaguguaaugagaaacaugaugaagaguuuugugacaugcugaggcuauuugacuucaacaaacaagccauccaaagauugaaagcccccgcucagaugaguauacagcugaucaacaaagcaguaaaugcucugauaaaugaucagcuaauaaugaagaaccauuugcgagacauuaugugcaucccauacugcaauuacagcaaauacugguaucucaaccacacagucacuggaaagacaucauugcccaaauguuggcuuguaucaaauggaucauaccuaaaugagacccacuucucugaugauaucgaacagcaagcugacaauuuaaucacugagauguuacaaaaggaauacauggaaagacaaggcaaaacaccauuagguuugguugaccucuuuguguucaguacaagcuuuuaccuuauaagcaucuuccuccaccuagucaaaauaccaacacauagacacauuguaggcaaaccauguccuaaaccucauaggcugaaccauauggguauauguuccugugguguuuacaaacaaccugguguaccugugagauggaaaagguaa

SEQ ID NO: 4049 - RNA, 1476 nt, Artificial Sequence
  derived and/or modified protein sequence (wt) from MOPV/LASV reassortant(IGS-1;Clade IV)__AFY05576__GPCstabilized
augggacaaauagugacauucuuccaggaagugccucauguaauagaagaggugaugaacauuguucucauugcacugucuguacuagcagugcugaaaggucuguacaauuuugcaacguguggccuuguugguuuggucacuuuccuccuguugugugguaggucuugcacaaccagucuuuauaaagggguuuaugagcuucagacucuggaacuaaacauggagacacucaauaugaccaugccucucuccugcacaaagaacaacagucaucauuauauaauggugggcaaugagacaggacuagaacugaccuugaccaacacgagcauuauuaaucacaaauuuugcaaucugucugaugcccacaaaaagaaccucuaugaccacgcucuuaugagcauaaucucaacuuuccacuuguccauccccaacuucaaucaguaugaggcaaugagcugcgauuuuaaugggggaaagauuagugugcaguacaaccugagucacagcuaugcuggggaugcagccaaccauugugguacuguugcaaaugguguguuacagacuuuuaugaggauggcuuggggugggagcuacauugcucuugacucaggcugcggcaacugggacuguauuaugacuaguuaucaauaucugauaauccaaaauacaaccugggaagaucacugccaauucucgagaccaucucccaucgguuaucucgggcuccucucacaaaggacuagagauauuuauauuaguagaagacgccggggcacauucacauggacacugucagauucugaaggugaagacacaccagggggauauugucugaccagguggaugcuaauugaggcugaacuaaaaugcuucgggaacacagcuguggcaaaauguaaugagaagcaugaugaggaauuuugugacaugcugaggcuguuugacuucaacaaacaagccauucaaagguugaaagcucccgcacaaaugagcauucaguugaucaacaaagcaguaaaugcuuugauaaaugaccaacuuauaaugaagaaccaucuacgggacaucaugugcauuccauacuguaauuacagcaaguauugguaccucaaccacacaacuacugggagaacaucacugcccaaauguuggcuuguaucaaaugguucauacuugaacgagacccacuuuucugaugauauugaacaacaagcugacaauaugaucacugagauguuacagaaggaguauauggagaggcaggggaagacaccauugggucuaguugaccucuuuguguucagcacaaguuucuaucuuauuagcaucuuccuucaccuagucaaaauaccaacucauaggcauauuguaggcaagucgugucccaaaccucacagauugaaucauaugggcauuuguuccuguggacucuacaaacagccuggugugccugugaaauggaagagauga

SEQ ID NO: 4050 - RNA, 1476 nt, Artificial Sequence
  derived and/or modified protein sequence (wt) from MOPV/LASV reassortant(IGS-11;Clade IV)__AFY05588__GPCstabilized
augggacaaauagugacauucuuccaggaagugccucauguaauagaagaggugaugaacauuguucucauugcacugucuguacuagcagugcugaaaggucuguacaauuuugcaacguguggccuuguugguuuggucacuuuccuccuguugugugguaggucuugcacaaccagucuuuauaaagggguuuaugagcuucagacucuggaacuaaacauggagacacucaauaugaccaugccucucuccugcacaaagaacaacagucaucauuauauaauggugggcaaugagacaggacuagaacugaccuugaccaacacgagcauuauuaaucacaaauuuugcaaucugucugaugcccacaaaaagaaccucuaugaccacgcucuuaugagcauaaucucaacuuuccacuuguccauccccaacuucaaucaguaugaggcaaugagcugcgauuuuaaugggggaaagauuagugugcaguacaaccugagucacagcuaugcuggggaugcagccaaccauugugguacuguugcaaaugguguguuacagacuuuuaugaggauggcuuggggugggagcuacauugcucuugacucaggcugcggcaacugggacuguauuaugacuaguuaucaauaucugauaauccaaaauacaaccugggaagaucacugccaauucucgagaccaucucccaucgguuaucucgggcuccucucacaaaggacuagagaucuuuauauuaguagaagacgccggggcacauucacauggacacugucagauucugaaggugaagacacaccagggggauauugucugaccagguggaugcuaauugaggcugaacuaaaaugcuucgggaacacagcuguggcaaaauguaaugagaagcaugaugaggaauuuugugacaugcugaggcuguuugacuucaacaaacaagccauucaaagguugaaagcucccgcacaaaugagcauucaguugaucaacaaagcaguaaaugcuuugauaaaugaccaacuuauaaugaagaaccaucuacgggacaucaugugcauuccauacuguaauuacagcaaguauugguaccucaaccacacaacuacugggagaacaucacugcccaaauguuggcuuguaucaaaugguucauacuugaacgagacccacuuuucugaugauauugaacaacaagcugacaauaugaucacugagauguuacagaaggaguauauggagaggcaggggaagacaccauugggucuaguugaccucuuuguguucagcacaaguuucuaucuuauuagcaucuuccuucaccuagucaaaauaccaacucauaggcauauuguaggcaagucgugucccaaaccucacagauugaaucauaugggcauuuguuccuguggacucuacaaacagccuggugugccugugaaauggaagagauga

SEQ ID NO: 4051 - RNA, 1476 nt, Artificial Sequence
  derived and/or modified protein sequence (wt) from MOPV/LASV reassortant(IGS-12;Clade IV)__AFY05590__GPCstabilized
augggacaaauagugacauucuuccaggaagugccucauguaauagaagaggugaugaacauuguucucauugcacugucuguacuagcagugcugaaaggucuguacaauuuugcaacguguggccuuguugguuuggucacuuuccuccuguugugugguaggucuugcacaaccagucuuuauaaagggguuuaugagcuucagacucuggaacuaaacauggagacacucaauaugaccaugccucucuccugcacaaagaacaacagucaucauuauauaauggugggcaaugagacaggacuagaacugaccuugaccaacacgagcauuauuaaucacaaauuuugcaaucugucugaugcccacaaaaagaaccucuaugaccacgcucuuaugagcauaaucucaacuuuccacuuguccauccccaacuucaaucaguaugaggcaaugagcugcgauuuuaaugggggaaagauuagugugcaguacaaccugagucacagcuaugcuggggaugcagccaaccauugugguacuguugcaaaugguguguuacagacuuuuaugaggauggcuuggggugggagcuacauugcucuugacucaggcugcggcaacugggacuguauuaugacuaguuaucaauaucugauaauccaaaauacaaccugggaagaucacugccaauucucgagaccaucucccaucgguuaucucgggcuccucucacaaaggacuagagauauguauauuaguagaagacgccggggcacauucacauggacacugucagauucugaaggugaagacacaccagggggauauugucugaccagguggaugcuaauugaggcugaacuaaaaugcuucgggaacacagcuguggcaaaauguaaugagaagcaugaugaggaauuuugugacaugcugaggcuguuugacuucaacaaacaagccauucaaagguugaaagcucccgcacaaaugagcauucaguugaucaacaaagcaguaaaugcuuugauaaaugaccaacuuauaaugaagaaccaucuacgggacaucaugugcauuccauacuguaauuacagcaaguauugguaccucaaccacacaacuacugggagaacaucacugcccaaauguuggcuuguaucaaaugguucauacuugaacgagacccacuuuucugaugauauugaacaacaagcugacaauaugaucacugagauguuacagaaggaguauauggagaggcaggggaagacaccauugggucuaguugaccucuuuguguucagcacaaguuucuaucuuauuagcaucuuccuucaccuagucaaaauaccaacucauaggcauauuguaggcaagucgugucccaaaccucacagauugaaucauaugggcauuuguuccuguggacucuacaaacagccuggugugccugugaaauggaagagauga

SEQ ID NO: 4052 - RNA, 1476 nt, Artificial Sequence
  derived and/or modified protein sequence (wt) from LASV(LM032-SLE-2010;Clade IV)__AIT17802__GPCstabilized
augggacagauagugacauucuuccaggaagugccucauguaauagaagaggugaugaacauuguucucauugcacuguccauacuggcagugcugaagggucuguacaaucuugcaacauguggccucguugguuugguuacuuuccucuuguuguguggcaggucuugcacaaccagucuuuauaaagggguuuaugagcuucagacucuggaacuaaauauggagacacucaauaugaccaugccucucuccugcacaaagaacaacagucaucauuacauaaugguggguaaugagacaggacuggaacugaccuugaccaauacgagcauuauuaaucauaaauuuugcaaucugucugaugcccacaaaaagaaccucuauaaccaugcccuuaugagcauaauuucaacuuuccacuuguccauccccaacuucaaucaguaugaggcaaugagcugcgauuuuaaugggggaaagauuagugugcaguacaaccugagucacagcuaugcuggggaugcggcuaaccacuguggaacuguugcaaauggugucuuacagacuuucaugaggauggcuuggggugggaguuacauugcucuugacucaggcugcgaccggugggacuguauuaugacuaguuaucaauaucugauaauccaaaauacaaccugggaagaucacugccaauucucaagaccaucacccaucgguuaucucgggcuccuuucacaaaggaccagagacauuuauauuagcaggagacgccggggcacauuuacauggacacugucagauucugaaggcaaggacacaccagggggguauugucugaccagauggaugcugauugaagcugaauugaaaugcuucggaaacacagcuguagcaaaauguaaugagaagcaugaugaggaauuuugugacaugcugaggcuguuugacuucaacaagcaagccauucagaggcugaaagcucccgcacaaaugagcauucaguugaucaacaaagcaguaaaugcuuugauaaaugaccaacucauaaugaagaaccaucuacgggacaucaugugcauuccauacuguaauuacagcaaguauugguaccucaaccacacaacuacugggaaaacaucacugcccaaauguuggcuuguaucaaaugguucauacuugaacgagacccauuuuucugaugauauugaacaacaagcugacaacaugaucaccgaaauguugcagaaggaguauauggagagacugggaaagacaccauugggucuaguugaccucuuuguguucagcacaaguuucuaucucauaagcaucuuccuucaccuagucaaaauaccaacucauaggcauauuguaggcaggucaugucccaaaccucacagauugaaucauaugggcauauguuccuguggacucuauaaacagcccggugugccugugaaauggaagagauga

SEQ ID NO: 4053 - RNA, 1476 nt, Artificial Sequence
  derived and/or modified protein sequence (wt) from LASV(LM222-SLE-2010;Clade IV)__AIT17806__GPCstabilized
augggacagauagugacauucuuccaggaagugccucauguaauagaagaggugaugaacauuguucucauugcgcugucuauauuagcagugcugaaaggucuauacaacuuugcaacauguggccucauuggccuggucacuuuucuccuguuguguggcagguccugcacaaccagucuuuauaaaggggucuaugagcuucagacucuggaguuaaacauggagacacucaauaugaccaugccucucuccugcacaaagaauaacagucaucauuauauaaugguaggcaaugagacaggacuagaacugaccuugaccaacacaaguauuauuaaucauaaauuuugcaaucugucugaugcucacaaaaagaaccucuaugaccacgcucuuaugagcauaauuucaacuuuccauuuguccauccccaacuucaaucaguaugaggcaaugagcugcgauuuuaaugggggaaagauuagugugcaguacaaccugagucacagcuaugcuggggaugcugccaaccauuguggcacuguugcaaauggugucuuacagacuuucaugagaauggcuuggggugggagcuacauugcucuugacucaggcugcggcaagugggauuguaucaugacuaguuaucaauaucugauaauucaaaauacaaccugggaagaucacugccaauucucaagaccaucuccuaucgguuaucuugggcuccucucacaaaggaccagagacauuuauaucaguagaagacgccggggcacauucacauggacacugucagauucugaaggcaaggacacaccagggggauauugucugaccagauggaugcugauugaagcugaauuaaaauguuucgggaacacagcuguggcaaaauguaaugagaagcaugaugaggaauuuugugacauguugaggcuguuugacuucaacaaacaggccauucaaagguugaaagcucccgcacaaaugagcauucaguugaucaacaaggcagugaaugccuugauaaaugaucaacuuauaaugaagaaccaucugcgagacaucaugugcauuccauacuguaauuauagcaaauauugguaccucaaccacacaacuacugggaaaacaucacugccuaaauguuggcuuguaucaaaugggucauacuugaacgagacccacuuuucugaugauauugaacaacaagcugacaacaugaucacugagauguuacagaaggaguauauggagaggcaggggaagacaccauugggccuaguugaccucuuuguguucagcacaaguuucuaucucaucagcaucuuccuucaccuagucaaaauaccaacucauaggcauauuguaggcaagucauguccuaaaccucacagauugaaucacaugggcauauguuccuguggacucuauaaacagcccggugugccugugaaauggaaaagauga

SEQ ID NO: 4054 - RNA, 1476 nt, Artificial Sequence
  derived and/or modified protein sequence (wt) from LASV(LM395-SLE-2009;Clade IV)__AIT17810__GPCstabilized
augggacaaauagugacauucuuccaggaagugccccauguaauagaagaggugaugaacauuguucucauugcacuguccauacuagcaguguugaagggucuguacaaucuugcaacauguggccucguuggcuuggucacuuuccuccuguuguguggcaggucuugcacaaccagccuuuacaaagggguuuaugagcuucagacucuggaacugaacauggaaacacucaauaugaccaugccucucuccugcacaaaagacaacagucaucauuacauaagggugggcaaugagacaggacuagaacugaccuugaccaacacgagcauucuuaaucauaaauuuugcaaucugucugaugcccacaaaaagaaccucuaugaccacgcucuuaugagcauuaucucuaccuuccacuuguccaucccuaacuucaaucaguaugaggcaaugagcugcgauuucaaugggggaaggauuagugugcaguacaaccugagucacagcuacgccggggaugcagccaaccauuguggcacuguugcaaaugguguacuacagacuuucaugaggauggcuuggggugggagcuacauugcucuugacucaggcugcggcaggugggacuguauuaugacuaguuaucaauaucugauaauucaaaauacaaccugggaagaucacugccaauucucgagaccaucucccaucgguuaucucgggcuucucucacaaaggaccagagauauuuauauuaguagaaggcgccggggcacauucacauggacacugucagauucugaaggcaaagacacaccagggggguauugucugaccagauggaugcuaauugaggcugaacuaaaguguuucgggaacacagcuguggcaaaauguaaugagaagcaugaugaagaauuuugugacaugcugaggcuguuugacuucaacaagcaagccauucaaagguugaaagcucccgcacaaaugagcauucaguugaucaacaaagcaguaaaugcuuugauaaaugaccaacuuauaaugaagaaccaucuacgggacaucaugugcauuccauacuguaauuacagcaaguauugguaccucaaucacacaacuacugggaaaacaucacugcccagauguuggcuuguaucaaaugguucauacuugaacgagacccacuuuucugaugauauugaacaacaagcugacaacaugaucacugagauguuacagaaggaguacauggagaggcaggggaagacaccauugggucuaguugaccucuuuguguucagcacaaguuucuaucucauuagcaucuuccuccaccuagucaaaauaccaacucauaggcauguuguaggcaagccgugucccaaaccucacagguugaaucauaugggcauuuguuccuguggacucuauaaacagccuggugugccugugaaauggaagagauga

SEQ ID NO: 4055 - RNA, 1476 nt, Artificial Sequence
  derived and/or modified protein sequence (wt) from LASV(LM765-SLE-2012;Clade IV)__AIT17814__GPCstabilized
augggacaaauagugacauucuuccaggaagugccccaugucauagaagaggugaugaacauuguucucauugcacuguccauacuagcagugcugaaaggucuguacaauuuugcaacauguggccucguuggcuuggucacuuuccuccuguuguguggcaggucuuguacaacuagccuuuacaaagggguuuaugagcuucagacucuggaacuaaacauggaaacacucaauaugaccaugccucucuccugcacaaagaacaauagucaucauuauauaauggugggcaaugagacaggacuagaacugaccuugaccaacacgagcauuauugaucauaaauuuugcaaucugucugaugcccacagaaagaaccucuaugaccacgcucuuaugagcauuaucucaacuuuccacuugucuaucccuaacuucaaucaguaugaggcaaugagcugcgauuucaaugggggaaagauuaguguacaguacaaccugagucacagcuaugccaaggacgcagccgaccauuguggaacuguugcaaaugguguauuacagacuuucaugaggauggcuuggggugggagcuacaucgcucuugacucaggcugcggcaggugggacuguauuaugacuaguuaucaauaucugauaauccaaaauacaaccugggaagaucacugccaauucucgagaccaucucccaucgguuaucucgggcuccucucacagaggaccagagauauuuauauuaguagaaggcgccggggcacauucacauggacacugucagauucugaaggcaaggacacaccagggggauauugucuaaccagauggaugcuaauugaggcugagcuaaagugcuucgggaauacagcuguggcaaaauguaaugagaagcaugaugaggaauuuugugacaugcugagguuguuugacuuuaacaagcaagccauucaaagguugaaagcucccgcacaaaugagcauucaguugaucaacaaagcaguaaaugcuuugauaaaugaccaacuuauaaugaagaaccaucuacgggacaucaugugcauuccauacuguaauuacagcaaguauugguaccucaaccacacaacuacuggaaaaacaucacugcccaaguguuggcuuguaucaaaugguucauaccugaacgagacccacuuuucugaugacauugaacaacaagcugacaacaugaucaccgagauguuacagaaggaguauauggagaggcaggggaagacaccauugggucugguugaccucuuuguguucagcacaagcuucuaucucauuagcaucuuccuucaccuaguuaaaauaccaacucauaggcauauuguaggcaagccgugucccaaaccucacagguugaaucauaugggcauuuguuccuguggacucuauaaacagccuggugugccuguaaaauggaagagauga

SEQ ID NO: 4056 - RNA, 1476 nt, Artificial Sequence
  derived and/or modified protein sequence (wt) from LASV(LM774-SLE-2012;Clade IV)__AIT17820__GPCstabilized
augggacagauagugacauucuuucaggaagugccucauguaauagaagaggugaugaacauuguucucauugcgcugucuauauuagcagugcugaaaggucuauacaacuuugcaacauguggccucguugguuugguuacuuuucuccuguuguguggcaggucuugcacaaccagucuuuauaaaggggucuaugagcuucagacucuggaguuaaacauggagacacucaauaugaccaugccucucuccugcacaaagaauaacagucaucauuacauaaugguaggcaaugagacaggacuagaacugaccuugaccaacacaaguauuauuaaucauaaauuuugcaaucugucugaugcccacaaaaagaaccucuaugaccaugcucuuaugagcauaauuucaacuuuccacuuguccauccccaacuucaaucaguaugaggcaaugagcugcgauuuuaaugggggaaagauuagugugcaguacaaccugagucacagcuaugcugaggaugcugccaaccauuguggcacuguugcaaauggugucuuacagacuuucaugagaauggcuuggggugggagcuacauugcucuugacucaggcugcggcaauugggauugcauuaugacuaguuaucaauaucugauaauucaaaauacaaccugggaagaucacugccaauucucaagaccaucuccuaucgguuaucuugggcuccucucacaaaggaccagagauauuuauaucaguagaagacgccggggcacauucacauggacacugucagauucugaaggcaaggacacaccagggggauauugucugaccagauggaugcugauugaagcugaauuaaaauguuucgggaacacagcuguggcaaaauguaaugagaagcaugaugaggaauuuugugacauguugaggcuguuugacuucaacaaacaagccauucaaagguugaaagcucccgcacaaaugagcauucaguugaucaauaaggcaguaaaugccuugauaaaugaucaacuuauaaugaagaaccaucuacgggacaucaugugcauuccauacuguaauuacagcaaauauugguaccucaaccacacaacuacugggaaaacaucacugccuaaauguuggcuuguaucaaaugggucauacuugaacgagacccacuuuucugaugauauugaacaacaagcugacaacaugaucacugagauguuacagaaggaguauauggagaggcaggggaagacaccauugggccuaguugaccucuuuguguucagcacaaguuucuaucucaucagcaucuuccuucaccuagucaaaauaccaacucauaggcauauuguaggcaagucauguccuaaaccucacagauugaaucacaugggcauauguuccuguggacucuauaaacagcccggugugccugugaaauggaaaagauga

SEQ ID NO: 4057 - RNA, 1476 nt, Artificial Sequence
  derived and/or modified protein sequence (wt) from LASV(LM776-SLE-2012;Clade IV)__AIT17824__GPCstabilized
augggacagauagugacauucuuccaggaagugccucauguaauagaagaggugaugaacauuguccucauugcgcugucuauauuagcagugcugaaaggucuguacaacuuugcaacauguggccucguugguuugguuacuuuccuccuguuguguggcaggucuugcacaaccaguguuuauaaaggggucuaugagcuucagacucuggaguuaaacauggagacacucaauaugaccaugccucucuccugcacaaagaauaacagucaucauuauauaaugguagguaaugagacaggacuagaacugaccuugaccaacacaagcauuauuaaucauaaauuuugcaaucugucugaugcccacaaaaagaaccucuaugaccaugcccuuaugagcauaauuucaacuuuccacuuguccauccccaacuucaaucaguaugaagcaaugagcugugauuucaaugggggaaagauuagugugcaguacaaccugagucacagcuaugcuggggaugcugccaaccauuguggcacuguugcaaauggugucuuacagacuuucaugaggauggcuuggggugggagcuacauugcucuugacucaggcugcggcaagugggacuguauuaugacuaguuaucaauaucugauaauccaaaauacaaccugggaagaucacugccaauucucaagaccaucuccuaucgguuaucuugggcuucucucacaaaggaccagagauauuuauaucaguagaagacgccggggcacauucacauggacacugucagauucugaaggcaaggacacaccagggggauauugucugaccagauggaugcugauugaagcugaauuaaaaugcuucgggaacacagcuguagcaaaauguaaugagaagcaugaugaggaauuuugugacauguugaggcuguuugacuucaacaaacaagccauucaaagguugaaagcucccgcacaaaugagcauucaguugaucaacaaggcaguaaaugccuugauaaaugaucaacuuauaaugaagaaccaucuacgggacaucaugugcaucccauacuguaauuacagcaaauauugguaccucaaccacacaacuacugggaaaacaucacugccuaaauguuggcuugucucaaaugggucauacuugaacgagacccacuuuucugaugauauugaacaacaagcugacaacaugaucacugagauguuacagaaggaguauauggagaggcaggggaagacaccauugggccuaguugaccucuuuguguucagcacaaguuucuaucucaucagcaucuuccuucaccuagucaaaauaccaacucauaggcauauuguaggcaagucguguccuaaaccucacagauugaaucacaugggcauauguuccuguggacucuacaaacagcccggugugccugugagauggaaaagauga

SEQ ID NO: 4058 - RNA, 1476 nt, Artificial Sequence
  derived and/or modified protein sequence (wt) from LASV(LM778-SLE-2012;Clade IV)__AIT17828__GPCstabilized
augggacagauagugacauucuuccaggaagugccucauguaauagaagaggugaugaacauuguucucauugcgcugucuauauuagcagugcugaaaggucuauacaacuuugcaacauguggccucguugguuugguuacuuuucuccuguuguguggcaggucuugcacaaccagucuuuauaaaggggacuaugagcuucagacucuggaguuaaacauggagacacucaauaugaccaugccucucuccugcacaaagaauaacagucaucauuacauaaugguaggcaaugagacaggacuagaacugaccuugaccaacacaaguauuauuaaucauaaauuuugcaaucugucugaugcccacaaaaagaaccucuaugaccacgcucuuaugagcauaauuucaacuuuccacuuguccauccccaacuucaaucaguaugaggcaaugagcugcgauuuuaaugggggaaagauuagugugcaguacaaccugagucacagcuaugcuggggaugcugccaaccauuguggcacuguugcaaauggugucuuacagacuuucaugagaauggcuuggggugggagcuacauugcucuugacucaggcugcggcaauugggauugcauuaugacuaguuaucaauaucugauaauucaaaauacaaccugggaagaucacugccaauucucaagaccaucuccuaucgguuaucuugggcuccucucacaaaggaccagagauauuuauaucaguagaagacgccggggcacauucacauggacacugucagauucugaaggcaaggacacaccagggggauauugucugaccagauggaugcugauugaagcugaauuaaaauguuucgggaacacagcuguggcaaaauguaaugagaagcaugaugaggaauuuugugacauguugaggcuguuugacuucaacaaacaagccauucaaagguugaaagcucccgcacaaaugagcauucaguugaucaauaaggcaguaaaugccuugauaaaugaucaacuuauaaugaagaaccaucuacgggacaucaugugcauuccauacuguaauuacagcaaauauugguaccucaaccacacaacuacugggaaaacaucacugccuaaauguuggcuuguaucaaaugggucauacuugaacgagacccacuuuucugaugauauugaacaacaagcugacaacaugaucacugagauguuacagaaggaguauauggagaggcaggggaagacaccauugggccuaguugaccucuuuguguucagcacaaguuucuaucucaucagcaucuuccuucaccuagucaaaauaccaacucauaggcauauuguaggcaagucauguccuaaaccucacagauugaaucacaugggcauauguuccuguggacucuauaaacagcccggugugccugugaaauggaaaagauga

SEQ ID NO: 4059 - RNA, 1476 nt, Artificial Sequence
  derived and/or modified protein sequence (wt) from LASV(Mad39;Clade IV)__ANH09722__GPCstabilized
auggggcaaauugugacauucuuucaggaagugccucauguaauugaggaggugaugaacauuguacucauugcacuauccauacuggcagugcuaaagggucuguacaauguugcaacauguggccucauuggcuugguuaccuuccuccugcugugugguagaucuuguacaaccacucuuuauaaagggguuuaugagcuucaagcucuggaacuaaacauggaaacacucaacaugacuaugccucucucuugcacaaaaaacaacucucaucacuauauaagggugggcaaugaaacaggccuagaacugaccuugaccaacacaagccucauaaaucacaaguucugcaaucugucugaugcucacaaaaagaaccucuaugaucaugcucuuaugagcauaaucucaacuuuccauuuguccauccccaacuucaaucaguaugaagcaaugagcugugauuucaaugaugggaagaucaguguacaguacaaccuaagccacaccuacgcuggggauacagccaaccacugugguacuguugcgaacgguguuuuacagacuuucaugaggauggcuuggggugggaguuacauugcucuugauucaggcugcgguggaugggacugcauuaugaccagcuaucaauauuugauaauucagaacacaaccugggaagaucacugucaguucucaagaccaucucccaucggguaccuugggcuccucucacaaagaaccagagacauuuauaucaguagaagacgccggggcacauucacauggacacuaucagauucugaggguaaagacacaccagggggguacugucuaacuagguggaugcugauugaagcugaauugaaaugcuuuggcaacacagcuguagcaaaaugcaaugagaagcaugaugaggaauuuugugauauguugaggcuauuugacuuuaacaaacaagccauucaaagauugaaagcucccgcacaaaugaguauucagcugaucaacaaagcagugaaugccuugauaaaugaucaacugauaaugaaaaaccauuugcgggacauuaugugcauuccguacugcaacuacagcaaguauugguaucuuaaucacacagucaccggaaagacaucauuacccaaaugcuggcuuguaucaaauggcucauaccuaaacgagacccacuucucugaugauauugagcagcaagcugauaacaugauuacugagaugcuacagaaggaauacauggagagacaggggaagacaccacuuggucugguugaccucuuuguauuuagcacaaguuucuaucucauuagcauuuuccuucaccuagugaaaauaccaacucauaggcauguugugggcaaaccguguccuaaaccucacagacugaaccacauggguauauguucuuguggguucuacaagcaaccuggugugccugugagauggaagagauga

SEQ ID NO: 4060 - RNA, 1476 nt, Artificial Sequence
  derived and/or modified protein sequence (wt) from LASV(Mad41;Clade IV)__ANH09724__GPCstabilized
auggggcagauugugacauucuuccaggaagugccucauguaauagaggaggugaugaacauuguacucaucgcacugucuauacuagcagugcugaagggucuguauaauguugcaacauguggccucauuggcuugguuacuuuccuucugcugugugguagaucuugcacaaccacucuuuauaaagggguuuaugagcuucaagcucuggaacugaacauggaaacacucaacaugacuaugccucucucuugcacaaaaaacgacagucaucacuauauaauggugggcaaugaaacaggccuagaacugacuuugaccaacacaagcaucaucagucauaaguucugcaaucuguccgaugcucacaaacagaaccucuaugaucaugcucucaugagcauaaucucaacuuuccauuuguccaucccuaacuucaaucaguaugaagcaaugagcugugacuuuaauggugggaagaucaguguacaguacaaccuaagccauaccuaugcuggagaugcagccaaccauuguggcacuguugcaaaugguguuuuacagacuuucaugaggauggcuuggggugggaguuacauugcucuugauucaggcugcgguggaugggauugcauuaugacuagcuaucaauauuugauaauucagaauacaaccugggaagaucacugucaguuuucaaggccaucucccaucggguaccuugggcuccuuucacaaagaaccagagacauuuauaucaguagaagacgccggggcacauucacauggacgcugucagauuccgaggguaaagacacaccagggggcuacugucugaccagguggaugcugauugaagcugaauugaaaugcuuuggcaacacagcuguggcaaaaugcaaugagaagcaugaugaggaauuuugugacauguugaggcuauuugacuucaacaaacaagccauucaaagguugaaggcucccgcacaaaugaguauucagcuaaucaacaaagcagugaaugccuugauaaaugaucaacuaauaaugaagaaccaucugcgggauauuaugugcauuccguacugcaacuacagcaaguauugguaucuuaaccacacagucaccgggaaaacaucgcugccuaaaugcuggcuuguaucaaaugguucauaccuaaaugagacucacuucucugaugauauugagcagcaggcugauaacaugaucacugagaugcugcaaaaggaauacauggagaggcaggggaagacaccauugggucugguugaccucuuuguauuuagcacaaguuucuaucucaucagcaucuuucuucaccuagucaaaauaccaacucauaggcauguugugggcaaaccguguccuaaaccucacagacugaaccacauggguauaugcucuuguggauucuauggacaaccugguguaccuguaagauggaagagauga

SEQ ID NO: 4061 - RNA, 1476 nt, Artificial Sequence
  derived and/or modified protein sequence (wt) from LASV(Mad63;Clade IV)__ANH09728__GPCstabilized
auggggcaaauugugacauucuuucaggaagugccucaugugauugaggaggugaugaacauuguacucaucgcauugucuguacuagcagugcuaaagggucuguauaauguugcaacauguggccuuauuggcuuggucaccuuucuucugcugugugguagaucuugcacaacuacccuuuauaaagggguuuaugagcuucaagcucuggaacugaacauggggacacucaacaugacuaugccucucucuuguacaaaaaacaacagucaucacuauauaaugguaggcaaugaaacaggccuggaacugacuuugaccaacacaaguaucaucaaucacaaguucugcaaucugucugaugcucacaaaaaggaccucuaugaucaugcucuuaugaguauaaucucaacuuuccacuuguccgucccuaacuucaaucaguaugaagcaaugaguugugauuucaauggggggaagaucaguguacaauacaaccuaagccaugccuaugcuggagauacagccaaccacuguggcaccguugcaaacggcguuuuacagaccuucaugaggauggcuuggggugggaguuacauugcucuugauucaggcugcgguggaugggacugcauuaugaccagcuaucaauauuugauaauucaaaacacaaccugggaagaucacugucaguuuucaagaccaucucccaucggguaccuugggcuccucucacaaagaaccagagacauuuauaucaguagaagacgccggggcacauucacauggacacugucagauucugagggugaauacacaccagggggguacugucuaacuagguggaugcugauugaagcugaauugaaaugcuuuggcaacacagcuguagcaaaaugcaaugagaagcaugaugaggaauuuugugauauguugaggcuauuugacuucaacaaacaagcuauucagagguugaaagcucccgcacaaaugaguauucagcugauaaacaaagcagugaaugccuuaauaaaugaucaacugauaaugaagaaccaucugcgggacauuaugugcauuccauacugcaacuacaguaaguauugguaucuuaaccacacagucaccgggaaaacaucauugcccaaaugcuggcuuguaucaaauggcucauaccuaaacgagacccacuucucugaugauauugagcagcaggcugauaacaugauuacugagaugcugcagaaggaauacauggagaggcaggggaagacaccauuggguuugguugaccucuuuguauuuagcacaaguuucuaucucauuagcauuuuccuucaucuugucaaaauaccaacucauaggcauguugugggcaaaccgugucccaaaccucacagacugaaccacauggguauauguucuuguggguucuauaaacaaccuggugugccuguaagauggaagagauga

SEQ ID NO: 4062 - RNA, 1476 nt, Artificial Sequence
  derived and/or modified protein sequence (wt) from LASV(Mad69;Clade IV)__ANH09730__GPCstabilized
auggggcaaauugugacauucuuucaggaagugccucaugugauugaggaggugaugaacauuguacucaucgcacugucuguacuagcagugcuaaagggucuguauaacguugcaacauguggucucauuggcuuggucaccuuucuucugcugugugguagaucuugcacaaccacccuuuauaaagggguuuaugagcuucaagcucuggaacugaacauggagacacucaacaugacuaugccucucucuugcacaaaaaacaacagucaucacuauauaaugguaggcaaugaaacaggccuggaacugacuuugaccaacacaagcauuaucaaucacaaguucugcaaucugucugaugcucacaaaaagaaccucuaugaucaugcucuuaugagcauaaucucaacuuuccacuuguccaucccuaacuucaaucaguaugaagcaaugagcugugauuuuaaucaggggaagauuaguguacaauacaaccuaagccaugccuaugcuggagaugcagccaaccacuguggcacuguugcaaacggcguuuuacagacuuucaugaggauggcuuggggugggaguuacauugcucuugacucaggcugcgguggaugggacugcaucaugaccagcuaucaauauuugauaauucagaacacaaccugggaaaaucacugucaguucucaagaccaucucccauuggguaccuugggcuccucucacaaagaaccagagacauuuauaucaguagaagacgccggggcacauucacauggacacugucagauucugaggguaaaggcacaccagggggguacugucuaacuagguggaugcugauugaagcugaguugaaaugcuuuggcaacacagcuguagcaaaaugcaaugagaagcaugaugaggaauuuugugacauguugaggcuauuugacuucaacaaacaagccauucagagguuuaaagcucccgcacaaaugaguauucaguugaucaauaaagcagugaaugccuugauaaaugaucaacugauaaugaagaaccaucugcgggacauuaugugcauuccauacugcaacuacagcaaguauugguaucuuaaccacacagucaccgggaaaacaucauugcccaaaugcuggcuuguaucaaauggcucauaccuaaacgagacccacuucucugaugauauugagcagcaggcugauaacaugauuacugagaugcugcagaaggaauacauggagaggcaggggaggacaccauugggucugguugaccucuuuguauuuagcacaaguuucuaucuuauuagcauuuuccuucaucuugucaaaauaccaacucacaggcauguugugggcaagccgugucccaaaccucacagacugaaucacauggguauauguucuuguggguucuauaaacaaccuggugugccuguaagauggaagagauga

SEQ ID NO: 4063 - RNA, 1476 nt, Artificial Sequence
  derived and/or modified protein sequence (wt) from LASV(Mad83;Clade IV)__ANH09732__GPCstabilized
auggggcaaauugugacauucuuucaggaagugccucauguaauagaggaggugaugaacauuguacucaucgcacugucuauacuagcaguguuaaaggguguguauaauguugcaacauguggccucauuggcuugguuaccuuccuuuuacugucugguagaucuugcacaaccacuauuuauaaagggguuuaugagcuucaagcucuggaacugaacauggagacacuuaacaugacuaugccccucucuugcacaaagaauaacagucaucacuauauaauggugggcaaugaaacagguuuagaacugacuuugaccaacacaaguaucauuaaucauaaguucugcaauuugucugaugcccacaaaaagaaccuuuaugaucaugcucuuaugagcauaaucuccacuuuccauuuauccaucccuaacuuuaaucaguaugaagcaaugagcugugauuuuaauggugggaagaucagugugcaguacaaccuaagccauaccuaugcuggagaugcagccaaccacuguggcacuguugcaaaugguguuuuacagacuuucaugaggauggccuggggugggaguuacauugcucuugauucaggcugcgguggaugggauugcauuaugaccagcuaucaauauuugauaauucagaacacaaccugggaaaaucacugucaguucucaagaccaucccccaucggguaccuugggcuccucucacaaagaaccagagacauuuauaucaguagaagacgccggggcacauucacauggacacugucagauucugaagguaaagacacaccagggggguacugucugacuagguggaugcugauugaagcugaauugaaaugcuuuggcaacacagcuguagcaaaaugcaaugagaagcaugaugaggaauucugugacauguugaggcuauuugacuucaacaaacaagccauucaaagguugaaagcucccgcacagaugaguauucagcugaucaacaaagcagugaaugccuuaauaaaugaucaacugauaaugaagaaccaucugcgggacauuaugugcauuccauacugcaacuacagcaaguauugguaccuuaaccacacagucaccgggaaaacaucauugccuaaaugcuggcuuguaucaaauggcucauaccuaaacgagacccacuucucugaugauauugagcagcaggcugauaacaugauuacugagaugcuacagaaggaauacauggaaaggcaggggaagacaccacugggucuaguugaccuuuuuguguuuagcacaaguuucuaucucauuagcaucuuccuccaccuagucaaaauaccaacucauaggcacauuguuggcaaaccguguccuaaaccucacagacugaaccacauggguauauguucuuguggguucuauaaacaaccugguguaccuguaagauggaagagauga

SEQ ID NO: 4064 - RNA, 1476 nt, Artificial Sequence
  derived and/or modified protein sequence (wt) from LASV(NL;Clade IV)__AAO59512__GPCstabilized
augggacaaauagucacauucuuccaggaagugccucauguaauagaagaggugaugaacauuguccucauugcgcugucuauacuagcugugcugaagggucuguacaacuuugcgacauguggccucguugguuuaguugcuuuccucuuguuguguggcaggucuugcacaagcagucuuuacaaagggguuuaugagcuccagacucuggaacuaaacauggagacacucaauaugaccaugccucucucuugcacaaagaacaacagucaucauuacauaagggugggcaaugagacaggacuagaacugaccuugaccaacaccaguauuauuaaucauaaauuuugcaaucuaucugaugcucacaagaagaaccuuuaugaccacgcucuuaugagcauaaucucaacuuuccacuuguccaucccaaacuucaaucaguaugaggcaaugagcugugauuucaacggaggaaagauuagugugcaguacaaccugagccacagcuaugcuguggaugcagccaaacauuguggcacaguugcaaauggugucuuacagacuuucaugaggauggcuugggguggaagcuacauugcucuugauucaggcugcgguagaugggacuguauuaugacuaguuaucaauaucuaauaauucagaauacaaccugggaagaucacugccaauucucaagaccaucucccauugguuaucucgggcuccucucacagaggacuagagacauuuauauuaguagaagacgccggggcacauuuacauggacacugucagacucugaaggcaaggacacaccagggggauauugucugaccagauggaugcuaauugaagcugagcuaaaaugcuucgggaacacagcuguggcaaaauguaaugagaaacaugaugaggaauuuugugacaugcugaggcuguuugacuucaauaaacaagccauucaaaggcugaaaacucccgcacaaaugagcauucaguugaucaauaaagcagugaaugcuuugauaaaugaccaacuaauaaugaagaaucauuugcgggacauaaugugcauuccauacuguaauuacagcagguauugguaccuuaaccacacaacuacuggaaaaacaucacugcccaaauguuggcuuguaucaaaugguucauaccugaacgagacccgcuuuucugacgauauugaacaacaagcugacaacaugaucacugagauguuacagaaagaguacauggaaaggcaggggaagacaccauugggucuaguugaccucuuuguguucagcacaaguuucuaucucauuagcaucuuccuucaccuaguuaaaauaccgacucauaggcauauugugggcaagucaugucccaagccucacagguugaaucacaugggcauauguuccugcggacucuauaaacagcccggugugccuguaaaauggaagagguga

SEQ ID NO: 4065 - RNA, 1476 nt, Artificial Sequence
  derived and/or modified protein sequence (wt) from LASV(Z0947-SLE-2011;Clade IV)__AIT17840__GPCstabilized
augggacaaauagugacauucuuccaggaagugccccaugucauagaagaggugaugaacaucguucucauugcacugucuauacuagcaguguugaaaggucuguacaauuuugcaacauguggccucguuggcuuggucacuuuccuccuguuguguggcaggucuugcacaauuagccuuuacaaggggguuuaugagcuucagacucuggaacuaaacauggaaacacucaauaugaccaugccucucuccuguacaaagaacaacagucaucauuauauaauggugggcaaugagacaggacuagaacugaccuugaccaacacgagcauuauuaaucauaaauuuugcaaucugucugaugcccacaaaaagaaccucuaugaccaugcucuuaugagcauuaucucaacuuuccacuuguccaucccuaacuucaaucaguaugaggcaaugagcugcgauuucaaugggggaaagauuagugugcaguacaaccugagucacagcuaugccggggacgcagccaaccauugugguacuguugcaaaugguguauuacagacuuucaugaggauggcuuggggugggagcuacaucgcucuugacucaggcugcgacaggugggacuguauuaugacuaguuaucaauaucugauaauccaaaauacaaccugggaagaucacugccaauucucgagaccaucucccaucgguuaucucgggcuccucucacaaaggaccagagauauuuauauuaguagaaggcgccggggcacauucacauggacacugucagauucugaaggcaaggacacaccagggggauauugucuaaccagauggaugcuaauugaggcugagcuaaagugcuucgggaacacagccguggcaaaauguaaugagaagcaugaugaggaauuuugugacaugcugagguuguuugacuuuaacaaacaagccauucaaagguugaaagcucccgcacaaaugagcauucaguugaucaacaaagcaguaaaugcuuugauaaaugaccaacuuauaaugaagaaccaucuacgggacaucaugugcauuccauacuguaauuacagcaaguauugguaccucaaccacacaacuacuggaaaaacaucacugcccaaguguuggcuuguaucaaaugguucauaccugaacgagacccacuuuucugaugacaucgaacaacaagcugacaacaugaucacugagauguuacagaaggaguauauggagaggcaggggaagacaccauugggucugguugaccucuuuguguucagcacaagcuucuaucucauuagcaucuuccuucaccuaguuaaaauaccaacucauaggcauauuguaggcaagccgugucccaaaccucacagguugaaucauaugggcauuuguuccuguggacucuauaaacagccuggugugccugugaaauggaagagauga

SEQ ID NO: 4066 - RNA, 1476 nt, Artificial Sequence
  derived and/or modified protein sequence (wt) from LASV(Z0948-SLE-2011;Clade IV)__AIT17844__GPCstabilized
augggacaaauagugacauucuuccaggaagugccccaugucauagaagaggugaugaacaucguucucauugcacugucuauacuagcaguguugaaaggucuguacaauuuugcaacauguggccucguuggcuuggucacuuuccuccuguuguguggcaggucuugcacaauuagccuuuacaaggggguuuaugagcuucagacucuggaacuaaacauggaaacacucaauaugaccaugccucucuccuguacaaagaacaacagucaucauuauauaauggugggcaaugagacaggacuagaacugaccuugaccaacacgagcauuauuaaucauaaauuuugcaaucugucugaugcccacaaaaagaaccucuaugaccaugcucuuaugagcauuaucucaacuuuccacuuguccaucccuaacuucaaucaguaugaggcaaugagcugcgauuucaaugggggaaagauuagugugcaguacaaccugagucacagcuaugccggggacgcagccaaccauugugguacuguugcaaaugguguauuacagacuuucaugaggauggcuuggggugggagcuacaucgcucuugacucaggcugcgacaggugggacuguauuaugacuaguuaucaauaucugauaauccaaaauacaaccugggaagaucacugccaauucucgagaccaucucccaucgguuaucucgggcuccucucacaaaggaccagagauauuuauauuaguagaaggcgccggggcacauucacauggacacugucagauucugaaggcaaggacacaccagggggauauugucuaaccagauggaugcuaauugaggcugagcuaaagugcuucgggaacacagccguggcaaaauguaaugagaagcaugaugaggaauuuugugacaugcugagguuguuugacuuuaacaaacaagccauucaaagguugaaagcucccgcacaaaugagcauucaguugaucaacagagcaguaaaugcuuugauaaaugaccaacuuauaaugaagaaccaucuacgggacaucaugugcauuccauacuguaauuacagcaaguauugguaccucaaccacacaacuacuggaaaaacaucacugcccaaguguuggcuuguaucaaaugguucauaccugaacgagacccacuuuucugaugacaucgaacaacaagcugacaacaugaucacugagauguuacagaaggaguauauggagaggcaggggaagacaccauugggucugguugaccucuuuguguucagcacaagcuucuaucucauuagcaucuuccuucaccuaguuaaaauaccaacucauaggcauauuguaggcaagccgugucccaaaccucacagguugaaucauaugggcauuuguuccuguggacucuauaaacagccuggugugccugugaaauggaagagauga

SEQ ID NO: 4067 - RNA, 1476 nt, Artificial Sequence
  derived and/or modified protein sequence (wt) from LASV(Z148;Clade IV)__AAT49008__GPCstabilized
auggggcaaauagucacauuuuuccaggaagucccucauguaauagaggaggucaugaacauuguacuuaucgcacuguccauacuagcugugcugaaagguuuguacaauguugcaacauguggccuuauuggcuuggucaccuuucucuuccuaugugguaggucuuguucaaccacucuuuacaagggaguuuaugagcuucagaccuuggaguugaacauggaaacacugaacaugacaaugccccucucuugcacaaagaacaacagucaccauuacauaauggugggcaaugagacaggacuggaacugacuuugaccaacacaaguauuauaaaucacaaguucugcaaucuaucugaugcccacaaaaagaaucucuaugaccacacucuuaugagcauaaucucaacuuuccaucugucuauaccuaauuucaaucaguaugaagcaaugaguugugacuuuaauggggguaagaucagugugcaauacaaccugagucacaguuaugcuguagaugcagcuaaucauuguggcacaguggcaaaugguguuuugcagaccuucaugaggauggcuuggggcgggaguuacauugcccuugauucagguugcggcaacugggacugcaucaugacuaguuaccaauaucuuauaauucagaacacaaccugggaagaccauugucaguucucaaggccaucucccaucggcuaucuugggcuccuuucacaaagaaccagagauauuuacaucagcaggagacgccggggaacauucacauggacacuaucagauucugaagguaaagacacaccaggaggguacuguuugaccagguggaugcugauugaagcugaguuaaagugcuuuggcaacacagccguggcaaaguguaaugagaagcaugaugaagaguuuugugacaugcugaggcuauuugacuucaacaaacaagccauccaaagauugaaagcccccgcucagaugaguauacaacugaucaacaaagcaguaaaugcucugauaaaugaucagcuaauaaugaagaaccauuugcgagacauuaugugcaucccauacugcaauuacaguagauacugguaucucaaccacacagucaccggaaagacaucauugcccaaguguuggcuugugucaaauggaucauaccuaaaugagacccacuucucugaugauaucgaacagcaagcugacaauuugaucacugagauguuacaaaaggaauacauggaaagacaaggcaaaacaccauuggguuugguugaccucuuuguguucaguacaagcuuuuaccuuauaagcaucuuccuccaccuagucaaaauaccaacucauagacacauuguaggcaaaccauguccuaaaccucauagauugaaccauauggguauaugcuccugugguguuuacaaacaaccugguguaccugugagauggaaaagguaa

SEQ ID NO: 4068 - RNA, 1476 nt, Artificial Sequence
  derived and/or modified protein sequence (wt) from LASV(Bamba-R114;Clade V)__AHC95555__GPCstabilized
auggggcagauagugacauucuuucaagaagugccccauguuauagaggaagugaugaacauuguucucauagcacugucuauauuggcagugcugaaaggccuguacaacauugccacauguggucugauuggccuggucacuuuccuccugcuguguggaagauccuguuccuccaauuuauacaagggaguuuaugagcuccaaucucuggaccugaacauggaaacacucaacaugacuaugccucucucuugcaccaagaacaacagucaccauuauauaagagcugguaaugagacagggcuggagcugaccuugaccaacacuagcuugauuaaucacaaauucugcaaccuuucagaugcccacaaaaagaaccuguaugaccacacacucaugagcauaauuucaacuuuccaccuaucuauacccaacuuuaaucaguaugaagcaaugaguugugauuuuaaugggggcaagauuagugugcaauacaaucuaagccaugcuuaugcuauagaugcagccgagcacuguggcacaguugcaaauggugucuugcagaccuucaugagaauggcaugggguggaagcuacauugcucuugacucaggcugcgggaacugggacuguaucaugaccaguuaucaguaucugauaauucagaacacaacuugggaagaucacugucaguuuucaagaccaucucccauugguuaucucggacuccucucacagagaaccagagacauuuacauaagcaggaggcgccgggguacauucacauggacacugucagacuccgaggguaacgcuacaccaggggguuauugccuaacuagguggauguuaaucgaggcugaauugaaaugcuuuggaaauacagcgguagcaaagugcaaugagaagcaugaugaagaauucugugacaugcucagacuauuugauuucaauaagcaggccauaaguagguugaaaucccccgcacagaugagcauucaacugaucaacaaagcaguaaaugcuuugaucaaugaucaauugauuaugaaaaaccauuuacgggacauaaugugcauuccauauuguaauuacagcaaauauugguaccucaaccauacaauuacuggcagaacuucauuacccaaguguuggcuugugucuaauggcucauaccugaaugagacccacuucucugaugauauagagcaacaagcugacaacaugaucacagagaugcuacaaaaggaauauauggaaaggcaggggaagacgcccuugggcuuagucgacuuguuugucuucagcacaagcuuuuaucugaucaguaucuuccuccaucuagucaagauuccgacccauagacacauuguagguaagccauguccuaagccccacaggcugaaccacauggguaucuguuccugugguuuauacaagcaaccuggugucccccucaaguggaagagauaa

SEQ ID NO: 4069 - RNA, 1476 nt, Artificial Sequence
  derived and/or modified protein sequence (wt) from LASV(Komina-R16;Clade V)__AHC95557__GPCstabilized
auggggcagauugugacauucuuucaagaagugccucauguaauagaagaagugaugaacaucguucuuauagcauuguccauauuggcaguguuaaaggguuuguacaacauugcaacauguggccucauuggcuuggucaccuucuuccuacugugugguagauccugcuccuccaaccucuauaagggggucuaugaacuccaaucccuagaucugaacauggagacacucaacaugacuaugccccucucuugcaccaaaaacaacagucaucauuacauaagaguuggcaaugagacagggcuggaacugaccuuaaccaacacaaguuugcuuaaucauaaguucuguaaccugucggaugcucacaagaggaaucuuuacgaccacgcacucaugaguauaaucucaacuuuccaccuaucuauacccaacuucaaccaauaugaagcaaugagcugugacuuuaaugggggcaaaaucacuguccaguacaaccuaagccacucuuaugcaggggauacagccaagcacugcggcacaaucgcaaauggcguccugcagacuuuuaugaggauggcaugggguggaagcuacauugcucuugacucaggcugcgggaacugggacugcauuaugaccaguuaucaauaucugauaauccaaaacacaaccugggaggaccauugucaguucucaagaccaucucccaucggcuaccuuggucuccucucacagagaaccagagauaucuacauuagcagaaggcgccggggcacauucacauggacacugucagacuccgaggggaaugccacaccaggagguuacugcuuaaccagguggauguugauugaggcugaauuaaaaugcuuuggcaacacagcaguggcaaagugcaaugaaaagcaugaugaggaauucugugacaugcucagacuguuugauuucaacaagcaggccauaagcagacugagaucucccgcacaaaugagcauccagcuuaucaacaaggcagugaaugccuuaauuaaugaucaguugauuaugaaaaaccauuugcgagacauuaugugcaucccauauugcaauuacagcaaauacugguaucuuaaccacacagucacugguagaaccucacuaccuaaguguuggcuuguguccaauggcucauacuugaaugagacucauuuuucugaugacaucgaacagcaagccgacaacaugaucacagagaugcuacaaaaagaauacauggacaggcaaggaaaaacaccuuugggccugguugacuuguuuguguuuagcacaaguuuuuaucugauuagcauuuuccuucauuuagucaaaauaccgacccauagacacauuguggguaaaccguguccuaagccucacaggcugaaccguaugggcauuugcucuugugguuuguacaagcaaccuggcgucccuguuaaauggaagagauag

SEQ ID NO: 4070 - RNA, 1476 nt, Artificial Sequence
  derived and/or modified protein sequence (wt) from LASV(Ouoma-R123;Clade V)__AHC95559__GPCstabilized
auggggcagauaauaacauucuuucaagaagugccccauguuauagaggaagugaugaacauuguucuuauagcauuguccauauuggcaguguuaaaaggcuuguacaacauugccacauguggucugauuggccuagucacuuuccuccugcuguguggaagauccugcuccuccagucuuuacaaaggagucuacgagcuccaaucccuggaccugaacauggagacacucaauaugacuaugccccucucuugcaccaaaaacaacagucaucauuauauaagaguuggcaaugagacaggguuggaguugaccuugaccaacacuagcuugaucaaucacaaguuuugcaaccuuucagaugcccacaagaagaaccuguaugaccacgcacucaugagcauaauuucaacuuuccaccuaucuauacccaacuucaaucaauaugaagcaaugaguugugauuucaaugggggcaaaauuaguguacaauacaaucuaagccaugcuuaugccauagaugcagccagccacuguggcacaguugcaaauggugucuugcagaccuucaugaggauggcaugggguggaaguuacauugcucuagauucaggcugcgggaacugggacuguauuaugaccaguuaucaguaucugauaauccagaacacaacuugggaagaucacugucaauucucaagaccguccccuauugguuaucuuggucuccucucacagagaacuagagauauuuacauuagcaggaggcgccggggcacauucacauggacacugucagacuccgaggguaaugcuacaccaggagguuauugccuaacuagguggauguuaauugaggcugaauugaaaugcuuuggaaauacagcgguggcaaagugcaaugagaagcaugaugaagaauucugugacaugcucagacuguucgauuucaauaagcaagccauaaguagguuaaaaucccccgcacaaaugagcauccaacuaaucaauaaagcagugaaugcuuugaucaaugaucaauuaauaaugaaaaaccacuuacgggacauaaugugcauuccauauuguaauuacagcaaguauugguaccucaaccacacaguuacugguaaaaccucauugcccaaaugcuggcuuguguccaauggcucauacuugaaugagacccacuuuucugaugacaucgaacaacaagcugacaacaugaucacagagaugcuacaaaaggaauacauggagaggcaggggaagacgcccuuaggccugguugaucuauuugucuuuagcacaagcuuuuaucugaucaguaucuuccuccaucuagucaagauuccgacucauagacacauuguggguaaaccauguccuaaaccccacaggcugaaccacaugggcaucuguuccugugguuuguacaagcagccuggugucccugucaaauggaagagauag

SEQ ID NO: 4071 - RNA, 1476 nt, Artificial Sequence
  derived and/or modified protein sequence (wt) from LASV(Soromba-R;Clade V)__AHC95553__GPCstabilized
auggggcagauugugacauucuuucaagaagugccucauguaauagaagaagugaugaacaucguccuuauagcauuguccauauuggcaguguuaaaggguuuguacaacauugcuacauguggucucauuggcuuggucaccuucuuccuacugugugguagauccugcuccuccaaccucuauaagggggucuaugaacuccaaucucuagaucugaacauggagacacucaacaugacuaugccccucucuugcaccaaaaacaacagucaucauuacauaagaguuggcaaugagacagggcuggaacugaccuuaaccaacacaaguuugcuugaucauaaguucuguaaccugucggaugcccacaagaagaaucuuuacgaccacgcacucaugaguauaaucucaacuuuccaccuaucuauacccaacuucaaccaauaugaagcaaugagcugugacuuuaaugggggcaaaaucacuguccaguacaaccuaagccacucuuaugcaggggaugcagccaggcacugcggcacaauugcaaauggcguccugcagacuuucaugaggauggcaugggguggaagcuacauugcucuugacucaggcugcgggaacugggacugcaucaugaccaguuaucaauaccugauaauccaaaacacaaccugggaagaccauugucaguucucaagaccaucucccaucggcuaccuuagucuccucucacagagaaccagagauaucuacauuagcagaaggcgccggggcacauucacauggacacugucagacuccgaggggaaugcuacaccaggagguuacugcuuaaccagguggauguugauugaggcugaauuaaaaugcuuuggcaacacagcaguggcaaagugcaaugaaaagcaugaugaggaauucugugacaugcucagacuguuugauuucaacaagcaggccauaagcagacugagaucucccgcacaaaugagcauccagcuuaucaacaaggcagugaaugccuuaauuaaugaucaguugauuaugaaaaaccauuugcgagacauuaugugcaucccauauugcaauuacagcaaauacugguaucuuaaccacacagucacugguagaaccucacuaccuaaguguuggcuuguguccaauggcucauacuugaaugagacccauuuuucugaugacaucgaacagcaagccgacaacaugaucacagagaugcuacaaaaggaauacauggacaggcaaggaaaaacaccuuugggccugguugacuuguuuguguuuagcacaaguuuuuaucugauuagcauuuuccuucauuuagucaaaauaccgacccauagacacauuguggguaaaccgugucccaagccucacaggcugaaccgcaugggcauuugcucuugugguuuguacaagcaaccuggcgucccuguuaaauggaagagauag

SEQ ID NO: 4072 - RNA, 1473 nt, Artificial Sequence; identical to SEQ ID NO: 3826
  derived and/or modified protein sequence (wt) from LASV(Alzey;Clade VI)__SCA79105__GPCstabilized

SEQ ID NO: 4073 - RNA, 1473 nt, Artificial Sequence
  derived and/or modified protein sequence (wt) from LASV(Lassa/H.sapiens-wt/TGO/2016/201600568;Clade VI)__AVN98153__GPCstabilized
auggggcaaauaauaaccuucuuccaggagguuccucauguuauagaggaggugaugaacauuguucugauagcacucucacuccuagcuauccugaaaggggucuacaauguggcaacaugugggauaauugggcuugugaccuuccucuuucucuguggaagaucuuguucacugaucuacaaaggcaguuaugagcugcaaacauuggaguuaaauauggagacccuaaacaugaccaugccucugucaugcacuaaaaauaguagccaccauuauauucgaguugggaacgagacuggcuuagagcugacauugaccaacaccagcauuauaaaucacaaauucuguaaccugucagaugcucacaaacguaaucuguaugaccacgcacucaugagcauccuuuccacauuccaucuguccaucccaaacuucaaccaguaugaggcgaugaguugugacuucaauggaggcaaaaucagugugcaauauaaucucagccaugcuuaugcaguugaugcugccgaacacugcggaacaguugcaaauggugugcuacaaacauucaugaggauggcuuggggaggaaguuacauugcacuugacucugggugcggcaauugggacuguauuaugacaagcuaccaauacuuaaucauucagaauacaacaugggaagaucacugccaauuuucaagaccuucuccuauugguuaucucggcuuauugucacaaagaacaagagacauuuauaucaguaggaggcgccgggguacauucaccuggacacuuucugacucagagggaaaugagacaccaggcggauacuguuuaacaagauggaugcugauagaggcugagcuaaaauguuuuggaaacacagcuguugcaaaguguaaugagaagcaugaugaggaauucugcgacauguuaagguuguuugacuucaacaaacaggcaauucagaggcucaaaucacccgcacaaaugagcauccaguuaauaaauaaagcagugaaugcauugauaaaugaucagcucauuaugaagaaccacuuaagggauaugaugugcauaccguauugcaacuacaguaaguauugguaucucaaucacaccucaucagggagagcaucguugccuaaaugcuggcuuguuuccaauggaaguuaucugaaugagacccacuucucagaugauauugaacaacaggcagacaacaugauaacugaaauguuacaaaaggaauauaucgauaggcaggguaaaacaccuuuaggacuuguugaccuuuuuguuuucagcacgaguuuuuaccuuauaaguauauucuuacacuugauaaagauaccuacucauaggcacauaguuggaaagccaugccccaagccacaccgccucaaccacauggggaucugcucuuguggacuauacaagcagccuggugucccaaccagauggaagagauaa

SEQ ID NO: 4074 - RNA, 1473 nt, Artificial Sequence
  derived and/or modified protein sequence (wt) from LASV(NIGERIA IKEJI;Clade II)__AMZ00373__GPCstabilized
augggacagauaauaaccuucuuucaagaggugccccauguuauagaggaggugaugaacauaguucuaauugcacucagccuuuuggcaauauuaaaaggaauuuacaauguugccacuugugggcucuuugggcugaucuccuuucuuuuucugugcggcagaucauguucaacaauguacaagggugucuaugaguugcaaaccuuggaacuggacauggcaaaccuuaacaugacaaugccuuuaucuugcacaaaaaacaacagccaucauuacaucauggucgggaaugagacaggucuggaguugacuuugaccaaccagagcaucaucaaucacaaguuuuguaaccuuucugaugcucacaagaagaaccucuaugaccacacuuugaugaguaucauuucaacuuuccaccuguccaucccaaacuucaaucaguaugaggccaugagcugugacuucaauggagggaagauaaguguccaguacaaccucagucauagcuaugcuguggaugcagccaaccacuguggaacuguugcaaacggagucuugcaaacuuuuaugagaauggcuuggggugggaguuauauagcacuugacucuggaugcggaaauugggacugcauaaugacuucuuaucaguauuugauaauucaaaacaccaccugggaggaucauugccaauuuucucgcccauccccuauugguuaucuuggguugcugucacagaggaccagagacauuuauauuagccgaagacgccgggguacuuucaccuggacucucucugauucugaaggcaaugaugcaccugguggguacuguuugacuagauggaugcucauugaagcugaacugaaguguuuugggaacacagccauugcaaaaugcaaugagaaacaugacgaagaguucugugauaugcugagacuuuucgauuucaacaaacaggcuauaaaaagguugaaagcacccgcacagaugagcauucagcuuauaaauaaagcggucaaugcacuaaucaaugaccaacuaaucaugaagaaucauuugagggauaucaugugcauuccuuacuguaauuacaguaaguacugguaccugaacaacacgguaacagguaaaucaucacuaccaaaaugcuggcuuguuucgaaugggucuuaucugaaugagacacauuuuucugaugacauugaacaacaagcagauaacaugauaacggaaaugcuacagaaagaguacauggauaggcaggggaaaacaccuuuaggguuaguggaucucuuugucuuuagcaccagcuuuuaucuuauaaguaucuuccuccauuuagucaagauuccgacucacaggcacaucacugggaaaccuugucccaagccacacaggcucaaccacaugggcauuugcucauguggccuguauaaacaacccggugugccaguuaaauggaaaagauag

SEQ ID NO: 4075 - RNA, 1476 nt, Artificial Sequence
  derived and/or modified protein sequence (opt1) from LASV(Josiah;Clade IV)__NP_694870__GPCstabilized
augggccagaucgugaccuucuuccaggaggucccccacgugaucgaggaggugaugaacaucguccugaucgcccucagcgugcuggccgugcugaaggggcucuacaacuucgcgaccugcggccuggucgggcuggugacguuccuccugcugugcggccgcuccugcaccaccagccucuacaaggggguguacgagcugcagacccuggagcucaacauggagacgcugaacaugaccaugccgcuguccugcaccaagaacaacagccaccacuacaucauggucggcaacgagaccggccucgagcugacgcugaccaacaccuccaucaucaaccacaaguucugcaaccucagcgacgcccacaagaagaaccuguacgaccacgcccugauguccaucaucagcaccuuccaccucuccauccccaacuucaaccaguacgaggccaugagcugcgacuucaacgggggcaagaucuccgugcaguacaaccugagccacuccuacgccggggacgcggccaaccacugcggcacgguggccaacgggguccugcagaccuucaugcggauggccuggggcggcagcuacaucgcgcucgacuccgggugcggcaacugggacugcaucaugaccagcuaccaguaccugaucauccagaacaccacgugggaggaccacugccaguucucccggcccagccccaucggguaccugggccuccugucccagcgcacccgggacaucuacaucagccgccggcgccggggcaccuucaccuggacgcugagcgacuccgaggggaaggacaccccgggcggguacugccugacccgcuggaugcucaucgaggccgagcugaagugcuucggcaacaccgccguggccaagugcaacgagaagcacgacgaggaguucugcgacaugcugcggcuguucgacuucaacaagcaggccauccagcgccugaaggcgcccgcccagaugagcauccagcugaucaacaaggccgugaacgcccucaucaacgaccagcugaucaugaagaaccaccuccgggacaucaugugcauccccuacugcaacuacuccaaguacugguaccucaaccacacgaccaccggccgcaccagccugcccaagugcuggcuggucuccaacggcagcuaccucaacgagacgcacuucuccgacgacaucgagcagcaggccgacaacaugaucaccgagaugcugcagaaggaguacauggagcggcaggggaagacgccccugggccucguggaccuguucguguucagcaccuccuucuaccugaucagcaucuuccugcaccucgucaagaucccgacccaccgccacaucguggggaaguccugccccaagccccaccggcugaaccacaugggcaucugcagcugcgggcuguacaagcagcccggcgugccggucaaguggaagcgcuga

SEQ ID NO: 4076 - RNA, 1473 nt, Artificial Sequence
  derived and/or modified protein sequence (opt1) from LASV(LP;Clade I)__AAF86701__GPCstabilized
augggccagaucaucaccuucuuccaggaggugccccacgucaucgaggaggugaugaacaucgugcugaucgcccucagccugcuggccauccucaaggggcuguacaacaucgcgaccugcggcaucaucgggcuggucgccuuccucuuccugugcggcaaguccugcagccugacgcucaagggcggguacgagcugcagacccuggagcucaacauggagacccugaacaugaccaugccgcuguccugcacgaagaacagcucccaccacuacauccgcgugggcaacgagaccgggcucgagcugacccugaccaacacgagcaucaucaaccacaaguucugcaaccucuccgacgcccacaagaagaaccuguacgaccacgcccugaugagcaucaucuccaccuuccaccucagcauccccaacuucaaccaguacgaggccauguccugcgacuucaacggcgggaagaucagcgugcaguacaaccugucccacagcuacgcgggcgacgccgccgagcacugcgggaccgucgccaacggcgugcugcagaccuucaugcggauggcguggggcgggcgcuacaucgcccucgacuccggcugcgggaacugggacugcaucaugacgagcuaccaguaccugaucauccagaacaccaccugggaggaccacugccaguucucccggcccagccccaucggcuaccugggccuccugucccagcgcacccgggacaucuacaucagccgccggcgccgggggacguucaccuggacccugagcgacuccgagggcaacgagacccccgggggcuacugccugacgcgcuggaugcucaucgaggccgagcugaagugcuucgggaacaccgccguggccaagugcaacgagaagcacgacgaggaguucugcgacaugcugcggcuguucgacuucaacaagcaggcgauccgccggcugaaggcccccgcccagaugagcauccagcugaucaacaaggccgucaacgcccucaucaacgaccagcugaucaugaagaaccaccuccgcgacaucaugugcauccccuacugcaacuacuccaaguacugguaccucaaccacaccagcuccggccggaccagccugcccaagugcuggcugaucuccaacgggagcuaccucaacgagacgcaguucuccgacgacaucgagcagcaggcggacaacaugaucaccgagaugcugcagaaggaguacaucgagcgccagggcaagaccccgcuggggcucguggacaucuucaucuucagcaccuccuucuaccugaucagcaucuuccugcaccugaucaagaucccgacgcaccggcacaucgugggcaagcccugccccaagccccaccgccucaaccacaugggggucugcuccugcggccuguacaagcacccgggcgugcccaccaaguggaagcgguga

SEQ ID NO: 4077 - RNA, 1473 nt, Artificial Sequence
  derived and/or modified protein sequence (opt1) from LASV(803213;Clade II)__AAF86703__GPCstabilized
augggccagaucaucaccuucuuccaggaggugccccacgucaucgaggaggugaugaacaucgugcugaucgcccucagccugcuggccauccucaaggggaucuacaacgucgcgaccugcggccuguucgggcugaucuccuuccuccugcugugcggccgcagcugcuccgugacguacaaggggguguacgagcuccagacccuggagcugaacauggccaaccucaacaugaccaugccgcugagcugcaccaagaacaacucccaccacuacaucauggucggcaacgagacgggccuggagcucacccugaccaacaccagcaucaucaaccacaaguucugcaaccuguccgacgcccacaagaagaaccucuacgaccacgcccugaugagcaucaucuccacguuccaccugagcauccccaacuucaaccaguacgaggccauguccugcgacuucaacgggggcaagaucagcgugcaguacaaccucucccacagcuucgcgguggacgccgccaaccacugcgggaccaucgccaacggcguccugcagaccuucaugcggauggcguggggcggguccuacaucgcccuggacagcggcugcgggaacugggacugcaucaugaccuccuaccaguaccucaucauccagaacacgaccugggaggaccacugccaguucagccgccccucccccaucggcuaccuggggcugcucagccagcggacccgcgacaucuacaucagccggcgccgccggggcaccuucacguggacccucuccgacagcgagggcaacgaggcccccgggggcuacugccugacccgguggaugcugaucgaggccgagcucaagugcuucgggaacaccgccguggcgaagugcaacgagaagcacgacgaggaguucugcgacaugcugcgccuguucgacuucaacaagcaggccaucaagcggcucaagacgcccgcccagauguccauccagcugaucaacaaggccgugaacgcccugaucaacgaccagcucaucaugaagaaccaccuccgcgacaucaugugcauccccuacugcaacuacagccgguacugguaccugaaccacaccgucaccgggaagaccucccugccccgcugcuggcuggugagcaacggcuccuaccugaacgagacgcacuucagcgacgacaucgagcagcaggcggacaacaugaucaccgagaugcuccagaaggaguacauggaccggcagggcaagaccccgcuggggcugguggaccucuucgucuucuccaccagcuucuaccugaucuccaucuuccugcaccuggugaagaucccgacgcaccgccacaucgugggcaagcccugccccaagccccaccggcucaaccacauggggaucugcagcugcggccuguacaagcacccggggguccccgugaaguggaagcgcuga

SEQ ID NO: 4078 - RNA, 1473 nt, Artificial Sequence
  derived and/or modified protein sequence (opt1) from LASV(GA391;Clade III)__CAA36645__GPCstabilized
augggccagaucgugaccuucuuccaggaggucccccacgugaucgaggaggugaugaacaucguccugaucgcccucagcauccuggccauccugaaggggcucuacaacguggcgaccugcggccugaucgggcuggugacguuccuccugcuguccggccgcagcugcucccucaucuacaaggggaccuacgagcugcagacccuggagcucaacauggagacccugaacaugacgaugccgcugagcugcaccaagaacaacucccaccacuacauccgggucggcaacgagaccggccucgagcugacccugacgaacaccagcauccucaaccacaaguucugcaaccuguccgacgcccacaagcgcaaccuguacgaccacagccucauguccaucaucagcaccuuccaccuguccauccccaacuucaaccaguacgaggccaugagcugcgacuucaacgggggcaagaucaccgugcaguacaaccugucccacagcuucgccguggacgccgcggggcacugcggcacgcucgccaacgggguccugcagaccuucaugcggauggccuggggcggcuccuacaucgcccuggacagcgggugcggcaacugggacugcaucaugaccuccuaccaguaccucaucauccagaacaccacgugggacgaccacugccaguucagccggcccucccccaucggguaccugggccugcucagccagcgcacccgggacaucuacaucagccgccggcgccggggcaccuucaccuggacgcucuccgacagcgaggggaacgagaccccgggcggguacugccugacccgcuggaugcugaucgaggcggagcucaagugcuucggcaacaccgccguggccaagugcaacgagaagcacgacgaggaguucugcgacaugcugcggcuguucgacuucaacaagcaggccauccgccggcucaagacgcccgcccagauguccauccagcugaucaacaaggcggugaacgcccugaucaacgaccagcucaucaugaagaaccaccuccgcgacaucaugugcauccccuacugcaacuacagccgguacugguaccugaaccacaccuccaccggcaagaccagccugccccgcugcuggcugaucuccaacggcagcuaccugaacgagacgaaguucuccgacgacaucgagcagcaggccgacaacaugaucaccgagaugcuccagaaggaguacaucgaccggcaggggaagacgccccugggccuggucgaccuguucguguucagcaccuccuucuaccucaucagcaucuuccugcaccuggugaagaucccgacccaccgccacaucgucgggaagcccugccccaagccccaccggcucaaccacaugggcaucugcuccugcgggcuguacaagcagccgggcgugcccgugcgcuggaagcgguga

SEQ ID NO: 4079 - RNA, 1476 nt, Artificial Sequence
  derived and/or modified protein sequence (opt1) from LASV(AV;Clade V)__CCA30314__GPCstabilized
augggccagaucgugaccuucuuccaggaggucccccacgugaucgaggaggugaugaacaucguccugaucgcccucagcauccuggccgugcugaaggggcucuacaacaucgcgaccugcggccugaucgggcugaucacguuccuccugcugugcggccgcuccugcagcuccaaccucuacaaggggguguacgagcugcagagccuggaccucaacauggagacccugaacaugaccaugccgcuguccugcaccaagaacaacagccaccacuacauccgggucggcaacgacacgggccucgagcugacccugaccaacaccuccauccucaaccacaaguucugcaaccugagcgacgcccacaagaaggaccuguacgaccacgcccucauguccaucaucagcacguuccaccuguccauccccaacuucaaccaguacgaggccaugagcugcgacuucaacgggggcaagaucuccgugcaguacaaccugagccacuccuacgccaucgacgcggccaaccacugcgggaccguggccaacggcauccuccagaccuucaugcgcauggccuggggcgggagcuacaucgcgcuggacuccggcugcgggaacugggacugcaucaugaccagcuaccaguaccugaucauccagaacacgaccugggagaaccacugccaguucucccgccccagccccaucggcuaccucgggcugcugagccagcggacccgcgacaucuacaucucccggcgccgccggggcaccuucacguggacccugagcgacuccgagggcaacgccacccccgggggcuacugccucacccgguggaugcugaucgaggccgagcugaagugcuucgggaacacggccgucgccaagugcaacgagaagcacgacgaggaguucugcgacaugcuccgccuguucgacuucaacaagcaggcgaucagccggcugaagucccccgcccagaugagcauccagcucaucaacaaggccgugaacgcccugaucaacgaccagcugaucaugaagaaccaccuccgcgacaucaugugcauccccuacugcaacuacuccaaguacugguaccugaaccacaccaucaccgggaagaccagccugcccaagugcuggcucguguccaacggcagcuaccugaacgagacgcacuucuccgacgacaucgagcagcaggccgacaacaugaucaccgagaugcugcagaaggaguacauggagcggcagggcaagaccccgcucgggcuggucgaccuguucguguucagcaccuccuucuaccugaucagcaucuuccuccgccuggugaagaucccgacgcaccggcacaucgucggcaagcccugccccaagccccaccgccugaaccacauggggaucugcuccugcggccucuacaagcagccgggggugcccgugcgguggaagcgcuga

SEQ ID NO: 4080 - RNA, 1473 nt, Artificial Sequence
  derived and/or modified protein sequence (opt1) from LASV(Togo/2016/7082;Clade VI)__AMR44577__GPCstabilized
augggccagaucaucaccuucuuccaggaggugccccacgucaucgaggaggugaugaacaucgugcugaucgcccucagccugcuggccauccucaagggggucuacaacguggcgaccugcggcaucaucgggcuggugacguuccuguuccucugcggccgcuccugcagccugaucuacaagggguccuacgagcugcagacccucgagcugaacauggagacccugaacaugaccaugccgcucagcugcacgaagaacuccagccaccacuacauccgggucggcaacgagaccggccuggagcugacccucaccaacacguccaucaucaaccacaaguucugcaaccugagcgacgcccacaagcgcaaccuguacgaccacgcccucauguccauccugagcaccuuccaccuguccauccccaacuucaaccaguacgaggccaugagcugcgacuucaacgggggcaagaucuccgugcaguacaaccucagccacgccuacgcgguggacgccgccgagcacugcgggaccgucgccaacggcgugcugcagaccuucaugcggauggcguggggcggguccuacaucgcccuggacagcggcugcgggaacugggacugcaucaugacguccuaccaguaccucaucauccagaacaccaccugggaggaccacugccaguucagccggcccucccccaucggcuaccuggggcugcucagccagcgcacccgggacaucuacaucagccgccggcgccggggcacguucaccuggacccucuccgacagcgagggcaacgagacccccgggggcuacugccugacgcgcuggaugcugaucgaggccgagcucaagugcuucgggaacaccgccguggccaagugcaacgagaagcacgacgaggaguucugcgacaugcugcggcuguucgacuucaacaagcaggcgauccagcgccucaagucccccgcccagaugagcauccagcugaucaacaaggccgucaacgcccugaucaacgaccagcucaucaugaagaaccaccuccgggacaugaugugcauccccuacugcaacuacuccaaguacugguaccugaaccacaccagcuccgggcgcaccagccugcccaagugcuggcugguguccaacggcagcuaccugaacgagacgcacuucuccgacgacaucgagcagcaggccgacaacaugaucaccgagaugcuccagaaggaguacaucgaccggcagggcaagaccccgcuggggcugguggaccucuucgucuucagcaccuccuucuaccugaucagcaucuuccugcaccugaucaagaucccgacgcaccgccacaucgugggcaagcccugccccaagccccaccggcucaaccacauggggaucugcuccugcggccuguacaagcagccgggggugcccacccgcuggaagcgguga

SEQ ID NO: 4081 - RNA, 1473 nt, Artificial Sequence
  derived and/or modified protein sequence (opt1) from LASV(KAK-428;Clade n.d. (VII))__ANH09740__GPCstabilized
augggccagaucgugaccuucuuccaggaggucccccacgugaucgaggaggugaugaacaucguccugaucgcccucagccugcuggccauccucaaggggcuguacaacuucgcgaccugcggcgugaucgggcugaucacguuccuccugcugugcggccgcuccugcagcgccaccuacaaggggcaguacgagcuccagacccuggagcugaacauggagucccucaacaugaccaugccgcugagcugcacgaagaacaacucccaccacuacauccgggccggcaacaacaccggccuggagcucacccugaccaacacgagcaucaucucccacaaguucugcaaccugagcgacgcccacaagaagaaccucuacgaccacacccugauguccaucaucaccaccuuccaccugagcauccccaacuucaaccaguacgaggccauguccugcgacuucaacgggggcaagaucagcauccaguacaaccucucccacagcuacgcgggggacgccgcccagcacugcggcacgguggccaacgggguccugcagaccuucaugcgcauggcguggggcggcuccuaccuggcccucgacagcgggugccgcggcugggacugcaucaucuccagcuaccaguaccugaucauccagaacaccaccugggacgaccacugccaguucucccggcccagccccaucggguaccugggcuucgugagccagaagacgcgcgacaucuacaucucccggcgccgccggggcaccuucaccuggacccugagcgacuccgaggggcacgacaugccgggcggguacugccucacgcgguggaugcugaucgaggccgaccugaagugcuucggcaacaccgccguggccaagugcaacgagaagcacgacgaggaguucugcgacauguggcgccucuucgacuucaacaagcaggcgauccagcggcugaaggcccccgcccagaugaacauccagcugaucaacaaggccgucaacgcccucaucaacgaccagcugaugaugaagaaccaccuccgcgacaucaugugcauccccuacugcaacuacagcaaguucugguaccugaacaacaccaccacgggccggaccucccugccccgcugcuggcugaucagcaacggcuccuaccucaacgagacccacuucagcgacgacaucgagcagcaggcggacaacaugaucaccgagaugcugcagaaggaguacauggaccggcaggggaagacgccccugggccucguggaccuguucguguucuccaccagcuucuaccugaucaccaucuuccuccaccuggucaagaucccgacccaccgccacaucguggggaagcccugccccaagccccaccggcugaaccacaugggcaucugcuccugcgggcuguacaagcagccgggcgugcccguccgcuggaagcgguga

SEQ ID NO: 4082 - RNA, 1473 nt, Artificial Sequence
  derived and/or modified protein sequence (opt1) from LASV(Acar 3080;Clade I)__AAT49014__GPCstabilized
augggccagaucaucaccuucuuccaggaggugccccacgucaucgaggaggugaugaacaucgugcugaucgcccucagccugcuggccauccucaaggggcuguacaacaucgcgaccugcggcaucaucgggcuggucgccuuccucuuccugugcggcaaguccugcagccugacgcucaagggcggguacgagcugcagacccuggagcucaacauggagacccugaacaugaccaugccgcuguccugcacgaagaacagcucccaccacuacauccgcgugggcaacgagaccgggcucgagcugacccugaccaacacgagcaucaucaaccacaaguucugcaaccucuccgacgcccacaagaagaaccuguacgaccacgcccugaugagcaucaucuccaccuuccaccucagcauccccaacuucaaccaguacgaggccauguccugcgacuucaacggcgggaagaucagcgugcaguacaaccugucccacagcuacgcgggcgacgccgccgagcacugcgggaccgucgccaacggcgugcugcagaccuucaugcggauggcguggggcgggcgcuacaucgcccucgacuccggcugcgggaacugggacugcaucaugacgagcuaccaguaccugaucauccagaacaccaccugggaggaccacugccaguucucccggcccagccccaucggcuaccugggccuccugucccagcgcacccgggacaucuacaucagccgccggcgccgggggacguucaccuggacccugagcgacuccgagggcaacgagacccccgggggcuacugccugacgcgcuggaugcucaucgaggccgagcugaagugcuucgggaacaccgccguggccaagugcaacgagaagcacgacgaggaguucugcgacaugcugcggcuguucgacuucaacaagcaggcgauccgccggcugaaggcccccgcccagaugagcauccagcugaucaacaaggccgucaacgcccucaucaacgaccagcugaucaugaagaaccaccuccgcgacaucaugugcauccccuacugcaacuacuccaaguacugguaccucaaccacaccagcuccggccggaccagccugcccaagugcuggcugaucuccaacgggagcuaccucaacgagacgcaguucuccgacgacaucgagcagcaggcggaccacaugaucaccgagaugcugcagaaggaguacaucgagcgccagggcaagaccccgcuggggcucguggacaucuucaucuucagcaccuccuucuaccugaucagcaucuuccugcaccugaucaagaucccgacgcaccggcacaucgugggcaagcccugccccaagccccaccgccucaaccacaugggggucugcuccugcggccuguacaagcacccgggcgugcccaccaaguggaagcgguga

SEQ ID NO: 4083 - RNA, 1473 nt, Artificial Sequence; identical to SEQ ID NO: 4076
  derived and/or modified protein sequence (opt1) from LASV(Pinneo-NIG-1969;Clade I)__AIT17836__GPCstabilized

SEQ ID NO: 4084 - RNA, 1473 nt, Artificial Sequence
  derived and/or modified protein sequence (opt1) from LASV(ISTH0009-NIG-2011;Clade II)__AIT17404__GPCstabilized
augggccagaucaucaccuucuuccaggaggugccccacgucaucgaggaggugaugaacaucgugcugaucgcccucagccugcuggccauccucaaggggaucuacaacgucgcgaccugcggccuguucgggcugguguccuuccuccugcugugcggccgcagcugcuccacgaccuacaaggggguguacgagcuccagacccuggagcuggacauggccagccucaacaugaccaugccgcuguccugcacgaagaacaacagccaccacuacaucauggucggcaacgagaccggccuggagcucacccugaccaacacguccaucaucaaccacaaguucugcaaccugagcgacgcccacaagaagaaccucuacgaccacgcccugauguccaucaucagcaccuuccaccuguccauccccaacuucaaccaguacgaggccaugagcugcgacuucaacgggggcaagaucuccgugcaguacaaccucagccacgcguacgccguggacgccgccaaccacugcgggaccaucgcgaacggcguccugcagaccuucaugcggauggccuggggcggguccuacaucgcccuggacagcggcugcggguccugggacugcaucaugacgagcuaccaguaccucaucauccagaacaccaccugggaggaccacugccaguucucccgccccagccccaucggcuaccuggggcugcucagccagcggacccgcgacaucuacaucucccggcgccgccggggcacguucaccuggacccucagcgacuccgagggcaacgagacccccgggggcuacugccugacgcgguggaugcugaucgaggccgagcucaagugcuucgggaacaccgccguggcgaagugcaacgagaagcacgacgaggaguucugcgacaugcugcgccuguucgacuucaacaagcaggccauccggcgccucaagacccccgcccagaugagcauccagcugaucaacaaggccgugaacgcccugaucaacgaccagcucaucaugaagaaccaccuccgggacaucaugugcaucccguacugcaacuacuccaaguacugguaccugaaccacaccgucacggggaagaccagccugccccgcugcuggcugguguccaacggcagcuaccugaacgagacccacuucuccgacgacaucgagcagcaggcggacaacaugaucaccgagcuccugcagaaggaguacauggaccggcagggcaagacgccccuggggcucguggaccuguucgucuucagcaccuccuucuaccugaucagcaucuuccugcaccucaucaagaucccgacccaccgccacaucaccggcaagcccugccccaagccccaccggcugaaccacauggggaucugcuccugcggccuguacaagcacccgggggugcccgugaaguggaagcgcuga

SEQ ID NO: 4085 - RNA, 1473 nt, Artificial Sequence
  derived and/or modified protein sequence (opt1) from LASV(ISTH0012-NIG-2011;Clade II)__AIT17408__GPCstabilized
augggccagaucaucaccuucuuccaggaggugccccacgucaucgaggaggugaugaacaucgugcugaucgcccucagccugcuggccauccucaaggggaucuacaacgucgcgaccugcggccuguucgggcugguguccuuccuccugcugugcggccgcagcugcuccacgaccuacaaggggguguacgagcuccagacccuggagcuggacauggccagccucaacaugaccaugccgcuguccugcacgaagaacaacagccaccacuacaucauggucggcaacgagaccggccuggagcucacccugaccaacacguccaucaucaaccacaaguucugcaaccugagcgacgcccacaagaagaaccucuacgaccacgcccugauguccaucaucagcaccuuccaccuguccauccccaacuucaaccaguacgaggccaugagcugcgacuucaacgggggcaagaucuccgugcaguacaaccucagccacaccuacgcgguggacgccgccaaccacugcgggaccgucgccaacggcgugcugcagacguucaugcggauggcguggggcggguccuacaucgcccuggacagcggcugcggguccugggacugcaucaugaccagcuaccaguaccucaucauccagaacaccaccugggaggaccacugccaguucucccgccccagccccaucggcuaccuggggcugcucagccagcggacgcgcgacaucuacaucucccggcgccgccggggcaccuucaccuggacccucagcgacuccgagggcaacgagacgcccgggggcuacugccugacccgguggaugcugaucgaggccgagcucaagugcuucgggaacaccgccguggccaagugcaacgagaagcacgacgaggaguucugcgacaugcugcgccuguucgacuucaacaagcaggcgauccggcgccucaagacccccgcccagaugagcauccagcugaucaacaaggccgucaacgcccugaucaacgaccagcucaucaugaagaaccaccuccgggacaucaugugcauccccuacugcaacuacuccaaguacugguaccugaaccacacggugaccgggaagaccagccugccccgcugcuggcugguguccaacggcagcuaccugaacgagacccacuucuccgacgacaucgagcagcaggccgacaacaugaucacggagcuccugcagaaggaguacauggaccggcagggcaagaccccgcuggggcucgucgaccuguucguguucagcaccuccuucuaccugaucagcaucuuccugcaccucgugaagaucccgacccaccgccacgucaucggcaagcccugccccaagccccaccggcugaaccacauggggaucugcuccugcggccuguacaagcacccgggggugcccgugaaguggaagcgcuga

SEQ ID NO: 4086 - RNA, 1473 nt, Artificial Sequence
  derived and/or modified protein sequence (opt1) from LASV(ISTH0047-NIG-2011;Clade II)__AIT17412__GPCstabilized
augggccagaucaucaccuucuuccaggaggugccccacgucaucgaggaggugaugaacaucgugcugaucgcccucagccugcuggccauccucaaggggaucuacaacgucgcgaccugcggccuguucgggcugguguccuuccuccugcugugcggccgcagcugcuccacgaccuacaaggggguguacgagcuccagacccuggagcuggacauggccagccucaacaugaccaugccgcuguccugcacgaagaacaacagccaccacuacaucauggucggcaacgagaccggccuggagcucacccugaccaacacguccaucaucaaccacaaguucugcaaccugagcgacgcccacaagaagaaccucuacgaccacgcccugauguccaucaucagcaccuuccaccuguccauccccaacuucaaccaguacgaggccaugagcugcgacuucaacgggggcaagaucuccgugcaguacaaccucagccacgcguacgccguggacgccgccaaccacugcgggaccaucgcgaacggcguccugcagaccuucaugcggauggccuggggcggguccuacaucgcccuggacagcggcugcggguccugggacugcaucaugacgagcuaccaguaccucaucauccagaacaccuccugggaggaccacugccaguucagccgccccagccccaucggcuaccuggggcugcucucccagcggacccgcgacaucuacaucagccggcgccgccggggcaccuucacguggacccucuccgacagcgagggcaacgagacccccgggggcuacugccugacccgguggaugcugaucgaggccgagcucaagugcuucgggaacacggccguggcgaagugcaacgagaagcacgacgaggaguucugcgacaugcugcgccuguucgacuucaacaagcaggccauccggcgccucaagacccccgcccagauguccauccagcugaucaacaaggccgugaacgcccugaucaacgaccagcucaucaugaagaaccaccuccgggacaucaugugcauccccuacugcaacuacagcaaguacugguaccugaaccacaccgucaccgggaagacgucccugccccgcugcuggcuggugagcaacggcuccuaccugaacgagacccacuucagcgacgacaucgagcagcaggcggacaacaugaucaccgagcuccugcagaaggaguacaucgaccggcagggcaagaccccgcuggggcucguggaccuguucgucuucuccacgagcuucuaccugaucuccaucuuccugcaccucgugaagaucccgacccaccgccacgugaucggcaagcccugccccaagccccaccggcugaaccacauggggaucugcagcugcggccuguacaagcacccggggguccccgugaaguggaagcgcuga

SEQ ID NO: 4087 - RNA, 1473 nt, Artificial Sequence
  derived and/or modified protein sequence (opt1) from LASV(ISTH0073-NIG-2011;Clade II)__AIT17416__GPCstabilized
augggccagaucaucaccuucuuccaggaggugccccacgucaucgaggaggugaugaacaucgugcugaucgcccucagccugcuggccauccucaaggggaucuacaacgucgcgaccugcggccuguucgggcugguguccuuccuccugcugugcggccgcagcugcuccacgaccuacaaggggguguacgagcuccagacccuggagcuggacauggccagccucaacaugaccaugccgcuguccugcacgaagaacaacagccaccacuacaucauggucggcaacgagaccggccuggagcucacccugaccaacacguccaucaucaaccacaaguucugcaaccugagcgacgcccaccggaagaaccucuacgaccacgcccugauguccaucaucagcaccuuccaccuguccauccccaacuucaaccaguacgaggccaugagcugcgacuucaacgggggcaagaucuccgugcaguacaaccucagccacgcguacgccguggacgccgccaaccacugcgggaccaucgcgaacggcguccugcagaccuucaugcgcauggccuggggcggguccuacaucgcccuggacagcggcugcggguccugggacugcaucaugacgagcuaccaguaccucaucauccagaacaccuccugggaggaccacugccaguucagccggcccagccccaucggcuaccuggggcugcucucccagcgcacccgggacaucuacaucagccgccggcgccggggcaccuucacguggacccucuccgacagcgagggcaacgagacccccgggggcuacugccugacccgcuggaugcugaucgaggccgagcucaagugcuucgggaacacggccguggcgaagugcaacgagaagcacgacgaggaguucugcgacaugcugcggcuguucgacuucaacaagcaggccauccgccggcucaagacccccgcccagauguccauccagcugaucaacaaggccgugaacgcccugaucaacgaccagcucaucaugaagaaccaccuccgcgacaucaugugcauccccuacugcaacuacagcaaguacugguaccugaaccacaccgucaccgggaagacgucccugccccggugcuggcuggugagcaacggcuccuaccugaacgagacccacuucagcgacgacaucgagcagcaggcggacaacaugaucaccgagcuccugcagaaggaguacaucgaccgccagggcaagaccccgcuggggcucguggaccuguucgucuucuccacgagcuucuaccugaucuccaucuuccugcaccucgugaagaucccgacccaccggcacgugaucggcaagcccugccccaagccccaccgccugaaccacauggggaucugcagcugcggccuguacaagcacccggggguccccgugaaguggaagcgguga

SEQ ID NO: 4088 - RNA, 1473 nt, Artificial Sequence
  derived and/or modified protein sequence (opt1) from LASV(ISTH0230-NIG-2011;Clade II)__AIT17420__GPCstabilized
augggccagaucaucaccuucuuccaggaggugccccacgucaucgaggaggugaugaacaucgugcugaucgcccucagccugcuggccauccucaaggggaucuacaacgucgcgaccugcggccuguucgggcugguguccuuccuccugcugugcggccgcagcugcuccacgaccuacaaggggguguacgagcuccagacccuggagcuggacauggccagccucaacaugaccaugccgcuguccugcacgaagaacaacagccaccacuacaucauggucggcaacgagaccggccuggagcucacccugaccaacacguccaucaucaaccacaaguucugcaaccugagcgacgcccacaagaagaaccucuacgaccacgcccugauguccaucaucagcaccuuccaccuguccauccccaacuucaaccaguacgaggccaugagcugcgacuucaacgggggcaagaucuccgugcaguacaaccucagccacaccuacgcgguggacgccgccaaccacugcgggaccaucgccaacggcguccugcagacguucaugcggauggcguggggcggguccuacaucgcccuggacagcggcugcggguccugggacugcaucaugaccagcuaccaguaccucaucauccagaacaccaccugggaggaccacugccaguucucccgccccagccccaucggcuaccuggggcugcucagccagcggacgcgcgacaucuacaucucccggcgccgccggggcaccuucaccuggacccucagcgacuccgagggcaacgagacgcccgggggcuacugccugacccgguggaugcugaucgaggccgagcucaagugcuucgggaacaccgccguggccaagugcaacgagaagcacgacgaggaguucugcgacaugcugcgccuguucgacuucaacaagcaggcgauccggcgccucaagacccccgcccagaugagcauccagcugaucaacaaggccgugaacgcccugaucaacgaccagcucaucaugaagaaccaccuccgggacaucaugugcauccccuacugcaacuacuccaaguacugguaccugaaccacacggucaccgggaagaccagccugccccgcugcuggcugguguccaacggcagcuaccugaacgagacccacuucuccgacgacaucgagcagcaggccgacaacaugaucacggagcuccugcagaaggaguacauggaccggcagggcaagaccccgcuggggcucguggaccuguucgucuucagcaccuccuucuaccugaucagcaucuuccugcaccucaucaagaucccgacccaccgccacaucacgggcaagcccugccccaagccccaccggcugaaccacauggggaucugcuccugcggccuguacaagcacccgggggugcccgugaaguggaagcgcuga

SEQ ID NO: 4089 - RNA, 1473 nt, Artificial Sequence
  derived and/or modified protein sequence (opt1) from LASV(ISTH0531-NIG-2011;Clade II)__AIT17424__GPCstabilized
augggccagaucaucaccuucuuccaggaggugccccacgucaucgaggaggugaugaacaucgugcugaucgcccucagccugcuggccauccucaaggggaucuacaacgucgcgaccugcggccuguucgggcugguguccuuccuccugcugugcggccgcagcugcuccacgaccuacaaggggguguacgagcuccagacccuggagcuggacaugaccaaccucaacaugacgaugccgcugagcugcaccaagaacaacucccaccacuacaucauggucggcaacgagaccggccuggagcucacccugacgaacaccagcaucaucaaccacaaguucugcaaccuguccgacgcccacaagaagaaccucuacaaccacgcccugaugagcaucaucuccaccuuccaccugagcauccccaacuucaaccaguacgaggccauguccugcgacuucaacgggggcaagaucagcgugcaguacaaccucucccacgccuacgcgguggacgccgccaaccacugcgggaccaucgccaacggcguccugcagacguucaugcggauggcguggggcgggagcuacaucgcccuggacuccggcugcgggagcugggacugcaucaugaccuccuaccaguaccucaucauccagaacaccaccugggaggaccacugccaguucagccgccccucccccaucggcuaccuggggcugcucagccagcggacgcgcgacaucuacaucagccggcgccgccggggcaccuucaccuggacccucuccgacagcgagggcaacgagacgcccgggggcuacugccugacccgguggaugcugaucgaggccgagcucaagugcuucgggaacaccgccguggccaagugcaacgagaagcacgacgaggaguucugcgacaugcugcgccuguucgacuucaacaagcaggcgauccggcgccucaagacccccgcccagacgaacauccagcugaucaacaaggccgugaacgcccugaucaacgaccagcucaucaugaagaaccaccuccgggacaucaugugcauccccuacugcaacuacuccaaguacugguaccugaaccacaccgucaccgggaagaccagccugccccgcugcuggcugguguccaacggcagcuaccugaacgagacgcacuucuccgacgacaucgagcagcaggccgacaacaugaucaccgagcuccugcagaaggaguacauggaccggcagggcaagaccccgcuggggcucguggaccuguucgucuucagcaccuccuucuaccugaucagcaucuuccugcaccucgugaagaucccgacgcaccgccacaucaucggcaagcccugccccaagccccaccggcugaaccacauggggaucugcuccugcggccuguacaagcacccgggggugcccgucaaguggaagcgcuga

SEQ ID NO: 4090 - RNA, 1473 nt, Artificial Sequence
  derived and/or modified protein sequence (opt1) from LASV(ISTH0595-NIG-2011;Clade II)__AIT17428__GPCstabilized
augggccagaucaucaccuucuuccaggaggugccccacgucaucgaggaggugaugaacaucgugcugaucgcccucagccugcuggccauccucaaggggaucuacaacgucgcgaccugcggccuguucgggcugguguccuuccuccugcugugcggccgcagcugcuccacgaccuacaaggggguguacgagcuccagacccuggagcuggacauggccagccucaacaugaccaugccgcuguccugcacgaagaacaacagccaccacuacaucauggucggcaacgagaccggccuggagcucacccugaccaacacguccaucaucaaccacaaguucugcaaccugagcgacgcccacaagaagaaccucuacgaccacgcccugauguccaucaucagcaccuuccaccuguccauccccaacuucaaccaguacgaggccaugagcugcgacuucaacgggggcaagaucuccgugcaguacaaccucagccacaccuacgcgguggacgccgccaaccacugcgggaccaucgccaacggcguccugcagacguucaugcggauggcguggggcggguccuacaucgcccuggacagcggcugcggguccugggacugcaucaugaccagcuaccaguaccucaucauccagaacaccaccugggaggaccacugccaguucucccgccccagccccaucggcuaccuggggcugcucagccagcggacgcgcgacaucuacaucucccggcgccgccggggcaccuucaccuggacccucagcgacuccgagggcaacgagacgcccgggggcuacugccugacccgguggaugcugaucgccgccgaccucaagugcuucgggaacaccgccguggcgaagugcaacgagaagcacgacgaggaguucugcgacaugcugcgccuguucgacuucaacaagcaggccaucgagcggcucaagacccccgcccagaugagcauccagcugaucaacaaggccgugaacgcccugaucaacgaccagcucaucaugaagaaccaccuccgcgacaucaugugcauccccuacugcaacuacuccaaguacugguaccugaaccacacggucaccgggcggaccagccugccccgcugcuggcugguguccaacggcagcuaccugaacgagacccacuucuccgacgacaucgagcagcaggcggacaacaugaucacggagcuccugcagaaggaguacauggaccggcagggcaagaccccgcuggggcucguggaccuguucgucuucagcaccuccuucuaccugaucagcaucuuccugcaccucgugcgcaucccgacccaccggcacgugaucggcaagcccugccccaagccccaccgccugaaccacauggggaucugcuccugcggccuguacaagcacccggggguccccgugaaguggaagcgguga

SEQ ID NO: 4091 - RNA, 1473 nt, Artificial Sequence
  derived and/or modified protein sequence (opt1) from LASV(ISTH0964-NIG-2011;Clade II)__AIT17430__GPCstabilized
augggccagaucaucaccuucuuccaggaggugccccacgucaucgaggaggugaugaacaucgugcugaucgcccucagccugcuggccauccucaaggggaucuacaacgucgcgaccugcggccuguucgggcugguguccuuccuccugcugugcggccgcagcugcuccacgaccuacaaggggguguacgagcuccagacccuggagcuggacauggccagccucaacaugaccaugccgcuguccugcacgaagaacaacagccaccacuacaucauggucggcaacgagaccggccuggagcucacccugaccaacacguccaucaucaaccacaaguucugcaaccugagcgacgcccacaagaagaaccucuacgaccacgcccugauguccaucaucagcaccuuccaccuguccauccccaacuucaaccaguacgaggccaugagcugcgacuucaacgggggccggaucuccgugcaguacaaccucagccacaccuacgcgguggacgccgccaagcacugcgggaccaucgccaacggcguccugcagacguucaugcgcauggcguggggcggguccuacaucgcccuggacagcggcugcggguccugggacugcaucaugaccagcuaccaguaccucaucauccagaacaccaccugggaggaccacugccaguucucccggcccagccccaucggcuaccuggggcugcucagccagcgcacgcgggacaucuacaucucccgccggcgccggggcaccuucaccuggacccucagcgacuccgagggcaacgagacgcccgggggcuacugccugacccgcuggaugcugaucgaggccgagcucaagugcuucgggaacaccgccguggccaagugcaacgagaagcacgacgaggaguucugcgacaugcugcggcuguucgacuucaacaagcaggcgauccgccggcucaagacccccgcccagaugagcauccagcugaucaacaaggccgugaacgcccugaucaacgaccagcucaucaugaagaaccaccuccgcgacaucaugugcauccccuacugcaacuacuccaaguacugguaccugaaccacacggucaccgggaagaccagccugccccggugcuggcugguguccaacggcagcuaccugaacgagacccacuucuccgacgacaucgagcagcaggccgacaacaugaucacggagcuccugcagaaggaguacaucgaccgccagggcaagaccccgcuggggcucguggaccuguucgucuucagcaccuccuucuaccugaucagcaucuuccugcaccucgugaagaucccgacccaccggcacgugaucggcaagcccugccccaagccccaccgccugaaccacauggggaucugcuccugcggccuguacaagcacccggggguccccgugaaguggaagcgguga

SEQ ID NO: 4092 - RNA, 1473 nt, Artificial Sequence
  derived and/or modified protein sequence (opt1) from LASV(ISTH1038-NIG-2011;Clade II)__AIT17438__GPCstabilized
augggccagaucaucaccuucuuccaggaggugccccacgucaucgaggaggugaugaacaucgugcugaucgcccucagccugcuggccauccucaaggggaucuacaacgucgcgaccugcggccuguucgggcugguguccuuccuccugcugugcggccgcagcugcuccacgaccuacaaggggguguacgagcuccagacccuggagcuggacauggccaaccucaacaugaccaugccgcugagcugcacgaagaacaacucccaccacuacauccgggucggcaacgagaccggccuggagcucacccugaccaacacgagcaucaucucccacaaguucugcaaccugagcgacgcccacaagaagaaccucuacgaccacgcccugauguccaucaucagcaccuuccaccuguccauccccaacuucaaccaguacgaggccaugagcugcgacuucaacgggggcaagaucuccgugcaguacaaccucagccacaccuacgcgguggacgccgccaaccacugcgggaccaucgccaacggcguccugcagacguucaugcgcauggcguggggcggguccuacaucgcccuggacagcggcugcggguccugggacugcaucaugaccagcuaccaguaccucaucauccagaacaccaccugggaggaccacugccaguucucccggcccagccccaucggcuaccuggggcugcucagccagcgcacgcgggacaucuacaucucccgccggcgccggggcaccuucaccuggacccucagcgacuccgagggcaaggagacgcccgggggcuacugccugacccgcuggaugcugaucgaggccgagcucaagugcuucgggaacaccgccguggccaagugcaacgagaagcacgacgaggaguucugcgacaugcugcggcuguucgacuucaacaagcaggcgauccgccggcucaagacccccgcccagaugaacauccagcugaucaacaaggccgugaacgcccugaucaacgaccagcucaucaugaagaaccaccuccgcgacaucaugugcauccccuacugcaacuacagcaaguacugguaccugaaccacacggucaccgggaagaccucccugccccggugcuggcuggugagcaacggcuccuaccugaacgagacccacuucagcgacgacaucgagcagcaggccgacaacaugaucacggagcuccugcagaaggaguacaucgaccgccagggcaagaccccgcuggggcucguggaccuguucgucuucuccaccagcuucuaccugaucuccaucuuccugcaccucgugaagaucccgacccaccggcacgugaucggcaagcccugccccaagccccaccgccugaaccagauggggaucugcagcugcggccuguacaagcagccggggguccccgugaaguggaagcgguga

SEQ ID NO: 4093 - RNA, 1473 nt, Artificial Sequence
  derived and/or modified protein sequence (opt1) from LASV(ISTH1048-NIG-2011;Clade II)__AIT17442__GPCstabilized
augggccagaucaucaccuucuuccaggaggugccccacgucaucgaggaggugaugaacaucgugcugaucgcccucagccugcuggccauccucaaggggaucuacaacgucgcgaccugcggccuguucgggcugguguccuuccuccugcugugcggccgcagcugcuccacgaccuacaaggggguguacgagcuccagacccuggagcuggacauggccagccucaacaugaccaugccgcuguccugcacgaagaacaacagccaccacuacaucauggucggcaacgagaccggccuggagcucacccugaccaacacguccaucaucaaccacaaguucugcaaccugagcgacgcccaccggaagaaccucuacgaccacgcccugauguccaucaucagcaccuuccaccuguccauccccaacuucaaccaguacgaggccaugagcugcgacuucaacgggggcaagaucuccgugcaguacaaccucagccacgcguacgccguggacgccgccaaccacugcgggaccaucgcgaacggcguccugcagaccuucaugcgcauggccuggggcggguccuacaucgcccuggacagcggcugcggguccugggacugcaucaugacgagcuaccaguaccucaucauccagaacaccuccugggaggaccacugccaguucagccggcccagccccaucggcuaccuggggcugcucucccagcgcacccgggacaucuacaucagccgccggcgccggggcaccuucacguggacccucuccgacagcgagggcaacgagacccccgggggcuacugccugacccgcuggaugcugaucgaggccgagcucaagugcuucgggaacacggccguggcgaagugcaacgagaagcacgacgaggaguucugcgacaugcugcggcuguucgacuucaacaagcaggccauccgccggcucaagacccccgcccagauguccauccagcugaucaacaaggccgugaacgcccugaucaacgaccagcucaucaugaagaaccaccuccgcgacaucaugugcauccccuacugcaacuacagcaaguacugguaccugaaccacaccgucaccgggaagacgucccugccccggugcuggcuggugagcaacggcuccuaccugaacgagacccacuucagcgacgacaucgagcagcaggcggacaacaugaucaccgagcuccugcagaaggaguacaucgaccgccagggcaagaccccgcuggggcucguggaccuguucgucuucuccacgagcuucuaccugaucuccaucuuccugcaccucgugaagaucccgacccaccggcacgugaucggcaagcccugccccaagccccaccgcaucaaccacauggggaucugcagcugcggccuguacaagcacccggggguccccgugaaguggaagcgguga

SEQ ID NO: 4094 - RNA, 1473 nt, Artificial Sequence
  derived and/or modified protein sequence (opt1) from LASV(ISTH1058-NIG-2011;Clade II)__AIT17446__GPCstabilized
augggccagaucaucaccuucuuccaggaggugccccacgucaucgaggaggugaugaacaucgugcugaucgcccucagccugcuggccauccucaaggggaucuacaacgucgcgaccugcggccuguucgggcugguguccuuccuccugcugugcggccgcagcugcuccacgaccuacaaggggguguacgagcuccagacccuggagcuggacauggccagccucaacaugaccaugccgcuguccugcacgaagaacaacagccaccacuacaucauggucggcaacgagaccggccuggagcucacccugaccaacacguccaucaucaaccacaaguucugcaaccugagcgacgcccacaagaagaaccucuacgaccacgcccugauguccaucaucagcaccuuccaccuguccauccccaacuucaaccaguacgaggccaugagcugcgacuucaacgggggcaagaucuccgugcaguacaaccucagccacaccuacgcgguggacgccgccucccacugcgggaccgucgccaacggcgugcugcagacguucaugcggauggcguggggcgggagcuacaucgcccuggacuccggcugcgggagcugggacugcaucaugaccuccuaccaguaccucaucauccagaacaccaccugggaggaccacugccaguucagccgccccagccccaucggcuaccuggggcugcucucccagcggacgcgcgacaucuacaucagccggcgccgccggggcaccuucaccuggacccucuccgacagcgagggcaacgagacgcccgggggcuacugccugacccgguggaugcugaucgaggccgagcucaagugcuucgggaacaccgccguggccaagugcaacgagaagcacgacgaggaguucugcgacaugcugcgccuguucgacuucaacaagcaggcgauccggcgccucaagacccccgcccagauguccauccagcugaucaacaaggccgucaacgcccugaucaacgaccagcucaucaugaagaaccaccuccgggacaucaugugcauccccuacugcaacuacagcaaguacugguaccugaaccacacggugaccgggaagaccucccugccccgcugcuggcuggugagcaacggcuccuaccugaacgagacccacuucagcgacgacaucgagcagcaggccgacaacaugaucacggagcuccugcagaaggaguacauggaccggcagggcaagaccccgcuggggcucgucgaccuguucguguucuccaccagcuucuaccugaucuccaucuuccugcaccucgugaagaucccgacccaccgccacgucaucggcaagcccugccccaagccccaccggcugaaccacauggggaucugcagcugcggccuguacaagcacccgggggugcccgugaaguggaagcgcuga

SEQ ID NO: 4095 - RNA, 1473 nt, Artificial Sequence
  derived and/or modified protein sequence (opt1) from LASV(ISTH1064-NIG-2011;Clade II)__AIT17450__GPCstabilized
augggccagaucaucaccuucuuccaggaggugccccacgucaucgaggaggugaugaacaucgugcugaucgcccucagccugcuggccauccucaaggggaucuacaacgucgcgaccugcggccuguucgggcugguguccuuccuccugcugugcggccgcagcugcuccacgaccuacaaggggguguacgagcuccagacccuggagcuggacauggccagccucaacaugaccaugccgcuguccugcacgaagaacaacagccaccacuacaucauggucggcaacgagaccggccuggagcucacccugaccaacacguccaucaucaaccacaaguucugcaaccugagcgacgcccacaagaagaaccucuacgaccacgcccugauguccaucaucagcaccuuccaccuguccauccccaacuucaaccaguacgaggccaugagcugcgacuucaacgggggcaagaucuccgugcaguacaaccucagccacaccuacgcgguggacgccgccaaccacugcgggaccaucgccaacggcguccugcagacguucaugcggauggcguggggcggguccuacaucgcccuggacagcggcugcggguccugggacugcaucaugaccagcuaccaguaccucaucauccagaacaccaccugggaggaccacugccaguucucccgccccagccccaucggcuaccuggggcugcucagccagcggacgcgcgacaucuacaucucccggcgccgccggggcaccuucaccuggacccucagcgacuccgagggcaacgagacgcccgggggcuacugccugacccgguggaugcugaucgaggccgagcucaagugcuucgggaacaccgccguggccaagugcaacgagaagcacgacgaggaguucugcgacaugcugcgccuguucgacuucaacaagcaggcgauccggcgccucaagacccccgcccagaugagcauccagcugaucaacaaggccgugaacgcccugaucaacgaccagcucaucaugaagaaccaccuccgggacaucaugugcauccccuacugcaacuacuccaaguacugguaccugaaccacacggucaccgggaagaccagccugccccgcugcuggcugguguccaacggcagcuaccugaacgagacccacuucuccgacgacaucgagcagcaggccgacaacaugaucacggagcuccugcagaaggaguacaucgaccggcagggcaagaccccgcuggggcucguggaccuguucgucuucagcaccuccuucuaccugaucagcaucuuccugcaccucgugaagaucccgacccaccgccacaucaucggcaagcccugccccaagccccaccggcugaaccacauggggaucugcuccugcggccuguacaagcacccgggggugcccgucaaguggaagcgcuga

SEQ ID NO: 4096 - RNA, 1473 nt, Artificial Sequence
  derived and/or modified protein sequence (opt1) from LASV(ISTH1069-NIG-2011;Clade II)__AIT17454__GPCstabilized
augggccagaucaucaccuucuuccaggaggugccccacgucaucgaggaggugaugaacaucgugcugaucgccuucagccuccuggccauccugaaggggaucuacaacgucgcgaccugcggccucuucgggcugguguccuuccugcuccugugcggccgcagcugcuccaccaccuacaaggggguguacgagcugcagacccucgagcuggacauggccagccugaacaugaccaugccgcucuccugcacgaagaacaacagccaccacuacaucauggucggcaacgagaccggccuggagcugacccucaccaacacguccaucaucaaccacaaguucugcaaccugagcgacgcccacaagcggaaccuguacgaccacgcccucauguccaucaucagcaccuuccaccuguccauccccaacuucaaccaguacgaggccaugagcugcgacuucaacgggggcaagaucuccgugcaguacaaccugagccacaccuacgcgguggacgccgccgggcacugcggcaccaucgccaacgggguccuccagacguucaugcgcauggcguggggcggcuccuacaucgcccuggacagcgggugcggcuccugggacugcaucaugaccagcuaccaguaccugaucauccagaacaccaccugggaggaccacugccaguucucccggcccagccccaucggguaccucggccugcugagccagcgcacgcgggacaucuacaucucccgccggcgccggggcaccuucaccuggacccugagcgacuccgaggggaacgagacgccgggcggguacugccucacccgcuggaugcugaucgaggccgagcugaagugcuucggcaacaccgccguggccaagugcaacgagaagcacgacgaggaguucugcgacaugcuccggcuguucgacuucaacaagcaggcgauccgccggcugaagacccccgcccagaugagcauccagcucaucaacaaggccgugaacgcccugaucaacgaccagcugaucaugaagaaccaccuccgcgacaucaugugcauccccuacugcaacuacuccaaguacugguaccugaaccacacgaucaccggcaagaccagccugccccggugcuggcucgucuccaacggcagcuaccugaacgagacccacuucuccgacgacaucgagcagcaggccgacaacaugaucacggagcugcuccagaaggaguacauggaccgccaggggaagacgccccugggccugguggaccucuucguguucagcaccuccuucuaccugaucagcaucuuccugcaccuggucaagaucccgacccaccggcacaucaucgggaagcccugccccaagccccaccgccucaaccacaugggcaucugcuccugcgggcuguacaagcacccgggcgugcccgugcgguggaagcgcuga

SEQ ID NO: 4097 - RNA, 1473 nt, Artificial Sequence
  derived and/or modified protein sequence (opt1) from LASV(ISTH1096-NIG-2012;Clade II)__AIT17458__GPCstabilized
augggccagaucaucaccuucuuccaggaggugccccacgucaucgaggaggugaugaacaucgugcugaucgcccucagccugcuggccauccucaaggggaucuacaacgucgcgaccugcggccuguucgggcugguguccuuccuccugcugugcggccgcagcugcuccacgaccuacaaggggguguacgagcuccagacccuggagcuggacauggccagccucaacaugaccaugccgcuguccugcacgaagaacaacagccaccacuacaucauggucggcaacgagaccggccuggagcucacccugaccaacacguccaucaucaaccacaaguucugcaaccugagcgacgcccacaagaagaaccucuacgaccacgcccugauguccaucaucagcaccuuccaccuguccauccccaacuucaaccaguacgaggccaugagcugcgacuucaacgggggcaagaucuccgugcaguacaaccucagccacaccuacgcgaucgacgccgccaaccacugcgggaccaucgccaacggcgugcugcagacguucaugcggauggcguggggcggguccuacaucgcccuggacagcggcugcggguccugggacugcaucaugaccaccuaccaguaccucaucauccagaacaccacgugggaggaccacugccaguucagccgccccucccccaucggcuaccuggggcugcucagccagcggacccgcgacaucuacaucagccggcgccgccggggcaccuucaccuggacgcucuccgacagcgagggcaacgagacccccgggggcuacugccugacccgguggaugcugaucgaggccgagcucaagugcuucgggaacaccgccgucgccaagugcaacgagaagcacgacgaggaguucugcgacaugcugcgccuguucgacuucaacaagcaggcgauccggcgccucaagacgcccgcccagauguccauccagcugaucaacaaggccgugaacgcccugaucaacgaccagcucaucaugaagaaccaccuccgggacaucaugugcauccccuacugcaacuacagcaaguacugguaccugaaccacaccgugaccgggaagaccucccugccccgcugcuggcuggucagcaacggcuccuaccugaacgagacgcacuucagcgacgacaucgagcagcaggccgacaacaugaucaccgagcuccugcagaaggaguacauggaccggcagggcaagaccccgcuggggcucguggaccuguucguguucuccaccagcuucuaccugaucuccaucuuccugcaccucgucaagaucccgacgcaccgccacgugaucggcaagcccugccccaagccccaccggcugaaccacauggggaucugcagcugcggccuguacaagcacccgggggugcccgucaaguggaagcgcuga

SEQ ID NO: 4098 - RNA, 1473 nt, Artificial Sequence
  derived and/or modified protein sequence (opt1) from LASV(ISTH1107-NIG-2012;Clade II)__AIT17462__GPCstabilized
augggccagaucaucaccuucuuccaggaggugccccacgucaucgaggaggugaugaacaucgugcugaucgcccucagccugcuggccauccucaaggggaucuacaacgucgcgaccugcggccuguucgggcugguguccuuccuccugcugugcggccgcagcugcuccacgaccuacaaggggguguacgagcuccagacccuggagcuggacauggccagccucaacaugaccaugccgcuguccugcacgaagaacaacagccaccacuacaucauggucggcaacgagaccggccuggagcucacccugaccaacacguccaucaucaaccacaaguucugcaaccugagcgacgcccacaagaagaaccucuacgaccacgcccugauguccaucaucagcaccuuccaccuguccauccccaacuucaaccaguacgaggccaugagcugcgacuucaacgggggcaagaucuccgugcaguacaaccucagccacgcguacgccguggacgccgccaaccacugcgggaccaucgcgaacggcguccugcagaccuucaugcggauggccuggggcggguccuacaucgcccuggacagcggcugcggguccugggacugcaucaugacgagcuaccaguaccucaucauccagaacaccaccugggaggaccacugccaguucucccgccccagccccaucggcuaccuggggcugcucagccagcggacccgcgacaucuacaucucccggcgccgccggggcacguucaccuggacccucagcgacuccgagggcaacgagacccccgggggcuacugccugacgcgguggaugcugaucgaggccgagcucaagugcuucgggaacaccgccguggcgaagugcaacgagaagcacgacgaggaguucugcgacaugcugcgccuguucgacuucaacaagcaggccauccggcgccucaagacccccgcccagaugagcauccagcugaucaacaaggccgugaacgcccugaucaacgaccagcucaucaugaagaaccaccuccgggacaucaugugcaucccguacugcaacuacuccaaguacugguaccugaaccacaccgucacggggaagaccagccugcccaagugcuggcugguguccaacggcagcuaccugaacgagacccacuucuccgacgacaucgagcagcaggcggacaacaugaucaccgagcuccugcagaaggaguacaucgaccgccagggcaagacgccccuggggcucguggaccuguucgucuucagcaccuccuucuaccugaucagcaucuuccugcaccucgugaagaucccgacccaccggcacgugaucggcaagcccugccccaagccccaccgccugaaccacauggggaucugcuccugcggccuguacaagcacccggggguccccgugaaguggaagcgguga

SEQ ID NO: 4099 - RNA, 1473 nt, Artificial Sequence
  derived and/or modified protein sequence (opt1) from LASV(ISTH1111-NIG-2011;Clade II)__AIT17466__GPCstabilized
augggccagaucaucaccuucuuccaggaggugccccaggucaucgaggaggugaugaacaucgugcugaucgcccucagccugcuggccauccucaaggggaucuacaacgucgcgaccugcggccuguucgggcugguguccuuccuccugcugugcggccgcagcugcuccacgaccuacaaggggguguacgagcuccagacccuggagcuggacauggccagccucaacaugaccaugccgcuguccugcacgaagaacaacagccaccacuacaucauggucggcaacgagaccggccuggagcucacccugaccaaccaguccaucaucaaccacaaguucugcaaccugagcgacgcccacaagaagaaccucuacgaccacgcccugauguccaucaucagcacguuccaccuguccauccccaacuucaaccaguacgaggccaugagcugcgacuucaacgggggcaagaucuccgugcaguacaaccucagccacaccuucgcgguggacgccgccaaccacugcgggaccaucgccaacggcguccugcagaccuucaugcggauggcguggggcggguccuacaucgcccuggacagcggcugcggguccugggacugcaucaugacgagcuaccaguaccucaucauccagaacaccaccugggaggaccacugccaguucucccggcccagccccaucggcuaccuggggcugcucagccagcgcacccgggacaucuacaucucccgccggcgccggggcacguucaccuggacccucagcgacuccgagggcaacgagacccccgggggcuacugccugacgcgcuggaugcugaucgaggccgagcucaagugcuucgggaacaccgccguggccaagugcaacgagaagcacgacgaggaguucugcgacaugcugcggcuguucgacuucaacaagcaggcgauccgccggcucaagacccccgcccagaugagcauccagcugaucaacaaggccgugaacgcccugaucaacgaccagcucaucaugaagaaccaccuccgcgacaucaugugcaucccguacugcaacuacuccaaguacugguaccugaaccacaccaucacggggaagaccagccugccccggugcuggcuggucuccaacggcagcuaccugaacgagacccacuucuccgacgacaucgagcagcaggccgacaacaugaucaccgagcuccugcagaaggaguacauggaccgccagggcaagacgccccuggggcucguggaccuguucguguucagcaccuccuucuaccugaucagcaucuuccugcaccucgucaagaucccgacccaccggcacgugaucggcaagcccugccccaagccccaccgccugaaccacauggggaucugcuccugcggccuguacaagcacccgggggugcccgucaaguggaagcgguga

SEQ ID NO: 4100 - RNA, 1473 nt, Artificial Sequence
  derived and/or modified protein sequence (opt1) from LASV(ISTH1121-NIG-2012;Clade II)__AIT17470__GPCstabilized
augggccagaucaucaccuucuuccaggaggugccccacgucaucgaggaggugaugaacaucgugcugaucgcccucagccugcuggccauccucaaggggaucuacaacgucgcgaccugcggccuguucgggcugguguccuuccuccugcugugcggccgcagcugcuccacgaccuacaaggggguguacgagcuccagacccuggagcuggacauggccagccucaacaugaccaugccgcuguccugcacgaagaacaacagccaccacuacaucauggucggcaacgagaccggccuggagcucacccugaccaacacguccaucaucaaccacaaguucugcaaccugagcgacgcccaccggaagaaccucuacgaccacgcccugauguccaucaucagcaccuuccaccuguccauccccaacuucaaccaguacgaggccaugagcugcgacuucaacgggggcaagaucuccgugcaguacaaccucagccacaccuacgcgguggacgccgccaaccacugcgggaccaucgccaacggcguccugcagacguucaugcgcauggcguggggcggguccuacaucgcccuggacagcggcugcggguccugggacugcaucaugaccagcuaccaguaccucaucauccagaacaccaccugggaggaccacugccaguucucccggcccagccccaucggcuaccuggggcugcucagccagcgcacgcgggacaucuacaucucccgccggcgccggggcaccuucaccuggacccucagcgacuccgagggcaacgagacgcccgggggcuacugccugacccgcuggaugcugaucgaggccgagcucaagugcuucgggaacaccgccguggccaagugcaacgagaagcacgacgaggaguucugcgacaugcugcggcuguucgacuucaacaagcaggcgauccgccggcucaagacccccgcccagaugagcauccagcugaucaacaaggccgugaacgcccugaucaacgaccagcucaucaugaagaaccaccuccgcgacaucaugugcauccccuacugcaacuacuccaaguacugguaccugaaccacacggucaccgggaagaccagccugccccggugcuggcugguguccaacggcagcuaccugaacgagacccacuucuccgacgacaucgagcagcaggccgacaacaugaucacggagcuccugcagaaggaguacaucgaccgccagggcaagaccccgcuggggcucguggaccuguucgucuucagcaccuccuucuaccugaucagcaucuuccugcaccucgugaagaucccgacccaccggcacgugaucggcaagcccugccccaagccccaccgccugaaccacauggggaucugcuccugcggccuguacaagcacccggggguccccgugaaguggaagcgguga

SEQ ID NO: 4101 - RNA, 1473 nt, Artificial Sequence
  derived and/or modified protein sequence (opt1) from LASV(ISTH1129-NIG-2012;Clade II)__AIT17474__GPCstabilized
augggccagaucaucaccuucuuccaggaggugccccacgucaucgaggaggugaugaacaucgugcugaucgcccucagccugcuggccauccucaaggggaucuacaacgucgcgaccugcggccuguucgggcugguguccuuccuccugcugugcggccgcagcugcuccacgaccuacaaggggguguacgagcuccagacccuggagcuggacauggccagccucaacaugaccaugccgcuguccugcacgaagaacaacagccaccacuacaucauggucggcaacgagaccggccuggagcucacccugaccaacacguccaucaucaaccacaaguucugcaaccugagcgacgcccacaagaagaaccucuacgaccacgcccugauguccaucaucagcaccuuccaccuguccauccccaacuucaaccaguacgaggccaugagcugcgacuucaacgggggcaagaucuccauccaguacaaccucagccacaccuacgcgguggacgccgccaaccacugcgggaccaucgccaacggcgugcugcagacguucaugcggauggcguggggcggguccuacaucgcccuggacagcggcugcggguccugggacugcaucaugaccagcuaccaguaccucaucauccagaacaccaccugggaggaccacugccaguucucccgccccagccccaucggcuaccuggggcugcucagccagcggacgcgcgacaucuacaucucccggcgccgccggggcaccuucaccuggacccucagcgacuccgagggcaacgagacgcccgggggcuacugccugacccgguggaugcugaucgaggccgagcucaagugcuucgggaacaccgccgucgccaagugcaacgagaagcacgacgaggaguucugcgacaugcugcgccuguucgacuucaacaagcaggcgauccggcgccucaagacccccgcccagaugagcauccagcugaucaacaaggccgugaacgcccugaucaacgaccagcucaucaugaagaaccaccuccgggacaucaugugcauccccuacugcaacuacuccaaguacugguaccugaaccacacgaucaccgggaagaccagccugccccgcugcuggcugguguccaacggcagcuaccugaacgagacccacuucuccgacgacaucgagcagcaggccgacaacaugaucacggagcuccugcagaaggaguacaucgaccggcagggcaagaccccgcuggggcucgucgaccuguucguguucagcaccuccuucuaccugaucagcaucuuccugcaccucgugaagaucccgacccaccgccacaucacgggcaagcccugccccaagccccaccggcugaaccacauggggaucugcuccugcggccuguacaagcacccggggguccccgugcgcuggaagcgguga

SEQ ID NO: 4102 - RNA, 1473 nt, Artificial Sequence
  derived and/or modified protein sequence (opt1) from LASV(ISTH1137-NIG-2011;Clade II)__AIT17478__GPCstabilized
augggccagaucaucaccuucuuccaggaggugccccacgucaucgaggaggugaugaacaucgugcugaucgcccucagccugcuggccauccucaaggggaucuacaacgucgcgaccugcggccuguucgggcugguguccuuccuccugcugugcggccgcagcugcuccacgaccuacaaggggguguacgagcuccagacccuggagcuggacauggccagccucaacaugaccaugccgcuguccugcacgaagaacaacagccaccacuacaucauggucggcaacgagaccggccuggagcucacccugaccaacacguccaucaucaaccacaaguucugcaaccugagcgacgcccacaagaagaaccucuacgaccacgcccugauguccaucaucagcaccuuccaccuguccauccccaacuucaaccaguacgaggccaugagcugcgacuucaacgggggcaagaucuccgugcaguacaaccucagccacaccuacgcgguggacgccgccgaccacugcgggaccaucgccaacggcguccugcagacguucaugcggauggcguggggcggguccuacaucgcccuggacagcggcugcggguccugggacugcaucaugaccagcuaccaguaccucaucauccagaacaccaccugggaggaccacugccaguucucccgccccagccccaucggcuaccuggggcugcucagccagcggacgcgcgacaucuacaucucccggcgccgccggggcaccuucaccuggacccucagcgacuccgagggcaacgagacgcccgggggcuacugccugacccgguggaugcugaucgaggccgagcucaagugcuucgggaacaccgccguggccaagugcaacgagaagcacgacgaggaguucugcgacaugcugcgccuguucgacuucaacaagcaggcgaucagccggcucaagacccccgcccagauguccauccagcugaucaacaaggccgugaacgcccugaucaacgaccagcucaucaugaagaaccaccuccgcgacaucaugugcauccccuacugcaacuacagcaaguacugguaccugaaccacacggucaccgggaagaccucccugccccggugcuggcuggugagcaacggcuccuaccugaacgagacccacuucagcgacgacaucgagcagcaggccgacaacaugaucacggagaugcuccagaaggaguacaucgaccgccagggcaagaccccgcuggggcugguggaccucuucgucuucuccaccagcuucuaccugaucuccaucuuccugcaccuggugaagaucccgacccaccggcacgugaucggcaagcccugccccaagccccaccgccucaaccacauggggaucugcagcugcggccuguacaagcacccggggguccccgugaaguggaagcgguga

SEQ ID NO: 4103 - RNA, 1473 nt, Artificial Sequence
  derived and/or modified protein sequence (opt1) from LASV(ISTH2010-NIG-2012;Clade II)__AIT17482__GPCstabilized
augggccagaucaucaccuucuuccaggaggugccccacgucaucgaggaggugaugaacaucgugcugaucgcccucagccugcuggccauccucaaggggaucuacaacgucgcgaccugcggccuguucgggcugguguccuuccuccugcugugcggccgcagcugcuccacgaccuacaaggggguguacgagcuccagacccuggagcuggacauggccagccucaacaugaccaugccgcuguccugcacgaagaacaacagccaccacuacaucauggucggcaacgagaccggccuggagcucacccugaccaacacguccaucaucaaccacaaguucugcaaccugagcgacgcccacaagaagaaccucuacgaccacgcccugauguccaucaucagcaccuuccaccuguccauccccaacuucaaccaguacgaggccaugagcugcgacuucaacgggggcaagaucuccgugcaguacaaccucagccacgcguacgccguggacgccgccaaccacugcgggaccaucgcgaacggcguccugcagaccuucaugcggauggccuggggcggguccuacaucgcccuggacagcggcugcggguccugggacugcaucaugacgagcuaccaguaccucaucauccagaacaucaccugggaggaccacugccaguucucccgccccagccccaucggcuaccuggggcugcucagccagcggacccgcgacaucuacaucucccggcgccgccggggcaccuucacguggacccucagcgacuccgagggcaacgagacccccgggggcuacugccugacccgguggaugcugaucgaggccgagcucaagugcuucgggaacacggccguggcgaagugcaacgagaagcacgacgaggaguucugcgacaugcugcgccuguucgacuucaacaagcaggccauccggcgccucaagacccccgcccagaugagcauccagcugaucaacaaggccgugaacgcccugaucaacgaccagcucaucaugaagaaccaccuccgggacaucaugugcauccccuacugcaacuacuccaaguacugguaccugaaccacaccgucaccgggaagacgagccugccccgcugcuggcugguguccaacggcagcuaccugaacgagacccacuucuccgacgacaucgagcagcaggcggacaacaugaucaccgagcuccugcagaaggaguacaucgaccggcagggcaagaccccgcuggggcucguggaccuguucgucuucagcacguccuucuaccugaucagcaucuuccugcaccucgugaagaucccgacccaccgccacguggucggcaagcccugccccaagccccaccggcugaaccacauggggaucugcuccugcggccuguacaagcacccgggggugcccgugaaguggaagcgcuga

SEQ ID NO: 4104 - RNA, 1473 nt, Artificial Sequence
  derived and/or modified protein sequence (opt1) from LASV(ISTH2016-NIG-2012;Clade II)__AIT17486__GPCstabilized
augggccagaucaucaccuucuuccaggaggugccccacgucaucgaggaggugaugaacaucgugcugaucgcccucagccugcuggccauccucaaggggaucuacaacgucgcgaccugcggccuguucgggcugguguccuuccuccugcugugcggccgcagcugcuccacgaccuacaaggggguguacgagcuccagacccuggagcuggacauggccagccucaacaugaccaugccgcuguccugcacgaagaacaacagccaccacuacaucauggucggcaacgagaccggccuggagcucacccugaccaacacguccaucaucaaccacaaguucugcaaccugagcgacgcccacaagaagaaccucuacgaccacgcccugauguccaucaucagcaccuuccaccuguccauccccaacuucaaccaguacgaggccaugagcugcgacuucaacgggggcaagaucuccgugcaguacaaccucagccacaccuacgcgguggacgccgccaaccacugcgggaccaucgccaacggcguccugcagacguucaugcggauggcguggggcggguccuacaucgcccuggacagcggcugcggguccugggacugcaucaugaccagcuaccaguaccucaucauccagaacaccaccugggaggaccacugccaguucucccgccccagccccgugggcuaccuggggcugcucagccagcggacgcgcgacaucuacaucucccggcgccgccggggcaccuucaccuggacccucagcgacuccgagggcaacgagacgcccgggggcuacugccugacccgguggaugcugaucgaggccgagcucaagugcuucgggaacaccgccguggccaagugcaacgagaagcacgacgaggaguucugcgacaugcugcgccuguucgacuucaacaagcaggcgauccggcgccucaagacccccgcccagaugagcauccagcugaucaacaaggccgucaacgcccugaucaacgaccagcucaucaugaagaaccaccuccgggacaucaugugcauccccuacugcaacuacuccaaguacugguaccugaaccacacggugaccgggaagaccagccugccccgcugcuggcugguguccaacggcagcuaccugaacgagacccacuucuccgacgacaucgagcagcaggccgacaacaugaucacggagcuccugcagaaggaguacaucgaccggcagggcaagaccccgcuggggcucgucgaccuguucguguucagcaccuccuucuaccugaucagcaucuuccugcaccucgugaagaucccgacccaccgccacgucaucggcaagcccugccccaagccccaccggcugaaccacauggggaucugcuccugcggccuguacaagcacccgggggugcccgugaaguggaagcgcuga

SEQ ID NO: 4105 - RNA, 1473 nt, Artificial Sequence
  derived and/or modified protein sequence (opt1) from LASV(ISTH2020-NIG-2012;Clade II)__AIT17490__GPCstabilized
augggccagaucaucaccuucuuccaggaggugccccacgucaucgaggaggugaugaacaucgugcugaucacccucagccugcuggccauccucaaggggaucuacaacgucgccacgugcggccuguucgggcugguguccuuccuccugcugugcggccgcagcugcuccaccaccuacaaggggguguacgagcuccagacccuggagcuggacauggcgaaccucaacaugacgaugccgcugagcugcaccaagaacaacucccaccacuacaucauggucggcaacgagaccggccuggagcucacccugacgaacaccagcaucaucaaccacaaguucugcaaccuguccgacgcccacaagaagaaccucuacgaccacgcccugaugagcaucaucuccaccuuccaccugagcauccccaacuucaaccaguacgaggccauguccugcgacuucaacgggggcaagaucagcgugcaguacaaccucucccacaccuucgccguggacgcggccaaccacugcgggacgaucgccaacggcguccugcagaccuucaugcggauggccuggggcgggagcuacaucgcgcuggacuccggcugcgggagcugggacugcaucaugaccuccuaccaguaccucaucauccagaacaccacgugggaggaccacugccaguucagccgccccucccccaucggcuaccuggggcugcucagccagcggacccgcgacaucuacaucagccggcgccgccggggcaccuucaccuggacgcucuccgacagcgagggcaacgagacccccgggggcuacugccugacccgguggaugcugaucgaggccgagcucaagugcuucgggaacaccgccguggccaagugcaacgagaagcacgacgaggaguucugcgacaugcugcgccuguucgacuucaacaagcaggccauccggcgccucaagacgcccgcgcagauguccauccagcugaucaacaaggccgugaacgcccugaucaacgaccagcucaucaugaagaaccaccuccgggacaucaugugcauccccuacugcaacuacagcaaguacugguaccugaaccacaccgucaccgggaagaccucccugccccgcugcuggcuggugagcaacggcuccuaccugaacgagacgcacuucagcgacgacaucgagcagcaggccgacaacaugaucaccgagcuccugcagaaggaguacauggaccggcagggcaagaccccgcuggggcucguggaccuguucgucuucuccaccagcuucuaccugaucuccaucuuccugcaccucgugaagaucccgacgcaccgccacaucaucggcaagcccugccccaagccccaccggcugaaccacauggggaucugcagcugcggccuguacaagcacccgggggugcccgucaaguggaagcgcuga

SEQ ID NO: 4106 - RNA, 1473 nt, Artificial Sequence
  derived and/or modified protein sequence (opt1) from LASV(ISTH2025-NIG-2012;Clade II)__AIT17494__GPCstabilized
augggccagaucaucaccuucuuccaggaggugccccacgucaucgaggaggugaugaacaucgugcugaucgcccucagccugcuggccauccucaagggggucuacaacguggcgaccugcggccuguucgggcugguguccuuccuccugcugugcggccgcagcugcuccacgaucuacaagggggucuacgagcuccagacccuggagcuggacauggccagccucaacaugaccaugccgcuguccugcaccaagaacaacagccaccacuacaucauggugggcaacgagacgggccuggagcucacccugaccaacaccuccaucaucaaccacaaguucugcaaccugagcgacgcccacaagaagaaccucuacgaccacgcccugauguccaucaucagcacguuccaccuguccauccccaacuucaaccaguacgaggccaugagcugcgacuucaacgggggcaagaucuccgugcaguacaaccucagccacaccuacgcggucgacgccgccaaccacugcgggaccaucgccaacggcgugcugcagaccuucaugcggauggcguggggcggguccuacaucgcccuggacagcggcugcggguccugggacugcaucaugacgagcuaccaguaccucaucauccagaacaccuccugggaggaccacugccaguucagccgccccagccccaucggcuaccuggggcugcucucccagcggacccgcgacaucuacaucagccggcgccgccggggcaccuucacguggacccucuccgacagcgagggcaacgagacccccgggggcuacugccugacccgguggaugcugaucgaggccgagcucaagugcuucgggaacacggccguggccaagugcaacgagaagcacgacgaggaguucugcgacaugcugcgccuguucgacuucaacaagcaggcgauccggcgccucaagacccccgcccagauguccauccagcugaucaacaaggccgucaacgcccugaucaacgaccagcucaucaugaagaaccaccuccgggacaucaugugcauccccuacugcaacuacagcaaguacugguaccugaaccacaccgugaccgggaagacgucccugccccgcugcuggcuggugagcaacggcuccuaccugaacgagacccacuucagcgacgacaucgagcagcaggccgacaacaugaucaccgagcuccugcagaaggaguacaucgaccggcagggcaagaccccgcuggggcucgucgaccuguucguguucuccacgagcuucuaccugaucuccaucuuccugcaccucgugaagaucccgacccaccgccacgucaucggcaagcccugccccaagccccaccggcugaaccacauggggaucugcagcugcggccuguacaagcacccgggggugcccgugaaguggaagcgcuga

SEQ ID NO: 4107 - RNA, 1473 nt, Artificial Sequence
  derived and/or modified protein sequence (opt1) from LASV(ISTH2031-NIG-2012;Clade II)__AIT17498__GPCstabilized
augggccagaucaucaccuucuuccaggaggugccccacgucaucgaggaggugaugaacaucgugcugaucgcccucagccugcuggccauccucaaggggaucuacaacgucgcgaccugcggccuguucgggcugguguccuuccuccugcugugcggccgcagcugcuccacgaccuacaaggggguguacgagcuccagacccuggagcuggacauggccagccucaacaugaccaugccgcuguccugcacgaagaacaacagccaccacuacaucauggucggcaacgagaccggccuggagcucacccugaccaacacguccaucaucaaccacaaguucugcaaccugagcgacgcccacaagaagaaccucuacgaccacgcccugauguccaucaucagcaccuuccaccuguccauccccaacuucaaccaguacgaggccaugagcugcgacuucaacgggggcaagaucuccgugcaguacaaccucagccacaccuacgcgguggacgccgccaaccacugcgggaccaucgccaacggcguccugcagacguucaugcggauggcguggggcggguccuacaucgcccuggacagcggcugcgggaacugggacugcaucaugaccuccuaccaguaccucaucauccagaacaccaccugggaggaccacugccaguucagccgccccucccccaucggcuaccuggggcugcucagccagcggacgcgcgacaucuacaucagccggcgccgccggggcaccuucaccuggacccucuccgacagcgagggcaacgagacgcccgggggcuacugccugacccgguggaugcugaucgagaccgagcucaagugcuucgggaacaccgccguggccaagugcaacgagaagcacgacgaggaguucugcgacaugcugcgccuguucgacuucaacaagcaggccaucucccggcuccgcagccccgcgcagauguccauccagcugaucaacaaggccgugaacgcccugaucaacgaccagcucaucaugaagaaccaccuccgggacaucaugugcauccccuacugcaacuacagcaaguacugguaccugaaccacacggucaccgggaagaccucccugcccaagugcuggcuggugagcaacggcuccuaccugaacgagacccacuucagcgacgacaucgagcagcaggccgacaacaugaucacggagaugcuccagaaggaguacaucgaccgccagggcaagaccccgcuggggcugguggaccucuucgucuucuccaccagcuucuaccugaucuccaucuuccugcaccuggugaagaucccgacccaccggcacaucacgggcaagcccugccccaagccccaccgccucaaccacauggggaucugcagcugcggccuguacaagcacccgggggugcccgucaaguggaagcgguga

SEQ ID NO: 4108 - RNA, 1473 nt, Artificial Sequence
  derived and/or modified protein sequence (opt1) from LASV(ISTH2037-NIG-2012;Clade II)__AIT17502__GPCstabilized
augggccagaucaucaccuucuuccaggagaucccccacgugaucgaggaggucaugaacaucgugcugaucacccucagccugcuggccauccucaaggggaucuacaacguggccacgugcggccuguucgggcuggucuccuuccuccugcugugcggcaagagcugcuccaccaccuacaaggggguguacgagcuccagacccuggagcuggacauggcgagccucaacaugacgaugccgcuguccugcaccaagaacaacagccaccacuacaucauggugggcaacgagaccggccuggagcucacccugacgaacaccuccaucaucaaccacaaguucugcaaccugagcgacgcccaccgcaagaaccucuacgaccacacccugauguccaucaucagcaccuuccaccuguccauccccaacuucaaccaguacgaggccaugagcugcgacuucaacgggggcaagaucuccguccaguacaaccucagccacgccuacgccaucgacgcggccacgcacugcgggaccaucgccaacggcgugcugcagaccuucaugcggauggccuggggcggguccuacaucgcgcuggacagcggcugcggcgggugggacugcaucaugaccuccuaccaguaccucaucauccagaacacgaccugggaggaccacugccaguucagccgccccucccccaucggguaccugggccugcucagccagcggacccgcgacaucuacaucagccggcgccgccggggcaccuucacguggacccucuccgacagcgaggggaacgagaccccgggcggguacugccugacccgguggaugcugaucgaggccgagcucaagugcuucggcaacacggccguggccaagugcaacgagaagcacgacgaggaguucugcgacaugcugcgccuguucgacuucaacaagcaggccauccggcgccucaagacccccgcgcagauguccauccagcugaucaacaaggccgucaacgcccugaucaacgaccagcucaucaugcggaaccaccuccgcgacaucaugugcauccccuacugcaacuacagcaaguacugguaccugaaccacaccgugaccggcaagacgucccugcccaagugcuggcuggugagcaacggcuccuaccugaacgagacccacuucagcgacgacaucgagcagcaggccgacaacaugaucaccgagcuccugcagaaggaguacauggaccggcaggggaagacgccccugggccucgucgaccuguucguguucuccaccagcuucuaccugaucuccaucuuccugcaccucgugaagaucccgacccaccgccacgucaucgggaagcccugccccaagccccaccggcugaaccacaugggcgugugcagcugcgggcuguacaagcacccgggcgugcccgucaaguggaagcgcuga

SEQ ID NO: 4109 - RNA, 1473 nt, Artificial Sequence
  derived and/or modified protein sequence (opt1) from LASV(ISTH2042-NIG-2012;Clade II)__AIT17506__GPCstabilized
augggccagaucaucaccuucuuccaggaggugccccacgucaucgaggaggugaugaacaucgugcugaucgcccucagccugcuggccauccucaaggggaucuacaacgucgcgaccugcggccuguucgggcugguguccuuccuccugcugugcggccgcagcugcuccacgaccuacaaggggguguacgagcuccagacccuggagcuggacauggccagccucaacaugaccaugccgcuguccugcacgaagaacaacagccaccacuacaucauggucggcaacgagaccggccuggagcucacccugaccaacacguccaucaucaaccacaaguucugcaaccugagcgacgcccacaagaagaaccucuacgaccacgcccugauguccaucaucagcaccuuccaccuguccauccccaacuucaaccaguacgaggccaugagcugcgacuucaacgggggcaagaucuccgugcaguacaaccucagccacgcguacgccguggacgccgccgagcacugcgggaccaucgcgaacggcguccugcagaccuucaugcggauggccuggggcggguccuacaucgcccuggacagcggcugcggguccugggacugcgugaugacgagcuaccaguaccucaucauccagaacaccaccugggaggaccacugccaguucucccgccccagccccaucggcuaccuggggcugcucagccagcggacccgcgacaucuacaucucccggcgccgccggggcacguucaccuggacccucagcgacuccgagggcaacgagacccccgggggcuacugccugacgcgguggaugcugaucgaggccgagcucaagugcuucgggaacaccgccguggcgaagugcaacgagaagcacgacgaggaguucugcgacaugcugcgccuguucgacuucaacaagcaggccaucgagcggcucaagacccccgcccagaugagcauccagcugaucaacaaggccgucaacgcccugaucaacgaccagcucaucaugaagaaccaccuccgcgacaucaugugcaucccguacugcaacuacuccaaguacugguaccugaaccacaccgugacggggaagaccagccugccccggugcuggcugguguccaacggcagcuaccugaacgagacccacuucuccgacgacaucgagcagcaggcggacaacaugaucaccgagaugcuccagaaggaguacaucgaccgccagggcaagacgccccuggggcuggucgaccucuucguguucagcaccuccuucuaccugaucagcaucuuccugcaccuggugaagaucccgacccaccggcacgucaucggcaagcccugccccaagccccaccgccucaaccacauggggaucugcuccugcggccuguacaagcacccgggggugcccgugaaguggaagcgguga

SEQ ID NO: 4110 - RNA, 1473 nt, Artificial Sequence
  derived and/or modified protein sequence (opt1) from LASV(ISTH2046-NIG-2012;Clade II)__AIT17510__GPCstabilized
augggccagaucaucaccuucuuccaggaggugccccacgucaucgaggaggugaugaacaucgugcugaucgcccucagccugcuggccauccucaaggggaucuacaacgucgcgaccugcggccuguucgggcugguguccuuccuccugcugugcggccgcagcugcuccacgaccuacaaggggguguacgagcuccagacccuggagcuggacauggccagccucaacaugaccaugccgcuguccugcacgaagaacaacagccaccacuacaucauggucggcaacgagaccggccuggagcucacccugaccaacacguccaucaucaaccacaaguucugcaaccugagcgacgcccacaagaagaaccucuacgaccacgcccugauguccaucaucagcaccuuccaccuguccauccccaacuucaaccaguacgaggccaugagcugcgacuucaacgggggcaagaucuccgugcaguacaaccucagccacaccuacgcgguggacgccgccaaccacugcgggaccaucgccaacggcguccugcagacguucaugcggauggcguggggcggguccuacaucgcccuggacagcggcugcggguccugggacugcaucaugaccagcuaccaguaccucaucauccagaacaccaccugggaggaccacugccaguucucccgccccagccccaucggcuaccuggggcugcucagccagcggacgaaggacaucuacaucucccgccggcgccggggcaccuucaccuggacccucagcgacuccgagggcaacgagacgcccgggggcuacugccugacccgcuggaugcugaucgaggccgagcucaagugcuucgggaacaccgccguggccaagugcaacgagaagcacgacgaggaguucugcgacaugcugcggcuguucgacuucaacaagcaggcgauccgccggcucaagacccccgcccagaugagcauccagcugaucaacaaggccgugaacgcccugaucaacgaccagcucaucaugaagaaccaccuccgcgacaucaugugcauccccuacugcaacuacuccaaguacugguaccugaaccacacggucaccgggaagaccagccugccccggugcuggcugguguccaacggcagcuaccugaacgagacccacuucuccgacgacaucgagcagcaggccgacaacaugaucacggagcuccugcagaaggaguacaucgaccgccagggcaagaccccgcuggggcucguggaccuguucgucuucagcaccuccuucuaccugaucagcaucuuccugcaccucgugaagaucccgacccaccggcacgugaucggcaagcccugccccaagccccaccgccugaaccacauggggaucugcuccugcggccuguacaagcacccggggguccccgugaaguggaagcgguga

SEQ ID NO: 4111 - RNA, 1473 nt, Artificial Sequence
  derived and/or modified protein sequence (opt1) from LASV(ISTH2050-NIG-2012;Clade II)__AIT17514__GPCstabilized
augggccagaucaucaccuucuuccaggaggugccccacgucaucgaggaggugaugaacaucgugcugaucgcccucagccugcuggccguccucaaggggaucuacaacguggcgaccugcggccuguucgggcugguguccuuccuccugcugugcggccgcagcugcuccacgaccuacaagggggucuacgagcuccagacccuggagcuggacauggccagccucaacaugaccaugccgcuguccugcacgaagaacaacagccaccacuacaucauggugggcaacgagaccggccuggagcucacccugaccaacacguccaucaucaaccacaaguucugcaaccugagcgacgcccacaagaagaaccucuacgaccacgcccugauguccaucaucagcaccuuccaccuguccauccccaacuucaaccaguacgaggccaugagcugcgacuucaacgggggcaagaucuccgugcaguacaaccucagccacaccuacgcggucgacgccgccaaccacugcgggaccaucgccaacggcgugcugcagacguucaugcggauggcguggggcggguccuacaucgcccuggacagcggcugcggguccugggacugcaucaugaccagcuaccaguaccucaucauccagaacaccaccugggaggaccacugccaguucucccgccccagccccaucggcuaccuggggcugcucagccagcggacgcgcgacaucuacaucucccggcgccgccggggcaccuucaccuggacccucagcgacuccgagggcaacgagacgcccgggggcuacugccugacccgguggaugcugaucgaggccgagcucaagugcuucgggaacaccgccguggccaagugcaacgagaagcacgacgaggaguucugcgacaugcugcgccuguucgacuucaacaagcaggcgauccggcgccucaagacccccgcccagaugagcauccagcugaucaacaaggccgucaacgcccugaucaacgaccagcucaucaugaagaaccaccuccgggacaucaugugcauccccuacugcaacuacuccaaguacugguaccugaaccacacggugaccgggaagaccagccugccccgcugcuggcugguguccaacggcagcuaccugaacgagacccacuucuccgacgacaucgagcagcaggccgacaacaugaucacggagcuccugcagaaggaguacaucgaccggcagggcaagaccccgcuggggcucgucgaccuguucguguucagcaccuccuucuaccugaucagcaucuuccugcaccucgugaagaucccgacccaccgccacgucaucggcaagcccugccccaagccccaccggcugaaccacauggggaucugcuccugcggccuguaccgccacccgggggugcccgugaaguggaagcgguga

SEQ ID NO: 4112 - RNA, 1473 nt, Artificial Sequence
  derived and/or modified protein sequence (opt1) from LASV(ISTH2057-NIG-2012;Clade II)__AIT17518__GPCstabilized
augggccagaucaucaccuucuuccaggaggugccccacgucaucgaggaggugaugaacaucgugcugaucgcccucagccugcuggccauccucaaggggaucuacaacgucgcgaccugcggccuguucgggcugguguccuuccuccugcugugcggccgcagcugcuccacgaccuacaaggggguguacgagcuccagacccuggagcuggacauggccagccucaacaugaccaugccgcuguccugcacgaagaacaacagccaccacuacaucauggucggcaacgagaccggccuggagcucacccugaccaacacguccaucaucaaccacaaguucugcaaccugagcgacgcccacaagaagaaccucuacgaccacgcccugauguccaucaucagcaccuuccaccuguccauccccaacuucaaccaguacgaggccaugagcugcgacuucaacgggggcaagaucuccgugcaguacaaccucagccacgcguacgccguggacgccgccaaccacugcgggaccaucgcgaacggcguccugcagaccuucaugcggauggccuggggcggguccuacaucgcccuggacagcggcugcggguccugggacugcaucaugacgagcuaccaguaccucaucauccagaacaccaccugggaggaccacugccaguucucccgccccagccccaucggcuaccuggggcugcucagccagcggacccgcgacaucuacaucucccggcgccgccggggcacguucaccuggacccucagcgacuccgagggcaacgagacccccgggggcuacugccugacgcgguggaugcugaucgaggccgagcucaagugcuucgggaacaccgccguggcgaagugcaacgagaagcacgacgaggaguucugcgacaugcugcgccuguucgacuucaacaagcaggccauccggcgccucaagacccccgcccagaugagcauccagcugaucaacaaggccgugaacgcccugaucaacgaccagcucaucaugaagaaccaccuccgggacaucaugugcaucccguacugcaacuacuccaaguacugguaccugaaccacaccgucacggggaagaccagccugccccgcugcuggcugguguccaacggcagcuaccugaacgagacccacuucuccgacgacaucgagcagcaggcggacaacaugaucaccgagcuccugcagaaggaguacauggaccggcagggcaagacgccccuggggcucguggaccuguucgucuucagcaccuccuucuaccugaucagcaucuuccugcaccucgugaagaucccgacccaccgccacgugaucggcaagcccugccccaagccccaccggcugaaccacauggggaucugcuccugcggccuguacaagcacccggggguccccgugaaguggaagcgcuga

SEQ ID NO: 4113 - RNA, 1473 nt, Artificial Sequence
  derived and/or modified protein sequence (opt1) from LASV(ISTH2064-NIG-2012;Clade II)__AIT17524__GPCstabilized
augggccagaucaucaccuucuuccaggaggugccccacgucaucgaggaggugaugaacaucgugcugaucgcccucagccugcuggccauccucaaggggaucuacaacgucgcgaccugcggccuguucgggcugguguccuuccuccugcugugcggccgcagcugcuccacgaccuacaaggggguguacgagcuccagacccuggagcuggacauggccagccucaacaugaccaugccgcuguccugcacgaagaacaacagccaccacuacaucauggucggcaacgagaccggccuggagcucacccugaccaacacguccaucaucaaccacaaguucugcaaccugagcgacgcccacaagaagaaccucuacgaccacgcccugauguccaucaucagcaccuuccaccuguccauccccaacuucaaccaguacgaggccaugagcugcgacuucaacgggggcaagaucuccgugcaguacaaccucagccacaccuacgcgaucgacgccgccaaccacugcgggaccaucgccaacggcgugcugcagacguucaugcggauggcguggggcggguccuacaucgcccuggacagcggcugcggguccugggacugcaucaugaccagcuaccaguaccucaucauccagaacaccaccugggaggaccacugccaguucucccgccccagccccaucggcuaccuggggcugcucagccagcggacgcgcgacaucuacaucucccggcgccgccggggcaccuucaccuggacccucagcgacuccgagggcaacgagacgcccgggggcuacugccugacccgguggaugcugaucgaggccgagcucaagugcuucgggaacaccgccgucgccaagugcaacgagaagcacgacgaggaguucugcgacaugcugcgccuguucgacuucaacaagcaggcgauccggcgccucaagacccccgcccagaugagcauccagcugaucaacaaggccgugaacgcccugaucaacgaccagcucaucaugaagaaccaccuccgggacaucaugugcauccccuacugcaacuacuccaaguacugguaccugaaccacacggugaccgggaagaccagccugccccgcugcuggcuggucuccaacggcagcuaccugaacgagacccacuucuccgacgacaucgagcagcaggccgacaacaugaucacggagaugcuccagaaggaguacauggaccggcagggcaagaccccgcuggggcugguggaccucuucguguucagcaccuccuucuaccugaucagcaucuuccugcaccuggucaagaucccgacccaccgccacgugaucggcaagcccugccccaagccccaccggcucaaccacauggggaucugcuccugcggccuguacaagcacccgggggugcccgucaaguggaagcgcuga

SEQ ID NO: 4114 - RNA, 1473 nt, Artificial Sequence
  derived and/or modified protein sequence (opt1) from LASV(ISTH2065-NIG-2012;Clade II)__AIT17528__GPCstabilized
augggccagaucaucaccuucuuccaggaggugccccacgucaucgaggaggugaugaacaucgugcugaucgcccucagccugcuggccaugcucaaggggaucuacaacaucgcgaccugcggccuguucgggcugaucuccuuccuccugcugugcggccgcagcugcuccacgaccuacaagggggucuacgagcuccaggcccuggagcuggacauggccaaccucaacaugaccaugccgcugagcugcaccaagaacaacucccaccacuacaucauggugggcaacgagacgggccuggagcucacccugaccaacaccagcaucaucaaccacaaguucugcaaccuguccgacgcccacaagaagaaccucuacgaccacgcccugaugagcaucaucuccacguuccaccugagcauccccaacuucaaccaguacgaggcgauguccugcgacuucaacgggggcaagaucagcgugcaguacaaccucucccacaccuacgccggggacgccgccaagcacugcggcaccaucgcgaacgggguccugcagaccuucaugcggauggccuggggcggcagcuacaucgcccuggacuccgggugcggcaacugggacugcaucaugacgagcuaccaguaccucaucauccagaacaccaccugggaggaccacugccaguucucccgccccagccccaucggguaccugggccugcucucccagcggacccgcgacaucuacaucagccggcgccgccggggcacguucaccuggacccucagcgacuccgaggggaacgagaccccgggcggguacugccugacgcgguggaugcugaucgaggccgagcucaagugcuucggcaacaccgccguggcgaagugcaacgagaagcacgacgaggaguucugcgacaugcugcgccuguucgacuucaacaagcaggccauccggcgccucaagacccccgcccagaugagcauccagcugaucaacaaggccgugaacgcccugaucaacgaccagcucaucaugaagaaccaccuccgggacaucaugugcauccccuacugcaacuacuccaaguacugguaccugaaccacagcgucaccggccgcacgucccugccccggugcuggcuggugagcaacggcuccuaccugaacgagacccaguucagcgacgacaucgagcagcaggcggacaacaugaucaccgagaugcuccagaaggaguacaucgaccgccaggggaagacgccccugggccugguggaccucuucgucuucuccaccagcuucuaccugaucuccaucuuccugcaccugaucaagaucccgacccaccggcacaucguggggaagcccugccccaagccccaccgccucaaccacaugggcaucugcagcugcgggcuguacaagcacccgggcauccccgugaaguggaagcgguga

SEQ ID NO: 4115 - RNA, 1473 nt, Artificial Sequence
  derived and/or modified protein sequence (opt1) from LASV(ISTH2094-NIG-2012;Clade II)__AIT17538__GPCstabilized
augggccagaucaucaccuucuuccaggaggugccccacgucaucgaggaggugaugaacaucgugcugaucgcccucagccugcuggccauccucaaggggaucuacaacaucgcgaccugcggccuguucgggcugaucuccuuccuccugcugugcggccgcagcugcuccacgaccuacaagggggucuacgagcuccagacccuggagcuggacauggccaaccucaacaugaccaugccgcugagcugcacgaagaacaacucccaccacuacaucauggugggcaacgagaccggccuggagcucacccugaccaacacgagcaucaucaaccacaaguucugcaaccuguccgacgcccacaagaagaaccucuacgaccacgcccugaugagcaucaucuccaccuuccaccugagcauccccaacuucaaccaguacgaggccauguccugcgacuucaacgaggggaagaucagcgugcaguacaaccucucccacagcuacgcgaucgacgccgccggccacugcgggaccaucgccaacggcguccugcagaccuucaugcggauggcguggggcggguccuacaucgcccuggacagcggcugcgggaacugggacugcaucaugacguccuaccaguaccucaucauccagaacaccaccugggaggaccacugccaguucagccgccccucccccaucggcuaccuggggcugcucagccagcggacccgcgacaucuacaucagccggcgccgccggggcacguucaccuggacccucuccgacagcgagggcaacgaggcccccgggggcuacugccugacccgguggaugcugaucgaggccgagcucaagugcuucgggaacacggccaucgcgaagugcaacgagaagcacgacgaggaguucugcgacaugcugcgccuguucgacuucaacaagcaggccaucaagcggcucaaggcccccgcccagauguccauccaccugaucaacaaggccgugaacgcgcugaucaacgaccagcucaucaugaagaaccaccuccgcgacaucaugugcauccccuacugcaacuacagcaaguacugguaccugaaccacaccgugaccgggaagaccucccugcccaagugcuggcuggucagcaacggcuccuaccugaacgagacgcacuucagcgacgacaucgagcagcaggccgacaacaugaucaccgagcuccugcagaaggaguacauggaccggcagggcaagaccccgcuggggcucguggaccuguucguguucuccaccagcuucuaccugaucuccaucuuccugcaccucgucaagaucccgacgcaccgccacaucgugggccggcccugccccaagccccaccgccugaaccacauggggaucugcagcugcggccuguacaagcacccgggggugcccgucaaguggaagcgguga

SEQ ID NO: 4116 - RNA, 1473 nt, Artificial Sequence
  derived and/or modified protein sequence (opt1) from LASV(ISTH2129-NIG-2012;Clade II)__AIT17544__GPCstabilized
augggccagaucaucaccuucuuccaggaggugccccacgucaucgaggaggugaugaacaucgugcugaucgcccucagccugcuggccauccucaaggggaucuacaacgucgcgaccugcggccuguucgggcugguguccuuccuccugcugugcggccgcagcugcuccacgaccuacaaggggguguacgagcuccagacccuggagcuggacaugggcagccucaacaugaccaugccgcuguccugcacgaagaacaacagccaccacuacaucauggucggcaacgagaccgggcuggagcucacccugaccaacacguccaucaucaaccacaaguucugcaaccugagcgacgcccacaagaagaaccucuacgaccacgcccugauguccaucaucagcaccuuccaccuguccauccccaacuucaaccaguacgaggccaugagcugcgacuucaacggcgggaagaucuccgugcaguacaaccucagccacuccuacgccguggacgcggccaaccacugcggcaccaucgccaacgggguccugcagaccuucaugcggauggccuggggcggcagcuacaucgcgcuggacuccgggugcggcagcugggacugcaucaugacguccuaccaguaccucaucauccagaacaccaccugggaggaccacugccaguucagccgccccagccccaucggguaccugggccugcucucccagcggacccgcgacaucuacaucagccggcgccgccggggcacguucaccuggacccucuccgacagcgaggggaacgagaccccgggcggguacugccugacgcgguggaugcugaucgaggccgagcucaagugcuucggcaacaccgccguggccaagugcaacgagaagcacgacgaggaguucugcgacaugcugcgccuguucgacuucaacaagcaggccauccggcgccucaagacccccgcgcagauguccauccagcugaucaacaaggccgugaacgcccugaucaacgaccagcucaucaugaagaaccaccuccgggacaucaugugcauccccuacugcaacuacagcaaguacugguaccugaaccacaccgucacgggcaagaccucccugccccgcugcuggcuggugagcaacggcuccuaccugaacgagacccacuucagcgacgacaucgagcagcaggccgacaacaugaucaccgagcuccugcagaaggaguacauggaccggcaggggaagacgccccugggccucguggaccuguucgucuucuccaccagcuucuaccugaucuccaucuuccugcaccucgugaagaucccgacccaccgccacaucaucgggaagcccugccccaagccccaccggcugaaccacaugggcaucugcagcugcgggcuguacaagcacccgggcgugcccgucaaguggaagcgcuga

SEQ ID NO: 4117 - RNA, 1473 nt, Artificial Sequence
  derived and/or modified protein sequence (opt1) from LASV(ISTH2217-NIG-2012;Clade II)__AIT17548__GPCstabilized
augggccagaucaucaccuucuuccaggaggugccccacgucaucgaggaggugaugaacaucgugcugaucgcccucagccugcuggccauccucaaggggaucuacaacgucgcgaccugcggccuguucgggcugguguccuuccucuuccugugcggccgcagcugcuccacgaccuacaaggggguguacgagcugcagacccucgagcuggacauggccagccugaacaugaccaugccgcucuccugcacgaagaacaacagccaccacuacaucauggucggcaacgagaccggccuggagcugacccucaccaacacguccaucaucaaccacaaguucugcaaccugagcgacgcccacaagcggaaccuguacgaccacgcccucauguccaucaucagcaccuuccaccuguccauccccaacuucaaccaguacgaggccaugagcugcgacuucaacgggggcaagaucuccgugcaguacaaccugagccacgcguacgccggggacgccgccaagcacugcggcaccaucgcgaacggggugcuccagaccuucaugcgcauggccuggggcggcuccuacaucgcccuggacagcgggugcggcuccugggacugcaucaugacgagcuaccaguaccugaucauccagaacaccaccugggaggaccacugccaguucucccggcccagccccaucggguaccucggccugcugagccagcgcacccgggacaucuacaucucccgccggcgccggggcacguucaccuggacccugagcgacuccgaggggaacgagaccccgggcggguacugccucacgcgcuggaugcugaucgaggccgagcugaagugcuucggcaacaccgccgucgcgaagugcaacgagaagcacgacgaggaguucugcgacaugcuccggcuguucgacuucaacaagcaggccauccgccggcugcgcacccccgcccagaugagcauccagcucaucaacaaggccgugaacgcccugaucaacgaccagcugaucaugaagaaccaccuccgggacaucaugugcauccccuacugcaacuacuccaaguacugguaccugaaccacaccgugacgggcaagaccagccugcccaagugcuggcucgucuccaacggcagcuaccugaacgagacccacuucuccgacgacaucgagcagcaggcggacaacaugaucaccgagaugcugcagaaggaguacaucgaccgccaggggaagacgccccucggccugguggaccuguucguguucagcaccuccuucuaccucaucagcaucuuccugcaccuggucaagaucccgacccaccggcacgugaucgggaagcccugccccaagccccaccgccugaaccacaugggcaucugcuccugcgggcucuacaagcacccgggcgugcccgucaaguggaagcgguga

SEQ ID NO: 4118 - RNA, 1473 nt, Artificial Sequence
  derived and/or modified protein sequence (opt1) from LASV(ISTH2271-NIG-2012;Clade II)__AIT17552__GPCstabilized
augggccagaucaucaccuucuuccaggaggugccccacgucaucgaggaggugaugaacaucgugcugaucgcccucagccugcuggccauccucaaggggaucuacaacgucgcgaccugcggccuguucgggcugguguccuuccuccugcugugcggccgcagcugcuccacgaccuacaaggggguguacgagcuccagacccuggagcuggacauggccagccucaacaugaccaugccgcuguccugcacgaagaacaacagccaccacuacaucauggucggcaacgagaccggccuggagcucacccugaccaacacguccaucaucaaccacaaguucugcaaccugagcgacgcccacaagaagaaccucuacgaccacgcccugauguccaucaucagcaccuuccaccuguccauccccaacuucaaccaguacgaggccaugagcugcgacuucaacgggggcaagaucuccgugcaguacaaccucagccacgcguacgccgugaacgccgccaaccacugcgggaccaucgcgaacggcguccugcagaccuucaugcggauggccuggggcggguccuacaucgcccuggacagcggcugcggguccugggacugcaucaugacgagcuaccaguaccucaucauccagaacaccaccugggaggaccacugccaguucucccgccccagccccaucggcuaccuggggcugcucagccagcggacccgcgacaucuacaucucccggcgccgccggggcacguucaccuggacccucagcgacuccgagggcaacgagacccccgggggcuacugccugacgcgguggaugcugaucgaggccgagcucaagugcuucgggaacaccgccguggcgaagugcaacgagaagcacgacgaggaguucugcgacaugcugcgccuguucgacuucaacaagcaggccauccggcgccucaagacccccgcccagaugagcauccagcugaucaacaaggccgugaacgcccugaucaacgaccagcucaucaugaagaaccaccuccgggacaucaugugcaucccguacugcaacuacuccaaguacugguaccugaaccacaccgucacggggaagaccagccugccccgcugcuggcugguguccaacggcagcuaccugaacgagacccacuucuccgacgacaucgagcagcaggcggacaacaugaucaccgagcuccugcagaaggaguacauggaccggcagggcaagacgccccuggggcucguggaccuguucgucuucagcaccuccuucuaccugaucagcaucuuccugcaccucgugaagaucccgacccaccgccacgugaucggcaagcccugccccaagccccaccggcugaaccacauggggaucugcuccugcggccuguacaagcacccggggguccccgugaaguggaagaaguga

SEQ ID NO: 4119 - RNA, 1473 nt, Artificial Sequence
  derived and/or modified protein sequence (opt1) from LASV(ISTH2304-NIG-2012;Clade II)__AIT17556__GPCstabilized
augggccagaucaucaccuucuuccaggaggugccccacgucaucgaggaggugaugaacaucgugcugaucgcccucagccugcuggccauccucaaggggaucuacaacgucgcgaccugcggccuguucgggcugguguccuuccuccugcugugcggccgcagcugcuccacgaccuacaaggggguguacgagcuccagacccuggagcuggacauggccagccucaacaugaccaugccgcuguccugcacgaagaacaacagccaccacuacaucauggucggcaacgagaccggccuggagcucacccugaccaacacguccaucaucaaccacaaguucugcaaccugagcgacgcccacaagaagaaccucuacgaccacgcccugauguccaucaucagcaccuuccaccuguccauccccaacuucaaccaguacgaggccaugagcugcgacuucaacgggggcaagaucuccgugcaguacaaccucagccacaccuacgcgguggacgccgccaaccacugcgggaccaucgccaacggcguccugcagacguucaugcggauggcguggggcggguccuacaucgcccuggacagcggcugcggguccugggacugcaucaugaccagcuaccaguaccucaucauccagaacaccaccugggaggaccacugccaguucucccggcccagccccaucggcuaccuggggcugcucagccagcgcacgcgggacaucuacaucucccgccggcgccggggcaccuucaccuggacccucagcgacuccgagggcaacgagacgcccgggggcuacugccugacccgcuggaugcugaucgaggccgagcucaagugcuucgggaacaccgccguggccaagugcaacgagaagcacgacgaggaguucugcgacaugcugcggcuguucgacuucaacaagcaggcgauccgccggcucaagacccccgcccagaugagcauccagcugaucaacaaggccgugaacgcccugaucaacgaccagcucaucaugaagaaccaccuccgcgacaucaugugcauccccuacugcaacuacuccaaguacugguaccugaaccacacgaucaccgggaagaccagccugccccggugcuggcuggucuccaacggcagcuaccugaacgagacccacuucuccgacgacaucgagcagcaggccgacaacaugaucacggagcuccugcagaaggaguacaucgaccgccagggcaagaccccgcuggggcucguggaccuguucguguucagcaccuccuucuaccugaucagcaucuuccugcaccucgucaagaucccgacccaccggcacaucacgggcaagcccugccccaagccccaccgccugaaccacauggggaucugcuccugcggccuguacaagcacccgggggugcccgugcgguggaagcgcuga

SEQ ID NO: 4120 - RNA, 1473 nt, Artificial Sequence
  derived and/or modified protein sequence (opt1) from LASV(ISTH2312-NIG-2012;Clade II)__AIT17560__GPCstabilized
augggccagaucaucaccuucuuccaggaggugccccacgucaucgaggaggugaugaacaucgugcugaucgcccucagccugcuggccguccucaaggggaucuacaacguggcgaccugcggccuguucgggcugguguccuuccuccugcugugcggccgcagcugcuccacgaccuacaagggggucuacgagcuccagacccuggagcuggacauggccagccucaacaugaccaugccgcuguccugcacgaccaacaacagccaccacuacaucauggugggcaacgagaccggccuggagcucacccugacgaacaccuccaucaucaaccacaaguucugcaaccugagcgacgcccacaagaagaaccucuacgaccacgcccugauguccaucaucagcaccuuccaccuguccauccccaacuucaaccaguacgaggccaugagcugcgacuucaacgggggcaagaucuccgugcaguacaaccucagccacgcguacgccggggaggccgccaaccacugcggcaccaucgcgaacgggguccugcagacguucaugcggauggccuggggcggcuccuacaucgcccuggacagcgggugcggcuccugggacugcaucaugaccagcuacaaguaccucaucauccagaacaccaccuggggcgaccacugccaguucucccgccccagccccaucggguaccugggccugcucagccagcggacgcgcgacaucuacaucucccggcgccgccgggggaccuucaccuggacccucagcgacuccgagggcaacgagacgcccgggggcuacugccugacccgguggaugcugaucgaggccgagcucaagugcuucgggaacaccgccguggcgaagugcaacgagaagcacgacgaggaguucugcgacaugcugcgccuguucgacuucaacaagcaggccauccggaagcucaagacccccgcccagaugagcauccagcugaucaacaaggccgugaacgcccugaucaacgaccagcucaucaugaagaaccaccuccgcgacaucaugugcauccccuacugcaacuacucccgguacugguaccugaaccacacggucaccggccgcaccagccugccccggugcuggcugguguccaacgggagcuaccugaacgagacccacuucuccgacgacaucgagcagcaggcggacaacaugaucacggagcuccugcagaaggaguacaucgaccgccagggcaagaccccgcuggggcucguggaccuguucgucuucagcaccuccuucuaccugaucagcaucuuccugcaccucgugaagaucccgacccaccggcacaucaucggcaagcccugccccaagccccaccgccugaaccacauggggaucugcuccugcggccuguacaagcacccgggcgugcccgucaaguggaagcgguga

SEQ ID NO: 4121 - RNA, 1473 nt, Artificial Sequence
  derived and/or modified protein sequence (opt1) from LASV(ISTH2316-NIG-2012;Clade II)__AIT17564__GPCstabilized
augggccagaucaucaccuucuuccaggaggugccccacgucaucgaggaggugaugaacaucgugcugaucgcccucagccugcuggccauccucaaggggaucuacaacgucgcgaccugcggccuguucgggcugcucuccuuccugcugcucugcggccgcagcugcuccacgaccuacaaggggguguacgagcugcagacccuggagcucgacauggccagccugaacaugaccaugccgcuguccugcacgaagaacaacagccaccacuacaucauggugggcaacgagaccggccucgagcugacccugaccaacacguccaucaucaaccacaaguucugcaaccucagcgacgcccacaagaaggaccuguacgaccacgcccugauguccaucaucagcaccuuccaccucuccauccccaacuucaaccaguacgaggccaugagcugcgacuucaacgggggcaagaucuccguccaguacaaccugagccacgcguacgccguggacgccgccaagcacugcgggaccaucgcgaacggcgugcugcagaccuucaugcggauggccuggggcggguccuacaucgcccucgacagcggcugcggguccugggacugcaucaugacgagcuaccaguaccugaucauccagaacaccuccugggaggaccacugccaguucagccgccccagccccaucggcuaccuggggcuccugucccagcggacccgcgacaucuacaucagccggcgccgccggggcaccuucacguggacccuguccgacagcgagggcaacgagacccccgggggcuacugccugacccgguggaugcucaucgaggccgagcugaagugcuucgggaacacggccgucgcgaagugcaacgagaagcacgacgaggaguucugcgacaugcugcgccucuucgacuucaacaagcaggccaucaagcggcugaagacccccgcccagauguccauccagcugaucaacaaggccgugaacgcccucaucaacgaccagcugaucaugaagaaccaccuccgcgacaucaugugcauccccuacugcaacuacagcaaguacugguaccugaaccacaccgugaccgggaagacgucccugccccggugcuggcuggucagcaacggcuccuaccucaacgagacccacuucagcgacgacaucgagcagcaggcggacaacaugaucaccgagcugcugcagaaggaguacaucgaccgccagggcaagaccccgcucgggcugguggaccuguucguguucuccacgagcuucuaccugaucuccaucuuccuccaccuggucaagaucccgacccaccggcacgugaucggcaagcccugccccaagccccaccgccugaaccacauggggaucugcagcugcggccucuacaagcacccgggggugcccgucaaguggaagcgguga

SEQ ID NO: 4122 - RNA, 1473 nt, Artificial Sequence
  derived and/or modified protein sequence (opt1) from LASV(ISTH2358-NIG-2012;Clade II)__AIT17572__GPCstabilized
augggccagaucaucaccuucuuccaggaggugccccacgucaucgaggaggugaugaacaucgugcugaucgcccucagccugcuggccauccucaaggggaucuacaacgucgcgaccugcggccuguucgggcugguguccuuccuccugcugugcggccgcagcugcuccacgaccuacaaggggguguacgagcuccagacccuggagcuggacauggccaaccucaacaugaccaugccgcugagcugcacgaagaacaacucccaccacuacaucauggucggcaacgagaccggccuggagcucacccugaccaacacgagcaucaucaaccacaaguucugcaaccuguccgacgcccacaagaagaaccucuacgaccacgcccugaugagcaucaucuccaccuuccaccugagcauccccaacuucaaccaguacgaggccauguccugcgacuucaacgggggcaagaucagcgugcaguacaaccucucccacaacuacgcgguggacgccgccaaccacugcgggaccaucgccaacggcguccugcagaccuucaugcggauggcguggggcgggagcuacaucgcccuggacuccggcugcgggaacugggacugcaucaugacgagcuaccaguaccucaucauccagaacaccaccugggaggaccacugccaguucucccgccccagccccaucggcuaccuggggcugcucucccagcggacccgcgacaucuacaucagccggcgccgccggggcacguucaccuggacccucagcgacuccgagggcaacgacaugcccgggggcuacugccugacccgguggaugcugaucgaggccgagcucaagugcuucgggaacacggccguggccaagugcaacgagaagcacgacgaggaguucugcgacaugcugcgccuguucgacuucaacaagcaggcgauccggcgccucaagacccccgcccagaugaacauccagcugaucaacaaggccgugaacgcccugaucaacgaccagcucaucaugaagaaccaccuccgggacaucaugugcauccccuacugcaacuacagcaaguacugguaccugaaccacaccgucaccgggaagacgucccugccccgcugcuggcuggugagcaacggcuccuaccugaacgagacccacuucagcgacgacaucgagcagcaggccgacaacaugaucaccgagcuccugcagaaggaguacauggaccggcagggcaagaccccgcuggggcucguggaccuguucgucuucuccacgagcuucuaccugaucuccaucuuccugcaccucgugaagaucccgacccaccgccacaucaucggcaagcccugccccaagccccaccggcugaaccacauggggaucugcagcugcggccuguacaagcacccgggggugcccgucaaguggaagcgcuga

SEQ ID NO: 4123 - RNA, 1473 nt, Artificial Sequence
  derived and/or modified protein sequence (opt1) from LASV(ISTH2376-NIG-2012;Clade II)__AIT17576__GPCstabilized
augggccagaucaucaccuucuuccaggaggugccccacgucaucgaggaggugaugaacaucgugcugaucgcccucagccugcuggccauccucaaggggaucuacaacgucgcgaccugcggccuguucgggcugguguccuuccuccugcugugcggccgcagcugcuccacgaccuacaaggggguguacgagcuccagacccuggagcuggacauggccagccucaacaugaccaugccgcuguccugcacgaagaacaacagccaccacuacaucauggucggcaacgagaccggccuggagcucacccugaccaacacguccaucaucaaccacaaguucugcaaccugagcgacgcccacaagaagaaccucuacgaccacgcccugauguccaucaucagcaccuuccaccuguccauccccaacuucaaccaguacgaggccaugagcugcgacuucaacgggggcaagaucuccgugcaguacaaccucagccacaccuacgcgguggacgccgccaaccacugcgggaccaucgccaacggcguccugcagacguucaugcggauggcguggggcggguccuacaucgcccuggacagcggcugcgggaacugggacugcaucaugaccuccuaccaguaccucaucauccagaacaccaccugggaggaccacugccaguucagccgccccucccccaucggcuaccuggggcugcucagccagcggacgcgcgacaucuacaucagccggcgccgccggggcaccuucaccuggacccucuccgacagcgagggcaacgagacgcccgggggcuacugccugacccgguggaugcugaucgaggccgagcucaagugcuucgggaacaccgccguggccaagugcaacgagaagcacgacgaggaguucugcgacaugcugcgccuguucgacuucaacaagcaggcgaucucccggcucaagacccccgcccagaugagcauccagcugaucaacaaggccgugaacgcccugaucaacgaccagcucaucaugaagaaccaccuccgcgacaucaugugcauccccuacugcaacuacuccaaguacugguaccugaaccacacggucaccgggaagaccagccugccccggugcuggcugguguccaacggcagcuaccugaacgagacccacuucuccgacgacaucgagcagcaggccgacaacaugaucacggagaugcuccagaaggaguacaucgaccgccagggcaagaccccgcuggggcugguggaccucuucgucuucagcaccuccuucuaccugaucagcaucuuccugcaccuggugaagaucccgacccaccggcacaucacgggcaagcccugccccaagccccaccgccucaaccacauggggaucugcuccugcggccuguacaagcacccgggggugcccgucaaguggaagcgguga

SEQ ID NO: 4124 - RNA, 1473 nt, Artificial Sequence
  derived and/or modified protein sequence (opt1) from LASV(Lassa virus/H.sapiens-wt/NGA/2015/ISTH_0543;Clade II)__AVO03639__GPCstabilized
augggccagaucaucaccuucuuccaggaggugccccacgucaucgaggaggugaugaacaucgugcugaucgcccucagccugcuggccauccucaaggggaucuacaacgucgcgaccugcggccuguucgggcugguguccuuccuccugcugugcggccgcagcugcuccacgaccuacaaggggguguacgagcuccagacccuggagcuggacauggccaaccucaacaugaccaugccgcugagcugcacgaagaacaacucccaccacuacaucauggucggcaacgagaccggccuggagcucacccugaccaacacgagcaucaucaaccacaaguucugcaaccuguccgacgcccacaagaagaaccucuacgaccacgcccugaugagcaucaucuccaccuuccaccugagcauccccaacuucaaccaguacgaggccauguccugcgacuucaacgggggcaagaucagcgugcaguacaaccucucccacaccuacgcgguggacgccgccaaccacugcgggaccaucgccaacggcguccugcagacguucaugcggauggcguggggcgggagcuacaucgcccuggacuccggcugcgggagcugggacugcaucaugaccuccuaccaguaccucgugauccagaacaccaccugggaggaccacugccaguucagccgccccucccccaucggcuaccuggggcugcucagccagcggacgcgcgacaucuacaucagccggcgccgccggggcaccuucaccuggacccucuccgacagcgagggcaacgagacgcccgggggcuacugccugacccgguggaugcugaucgaggccgagcucaagugcuucgggaacaccgccguggccaagugcaacgagaagcacgacgaggaguucugcgacaugcugcgccuguucgacuucaacaagcaggcgauccggcgccucaagacccccgcccagauguccauccagcugaucaacaaggccgucaacgcccugaucaacgaccagcucaucaugaagaaccaccuccgggacaucaugugcauccccuacugcaacuacagcaaguacugguaccugaaccacacggugaccgggaagaccucccugccccgcugcuggcuggugagcaacggcuccuaccugaacgagacccacuucagcgacgacaucgagcagcaggccgacaacaugaucacggagcuccugcagaaggaguacaucgaccggcagggcaagaccccgcuggggcucgucgaccuguucguguucuccaccagcuucuaccugaucuccaucuuccugcaccucgugaagaucccgacccaccgccacaucacgggcaagcccugccccaagccccaccggcugaaccacauggggaucugcagcugcggccuguacaagcacccggggguccccgugaaguggaagcgcuga

SEQ ID NO: 4125 - RNA, 1473 nt, Artificial Sequence
  derived and/or modified protein sequence (opt1) from LASV(Lassa virus/H.sapiens-wt/NGA/2015/ISTH_0547;Clade II)__AVO03583__GPCstabilized
augggccagaucaucaccuucuuccaggaggugccccacgucaucgaggaggugaugaacaucgugcugaucgcccucagccugcuggccauccucaaggggaucuacaacgucgcgaccugcggccuguucgggcugguguccuuccuccugcugugcggccgcagcugcuccacgaccuacaaggggguguacgagcuccagacccuggagcuggacauggccagccucaacaugaccaugccgcuguccugcacgaagaacaacagccaccacuacaucauggucggcaacgagaccggccuggagcucacccugaccaacacguccaucaucaaccacaaguucugcaaccugagcgacgcccacaagaagaaccucuacgaccacgcccugauguccaucaucagcaccuuccaccuguccauccccaacuucaaccaguacgaggccaugagcugcgacuucaacgggggcaagaucuccgugcaguacaaccucagccacaccuacgcgguggacgccgccaaccacugcgggaccaucgccaacggcguccugcagacguucaugcggauggcguggggcggguccuacaucgcccuggacagcggcugcggguccugggacugcaucaugaccagcuaccaguaccucaucauccagaacaccaccugggaggaccacugccaguucucccgccccagccccaucggcuaccuggggcugcucagccagcggacgcgcgacaucuacaucucccggcgccgccggggcaccuucaccuggacccucagcgacuccgagggcaacgagacgcccgggggcuacugccugacccgguggaugcugaucgaggccgagcucaagugcuucgggaacaccgccguggccaagugcaacgagaagcacgacgaggaguucugcgacaugcugcgccuguucgacuucaacaagcaggcgauccggcgccucaagacccccgcccagaugagcauccagcugaucaacaaggccgugaacgcccugaucaacgaccagcucaucaugaagaaccaccuccgggacaucaugugcauccccuacugcaacuacuccaaguacugguaccugaaccacacggucaccgggaagaccagccugccccgcugcuggcugguguccaacggcagcuaccugaacgagacccacuucuccgacgacaucgagcagcaggccgacaacaugaucacggagcuccugcagaaggaguacaucgagcggcagggcaagaccccgcuggggcucguggaccuguucgucuucagcaccuccuucuaccugaucagcaucuuccugcaccucgugaagaucccgacccaccgccacaucacgggcaagcccugccccaagccccaccggcugaaccacauggggaucugcuccugcggccuguacaagcacccgggggugcccgucaaguggaagcgcuga

SEQ ID NO: 4126 - RNA, 1473 nt, Artificial Sequence
  derived and/or modified protein sequence (opt1) from LASV(Lassa virus/H.sapiens-wt/NGA/2015/ISTH_0574;Clade II)__AVO03657__GPCstabilized
augggccagaucaucaccuucuuccaggaggugccccacgucaucgaggaggugaugaacaucgugcugaucgcccucagccugcuggccauccucaaggggaucuacaacgucgcgaccugcggccuguucgggcugguggccuuccuccugcugugcggccgcuccugcagcacgaccuacaaggggguguacgagcuccagacccuggagcuggacauggccucccucaacaugaccaugccgcugagcugcacgaagaacaacucccaccacuacaucauggucggcaacgagaccggccuggagcucacccugaccaacacgagcaucaucaaccacaaguucugcaaccuguccgacgcccacaagaagaaccucuacgaccacgcccugaugagcaucaucuccaccuuccaccugagcauccccaacuucaaccaguacgaggcgauguccugcgacuucaacgggggcaagaucagcgugcaguacaaccucucccacaccuacgccguggacgccgccaaccacugcgggaccaucacgaacggcguccugcagaccuucaugcggauggcguggggcgggagcuacaucgcccuggacuccggcugcgggagcugggacugcaucaugaccuccuaccaguaccucaucauccagaacaccacgugggaggaccacugccaguucagccgccccucccccaucggcuaccuggggcugcucagccagcggacccgcgacaucuacaucagccggcgccgccggggcaccuucaccuggacgcucuccgacagcgagggcaacgagacccccgggggcuacugccugacccgguggaugcugaucgaggccgagcucaagugcuucgggaacaccgccguggccaagugcaacgagaagcacgacgaggaguucugcgacaugcugcgccuguucgacuucaacaagcaggcgauccggcgccucaagacgcccgcccagauguccauccagcugaucaacaaggccgugaacgcccugaucaacgaccagcucaucaugaagaaccaccuccgggacaucaugugcauccccuacugcaacuacagcaaguacugguaccugaaccacaccgucaccgggcgcaccucccugccccggugcuggcuggugagcaacggcuccuaccugaacgagacgcacuucagcgacgacaucgagcagcaggccgacaacaugaucaccgagcuccugcagaaggaguacauggaccgccagggcaagaccccgcuggggcucguggaccuguucgucuucuccaccagcuucuaccugaucuccaucuuccugcaccucaucaagaucccgacgcaccggcacgugaucggcaagcccugccccaagccccaccgccugaaccacauggggaucugcagcugcggccuguacaagcacccgggggugcccgucaaguggaagcgguga

SEQ ID NO: 4127 - RNA, 1473 nt, Artificial Sequence
  derived and/or modified protein sequence (opt1) from LASV(Lassa virus/H.sapiens-wt/NGA/2015/ISTH_0681;Clade II)__AVO03617__GPCstabilized
augggccagaucaucaccuucuuccaggaggugccccacgucaucgaggaggugaugaacaucgugcugaucgcccucagccugcuggccauccucaaggggaucuacaacgucgcgaccugcggccuguucgggcugguguccuuccuccugcugugcggccgcagcugcuccaccaccuacaaggggguguacgagcuccagacccuggagcuggacauggccagccucaacaugaccaugccgcuguccugcacgaagaacaacagccaccacuacaucauggucggcaacgagaccggccuggagcucacccugaccaacacguccaucaucaaccacaaguucugcaaccugagcgacgcccacaagaagaaccucuacgaccacgcccugauguccaucaucagcaccuuccaccuguccauccccaacuucaaccaguacgaggccaugagcugcgacuucaacgggggcaagaucuccgugcaguacaaccucagccacaccuacgcggagggggccgccaaccacugcggcaccaucgccaacggggugcugcagacguucaugcggauggcguggggcggcuccuacaucgcccuggacagcgggugcggcuccugggacugcaucaugaccagcuaccaguaccucaucauccagaacaccaccugggaggaccacugccaguucucccgccccagccccaucggguaccugggccugcucagccagcggacgcgcgacaucuacaucucccggcgccgccggggcaccuucaccuggacccucagcgacuccgaggggaacgagacgccgggcggguacugccugacccgguggaugcugaucgaggccgagcucaagugcuucggcaacaccgccgucgccaagugcaacgagaagcacgacgaggaguucugcgacaugcugcgccuguucgacuucaacaagcaggcgaucaugcggcucaagacccccgcccagaugagcauccagcugaucaacaaggccgugaacgcccugaucaacgaccagcucaucaugaagaaccaccuccgcgacaucaugugcauccccuacugcaacuacuccaaguacugguaccugaaccacacggugaccggcaagaccagccugccccggugcuggcuggucuccaacggcagcuaccugaacgagacccacuucuccgacgacaucgagcagcaggccgacaacaugaucacggagaugcuccagaaggaguacauggaccgccaggggaagacgccccugggccugguggaccucuucguguucagcaccuccuucuaccugaucagcaucuuccugcaccuggucaagaucccgacccaccggcacgugaucgggaagcccugccccaagccccaccgccucaaccacaugggcaucugcuccugcgggcuguacaagcacccgggcgugcccgucaaguggaagcgguga

SEQ ID NO: 4128 - RNA, 1473 nt, Artificial Sequence
  derived and/or modified protein sequence (opt1) from LASV(Lassa virus/H.sapiens-wt/NGA/2015/ISTH_0682;Clade II)__AVO03625__GPCstabilized
augggccagaucaucaccuucuuccaggaggugccccacgucaucgaggaggugaugaacaucgugcugaucgcccucagccugcuggccauccucaaggggaucuacaacgucgcgaccugcggccuguucgggcugguguccuuccuccugcugugcggccgcagcugcuccacgaccuacaaggggguguacgagcuccagacccuggagcuggacauggccagccucaacaugaccaugccgcuguccugcacgaagaacaacagccaccacuacaucauggucggcaacgagaccggccuggagcucacccugaccaacacguccaucaucaaccacaaguucugcaaccugagcgacgcccacaagaagaaccucuacgaccacgcccugauguccaucaucagcaccuuccaccuguccauccccaacuucaaccaguacgaggccaugagcugcgacuucaacgggggcaagaucuccgugcaguacaaccucagccacgcguacgccguggacgccgccaaccacugcgggaccaucgcgaacggcguccugcagaccuucaugcggauggccuggggcggguccuacaucgcccuggacagcggcugcggguccugggacugcaucaugacgagcuaccacuaccucaucauccagaacaccaccugggaggaccacugccaguucucccgccccagccccaucggcuaccuggggcugcucagccagcggacccgcgacaucuacaucucccggcgccgccggggcacguucaccuggacccucagcgacuccgagggcaacgagacccccgggggcuacugccugacgcgguggaugcugaucgaggccgagcucaagugcuucgggaacaccgccguggcgaagugcaacgagaagcacgacgaggaguucugcgacaugcugcgccuguucgacuucaacaagcaggccauccggcgccucaagacccccgcccagaugagcauccagcugaucaacaaggccgugaacgcccugaucaacgaccagcucaucaugaagaaccaccuccgggacaucaugugcaucccguacugcaacuacuccaaguacugguaccugaaccacaccgucacggggaagaccagccugccccgcugcuggcugguguccaacggcagcuaccugaacgagacccacuucuccgacgacaucgagcagcaggcggacaacaugaucaccgagcuccugcagaaggaguacaucgaccggcagggcaagacgccccuggggcucguggaccuguucgucuucagcaccuccuucuaccugaucagcaucuuccugcaccucgugaagaucccgacccaccgccacgugaucggcaagcccugccccaagccccaccggcugaaccacauggggaucugcuccugcggccuguacaagcacccggggguccccgugaaguggaagcgcuga

SEQ ID NO: 4129 - RNA, 1473 nt, Artificial Sequence
  derived and/or modified protein sequence (opt1) from LASV(Lassa virus/H.sapiens-wt/NGA/2015/ISTH_0687;Clade II)__AVO03581__GPCstabilized
augggccagaucaucaccuucuuccaggaggugccccacgucaucgaggaggugaugaacaucgugcugaucgcccucagccugcuggccauccucaaggggaucuacaacgucgcgaccugcggccuguucgggcugguguccuuccuccugcugugcggccgcagcugcuccaccaccuacaaggggguguacgagcuccagacccuggagcuggacaugaccaaccucaacaugacgaugccgcugagcugcaccaagaacaacucccaccacuacaucauggucggcaacgagaccggccuggagcucacccugacgaacaccagcaucaucaaccacaaguucugcaaccuguccgacgcccacaagaagaaccucuacaaccacgcccugaugagcaucaucuccaccuuccaccugagcauccccaacuucaaccaguacgaggccauguccugcgacuucaacgggggcaagaucagcgugcaguacaaccucucccacaccuacgccguggacgcggccaaccacugcgggacggucgccaacggcgugcugcagaccuucaugcggauggccuggggcgggagcuacaucgcgcuggacuccggcugcggcgggugggacugcaucaugaccagcuaccaguaccucaucauccagaacaccacgugggaggaccacugccaguucucccgccccagccccaucggguaccugggccugcucucccagcggacccgcgacaucuacaucagccggcgccgccggggcaccuucaccuggacgcucagcgacuccgaggggaacgagaccccgggcggguacugccugacccgguggaugcugaucgaggccgagcucaagugcuucggcaacaccgccguggccaagugcaacgagaagcacgacgaggaguucugcgacaugcugcgccuguucgacuucaacaagcaggccauccggaagcucaaggcgcccgcccagaugagcauccagcugaucaacaaggccgucaacgcccugaucaacgaccagcucaucaugaagaaccaccuccgcgacaucaugugcauccccuacugcaacuacuccaaguacugguaccugaaccacacggugaccggcaagaccagccugcccaagugcuggcugguguccaacggcagcuaccugaacgagacccacuucuccgacgacaucgagcagcaggccgacaacaugaucacggagcuccugcagaaggaguacauggaccggcaggggaagacgccccugggccucgucgaccuguucguguucagcaccuccuucuaccugaucagcaucuuccugcaccucgugaagaucccgacccaccgccacaucaucgggaagcccugccccaagccccaccggcugaaccacaugggcaucugcuccugcgggcuguacaagcacccgggcguccccgugaaguggaagcgcuga

SEQ ID NO: 4130 - RNA, 1473 nt, Artificial Sequence
  derived and/or modified protein sequence (opt1) from LASV(Lassa virus/H.sapiens-wt/NGA/2015/ISTH_0736;Clade II)__AVO03573__GPCstabilized
augggccagaucaucaccuucuuccaggaggugccccacgucaucgaggaggugaugaacaucgugcugaucgcccucagccugcuggccguccucaaggggaucuacaacguggcgaccugcggccuguucgggcugguguccuuccuccugcugugcggccgcagcugcuccacgaccuacaagggggucuacgagcuccagacccuggagcuggacauggccagccucaacaugaccaugccgcuguccugcacgaagaacaacagccaccacuacaucauggugggcaacgagaccggccuggagcucacccugaccaacacguccaucaucaaccacaaguucugcaaccugagcgacgcccacaagaagaaccucuacgaccacgcccugauguccaucaucagcaccuuccaccuguccauccccaacuucaaccaguacgaggccaugagcugcgacuucaacgggggcaagaucuccgugcaguacaaccucagccacacccacgcggucgacgccgccaaccacugcgggaccaucgccaacggcgugcugcagacguucaugcggauggcguggggcggguccuacaucgcccuggacagcggcugcggguccugggacugcaucaugaccagcuaccaguaccucaucauccagaacaccaccugggaggaccacugccaguucucccgccccagccccaucggcuaccuggggcugcucagccagcggacgcgcgacaucuacaucucccggcgccgccggggcaccuucaccuggacccucagcgacuccgagggcaacgagacgcccgggggcuacugccugacccgguggaugcugaucgaggccgagcucaagugcuucgggaacaccgccguggccaagugcaacgagaagcacgacgaggaguucugcgacaugcugcgccuguucgacuucaacaagcaggcgauccggcgccucaagacccccgcccagaugagcauccagcugaucaacaaggccgucaacgcccugaucaacgaccagcucaucaugaagaaccaccuccgggacaucaugugcauccccuacugcaacuacucccgcuacugguaccugaaccacacggugaccgggaagaccagccugccccggugcuggcugguguccaacggcagcuaccugaacgagacccacuucuccgacgacaucgagcagcaggccgacaacaugaucacggagcuccugcagaaggaguacaucgaccgccagggccggaccccgcuggggcucgucgaccuguucguguucagcaccuccuucuaccugaucagcaucuuccugcaccucgugaagaucccgacccaccgccacgucaucggcaagcccugccccaagccccaccggcugaaccacauggggaucugcuccugcggccuguacaagcacccgggggugcccgugaaguggaagcgcuga

SEQ ID NO: 4131 - RNA, 1473 nt, Artificial Sequence
  derived and/or modified protein sequence (opt1) from LASV(Lassa virus/H.sapiens-wt/NGA/2015/ISTH_0789;Clade II)__AVO03551__GPCstabilized
augggccagaucgugaccuucuuccaggaggucccccacgugaucgaggagaucaugaacaucgugcugaucacccucagccugcuggccauccucaagggggucuacaaccuggccacgugcggccugaucgggcucaucaccuuccuguuccugugcggccgcuccugcagcaccaucuacaagggguccuaccaguuccagacccucgagcugaacauggagacgcugaacaugaccaugccgcucagcugcaccaagaacuccagccaccacuacauccggguguccaacgagaccggccuggagcugacgcucaccaacaccagcaucaucaaccacaaguucugcaaccuguccgacgcgcacaagaagaaccuguacgaccacacccucaugagcaucaucuccacguuccaccugagcauccccaacuucaaccaguacgaggccauguccugcgacuucaacggcgggaagaucagcgugcaguacaaccugucccacagcuacgccgucgacgccgccaaccacugcggcaccguggcgaacggggugcuccagaccuucaugcgcauggccuggggcggguccuacaucgcccuggacagcggcugcggcaacugggacugcaucaugaccuccuaccaguaccugaucauccagaacacgaccugggaggaccacugccaguucagccgccccagccccaucggguaccucggccugcugucccagcggacccgcgacaucuacaucagccggcgccgccgggggaccuucacguggacccuguccgacagcgagggcaaggagaccccgggcggguacugccucacccgguggaugcugaucgaggccgagcugaagugcuucggcaacacggcggucgccaagugcaacgagaagcacgacgaggaguucugcgacaugcuccgccuguucgacuucaacaagcaggccauccagcggcugaaggcccccgcccagauguccauccagcucaucaacaaggcggugaacgcccugaucaacgaccagcugaucaugaagaaccaccuccgcgacaucaugugcauccccuacugcaacuacagcaaguacugguaccugaaccacaccuccaccggccggaccagccugcccaagugcuggcucguguccaacgggagcuaccugaacgagacgcacuucuccgacgacaucgagcagcaggccgacaacaugaucaccgagaugcugcagaaggaguacaucgaccgccagggcaagacgccccucggccuggucgaccuguucguguucagcaccuccuucuaccucaucagcaucuuccugcaccuggugaagaucccgacccaccggcacaucgucgggaaguccugccccaagccccaccgccugaaccacaugggcaucugcagcugcgggcucuacaagcggcccggcgugccggugaaguggaagcgcuga

SEQ ID NO: 4132 - RNA, 1473 nt, Artificial Sequence
  derived and/or modified protein sequence (opt1) from LASV(Lassa virus/H.sapiens-wt/NGA/2015/ISTH_0821;Clade II)__AVO03641__GPCstabilized
augggccagaucaucaccuucuuccaggaggugccccacgucaucgaggaggugaugaacaucgugcugaucgcccucagccugcuggccauccucaaggggaucuacaacgucgcgaccugcggccuguucgggcugguguccuuccuccugcugugcggccgcagcugcuccacgaccuacaaggggguguacgagcuccagacccuggagcuggacauggccagccucaacaugaccaugccgcuguccugcacgaagaacaacagccaccacuacaucauggucggcaacgagaccggccuggagcucacccugaccaacacguccaucaucaaccacaaguucugcaaccugagcgacgcccacaagaagaaccucuacgaccacacccugauguccaucaucagcaccuuccaccuguccauccccaacuucaaccaguacgaggccaugagcugcgacuucaacgggggcaagaucuccgugcaguacaaccucagccacaccuacgccguggacgcggccaaccacugcgggacgaucgccaacggcguccugcagaccuucaugcggauggccuggggcggguccuacaucgcgcuggacagcggcugcgggaacugggacugcaucaugaccuccuaccaguaccucaucauccagaacaccacgugggaggaccacugccaguucagccgccccucccccaucggcuaccuggggcugcucagccagcggacccgcgacaucuacaucagccggcgccgccggggcaccuucaccuggacgcucuccgacagcgagggcaacgagacccccgggggcuacugccugacccgguggaugcugaucgaggccgagcucaagugcuucgggaacaccgccguggccaagugcaacgagaagcacgacgaggaguucugcgacaugcugcgccuguucgacuucaacaagcaggccaucucccggcucaagacgcccgcgcagaugagcauccagcugaucaacaaggccgugaacgcccugaucaacgaccagcucaucaugaagaaccaccuccgcgacaucaugugcauccccuacugcaacuacuccaaguacugguaccugaaccacaccgucaccgggaagaccagccugccccggugcuggcugguguccaacggcagcuaccugaacgagacgcacuucuccgacgacaucgagcagcaggccgacaacaugaucaccgagaugcuccagaaggaguacaucgaccgccagggcaagaccccgcuggggcugguggaccucuucgucuucagcaccuccuucuaccugaucagcaucuuccugcaccuggugaagaucccgacgcaccggcacgugaucggcaagcccugccccaagccccaccgccucaaccacauggggaucugcuccugcggccuguacaagcacccggggguccccgugaaguggaagcgguga

SEQ ID NO: 4133 - RNA, 1473 nt, Artificial Sequence
  derived and/or modified protein sequence (opt1) from LASV(Lassa virus/H.sapiens-wt/NGA/2015/ISTH_0831;Clade II)__AVO03545__GPCstabilized
augggccagaucgugaccuucuuccaggaggucccccacgugaucgaggagaucaugaacaucgugcugaucacccucagccugcuggccauccucaagggggucuacaaccuggccacgugcggccugaucgggcucaucaccuuccuguuccugugcggccgcuccugcagcaugaccuacaagggguccuaccagcucgagacccuggagcugaacauggagacgcucaacaugaccaugccgcugagcugcaccaagaacaccucccaccacuacauccgggugggcaacgagacgggccuggagcucacccugaccaacaccagcaucaucaaccacaaguucugcaaccuguccgacgcgcacaagaagaaccucuacgaccacagccugauguccaucgugagcacguuccaccuguccauccccaacuucaaccaguacgaggccaugagcugcgacuucaacgggggcaagaucuccauccaguacaaccucagccacgccuacgccggggacgccgcgaagcacugcggcacccuggccaacgggguccugcagaccuucaugcgcauggccuggggcggcuccuacaucgcccucgacagcgggugcggcaacugggacugcaucaugaccuccuaccaguaccugaucauccagaacacgaccugggacgaccacugccaguucagccgccccucccccaucggguaccugggccuccugagccagcggacccgcgagaucuacaucagccggcgccgccggggcaccuucacguggacccuguccgacagcgaggggaacgaggcgccgggcggguacugccugacccgguggaugcucaucgaggccgagcugaagugcuucggcaacaccgccguggccaagugcaacgagaagcacgacgaggaguucugcgacaugcugcgccucuucgacuucaacaagcaggccauccagcggcugaagacgcccgcgcagauguccauccagcugaucaacaaggccgugaacgcccucaucaacgaccagcugaucaugaagaaccaccuccgcgacaucaugugcauccccuacugcaacuacagcaaguacugguaccugaaccacaccaccaccggccggacgucccugccccgcugcuggcuggucagcaacggcuccuaccucaacgagacccacuucagcgacgacaucgagcagcaggccgacaacaugaucaccgagaugcugcagaaggaguacaucgaccggcaggggaagacgccccugggccucguggaccuguucguguucuccaccagcuucuaccugaucuccaucuuccugcaccucgucaagaucccgacccaccgccacaucgugggcaagagcugccccaagccccaccggcugaaccacauggggaucugcuccugcgggcuguacaagcagcccggcgugccgguccgcuggaagcgguga

SEQ ID NO: 4134 - RNA, 1473 nt, Artificial Sequence
  derived and/or modified protein sequence (opt1) from LASV(Lassa virus/H.sapiens-wt/NGA/2016/ISTH_0009;Clade II)__AVO03571__GPCstabilized
augggccagaucaucaccuucuuccaggaggugccccacgucaucgaggaggugaugaacaucgugcugaucgcccucagccugcuggccauccucaaggggaucuacaacgucgcgaccugcggccugcuggggcucguguccuuccugcugcucugcggccgcagcugcuccacgaccuacaaggggguguacgagcugcagacccuggagcucgacauggccagccugaacaugaccaugccgcuguccugcacgaagaacaacagccaccacuacaucauggucggcaacgagaccggccucgagcugacccugaccaacacguccaucaucaaccacaaguucugcaaccucagcgacgcccacaagaagaaccuguacgaccacgcccugauguccaucaucagcaccuuccaccucuccauccccaacuucaaccaguacgaggccaugagcugcgacuucaacgggggccggaucuccgugcaguacaaccugagccacuccuacgcgguggacgccgccaaccacugcgggaccaucgccaacggcguccugcagaccuucaugcgcauggcguggggcgggagcuacaucgcccucgacuccggcugcgggagcugggacugcaucaugacguccuaccaguaccugaucauccagaacaccaccugggaggaccacugccaguucagccggcccagccccaucggcuaccuggggcuccugucccagcgcacccgggacaucuacaucagccgccggcgccggggcacguucaccuggacccuguccgacagcgagggcaacgagacccccgggggcuacugccugacgcgcuggaugcucaucgaggccgagcugaagugcuucgggaacaccgccguggccaagugcaacgagaagcacgacgaggaguucugcgacaugcugcggcuguucgacuucaacaagcaggcgauccgccggcugaagacccccgcccagauguccauccagcugaucaacaaggccgugaacgcccucaucaacgaccagcugaucaugaagaaccaccuccgcgacaucaugugcaucccguacugcaacuacagcaaguacugguaccucaaccacaccgucacggggaagaccucccugccccggugcuggcuggugagcaacggcuccuaccucaacgagacccacuucagcgacgacaucgagcagcaggccgacaacaugaucaccgagcugcugcagaaggaguacaucgaccgccagggcaagacgccccucgggcugguggaccuguucgucuucuccaccagcuucuaccugaucuccaucuuccuccaccuggugaagaucccgacccaccggcacaucaccggcaagcccugccccaagccccaccgccugaaccacauggggaucugcagcugcggccucuacaaccacccgggggugcccgucaaguggaagcgguga

SEQ ID NO: 4135 - RNA, 1473 nt, Artificial Sequence
  derived and/or modified protein sequence (opt1) from LASV(Lassa virus/H.sapiens-wt/NGA/2016/ISTH_0017;Clade II)__AVO03567__GPCstabilized
augggccagaucaucaccuucuuccaggaggugccccacgucaucgaggaggugaugaacaucgugcugaucgcccucagccugcuggccauccucaaggggaucuacaacgucgcgaccugcggccuguucgggcugguguccuuccuccugcugugcggccgcagcugcuccacgaccuacaaggggguguacgagcuccagacccuggagcuggacauggccagccucaacaugaccaugccgcuguccugcacgaagaacaacagccaccacuacaucauggucggcaacgagaccggccuggagcucacccugaccaacacguccaucaucaaccacaaguucugcaaccugagcgacgcccacaagaagaaccucuacgaccacgcccugauguccaucaucagcaccuuccaccuguccauccccaacuucaaccaguacgaggccaugagcugcgacuucaacgggggcaagaucuccgugcaguacaaccucagccacaccuacgcgaucgacgccgccaaccacugcgggaccaucgccaacggcgugcugcagacguucaugcggauggcguggggcggguccuacaucgcccuggacagcggcugcggguccugggacugcaucaugaccagcuaccaguaccucaucauccagaacaccaccugggaggaccacugccaguucucccgccccagccccaucggcuaccuggggcugcucagccagcggacgcgcgacaucuacaucucccggcgccgccggggcaccuucaccuggacccucagcgacuccgagggcaacgagacgcccgggggcuacugccugacccgguggaugcugaucgaggccgagcucaagugcuucgggaacaccgccgucgccaagugcaacgagaagcacgacgaggaguucugcgacaugcugcgccuguucgacuucaacaagcaggcgauccggcgccucaagacccccgcccagaugagcauccagcugaucaacaaggccgugaacgcccugaucaacgaccagcucaucaugaagaaccaccuccgggacaucaugugcauccccuacugcaacuacuccaaguacugguaccugaaccacacggugaccgggaagaccagccugccccgcugcuggcuggucuccaacggcagcuaccugaacgagacccacuucuccgacgacaucgagcagcaggccgacaacaugaucacggagcuccugcagaaggaguacauggaccggcagggcaagaccccgcuggggcucguggaccuguucguguucagcaccuccuucuaccugaucagcaucuuccugcaccucguccgcaucccgacccaccggcacgugaucggcaagcccugccccaagccccaccgccugaaccacauggggaucugcuccugcggccuguacaagcacccgggggugcccgucaaguggaagcgguga

SEQ ID NO: 4136 - RNA, 1473 nt, Artificial Sequence
  derived and/or modified protein sequence (opt1) from LASV(Lassa virus/H.sapiens-wt/NGA/2016/ISTH_0035;Clade II)__AVO03619__GPCstabilized
augggccagaucaucaccuucuuccaggaggugccccacgucaucgaggaggugaugaacaucgugcugaucgcccucagccugcuggccauccucaaggggaucuacaacgucgcgaccugcggccuguucgggcugguguccuuccuccugcugugcggccgcagcugcuccaugacguacaaggggguguacgagcuccagacccuggagcuggacauggccagccucaacaugaccaugccgcuguccugcaccaagaacaacagccaccacuacaucauggucggcaacgagacgggccuggagcucacccugaccaacaccuccaucaucaaccacaaguucugcaaccugagcgacgcccacaagaagaaccucuacgaccacgcccugauguccaucaucagcacguuccaccuguccauccccaacuucaaccaguacgaggccaugagcugcgacuucaacgggggcaagaucuccgugcaguacaaccucagccacaccuacgcgguggacgccgccaaccacugcgggaccaucgccaacggcguccugcagaccuucaugcggauggcguggggcggguccuacaucgcccuggacagcggcugcggguccugggacugcaucaugacgagcuaccaguaccucaucauccagaacaccaccugggaggaccacugccaguucucccgccccagccccaucggcuaccuggggcugcucagccagcggacccgcgacaucuacaucucccggcgccgccggggcacguucaccuggacccucagcgacuccgagggcaacgagacccccgggggcuacugccugacgcgguggaugcugaucgaggccgagcucaagugcuucgggaacaccgccguggccaagugcaacgagaagcacgacgaggaguucugcgacaugcugcgccuguucgacuucaacaagcaggcgauccggcgccucaagacccccgcccagaugagcauccagcugaucaacaaggccgugaacgcccugaucaacgaccagcucaucaugaagaaccaccuccgggacaucaugugcaucccguacugcaacuacuccaaguacugguaccugaaccacaccaucacggggaagaccagccugccccgcugcuggcuggucuccaacggcagcuaccugaacgagacccacuucuccgacgacaucgagcagcaggccgacaacaugaucaccgagcuccugcagaaggaguacauggaccggcagggcaagacgccccuggggcucguggaccuguucguguucagcaccuccuucuaccugaucagcaucuuccugcaccucgucaagaucccgacccaccgccacgugaucggcaagcccugccccaagccccaccggcugaaccacauggggaucugcuccugcggccuguacaagcacccgggggugcccgucaaguggaagcgcuga

SEQ ID NO: 4137 - RNA, 1473 nt, Artificial Sequence
  derived and/or modified protein sequence (opt1) from LASV(Lassa virus/H.sapiens-wt/NGA/2016/ISTH_0104;Clade II)__AVO03631__GPCstabilized
augggccaggugaucaccuucuuccaggaggucccccacgugaucgaggaggugaugaacaucguccugaucgcccucagccugcuggccauccucaaggggaucuacaacguggcgaccugcggccuguucgggcugaucuccuuccuccugcugugcggccgcagcugcuccacgaccuacaaggggguguacgagcuccagacccuggagcugaacaugcagaaccucaacaugaccaugccgcugagcugcacgaagaacuccagccaccacuacaucauggucggcaacgagaccggccuggagcucacccugaccaacacguccaucaucaaccacaaguucugcaaccugagcgacgcccacaagaagaaccucuacgaccacgcccugauguccaucaucagcaccuuccaccuguccauccccaacuucaaccaguacgaggccaugagcugcgacuucaacgggggcaagaucuccgugcaguacaaccucagccacaccuacgccaucgacgcggccaaccacugcgggaccguggccaacggcguccugcagacguucaugcggauggccuggggcggguccuacaucgcgcuggacagcggcugcgggaacugggacugcaucaugaccuccuaccaguaccucaucauccagaacaccaccugggaggaccacugccaguucagccggcccucccccaucggcuaccuggggcugcucagccagcgcacgcgggacaucuacaucagccgccggcgccggggcaccuucaccuggacccucuccgacagcgagggcaacgaggcccccgggggcuacugccugacgcgcuggaugcugaucgaggccgagcucaagugcuucgggaacaccgccguggccaagugcaacgagaagcacgacgaggaguucugcgacaugcugcggcuguucgacuucaacaagcaggcgaucaagcgccucaagacccccgcccagauguccauccagcugaucaacaaggccgugaacgcccugaucaacgaccagcucaucaugaagaaccaccuccgggacaucaugugcaucccguacugcaacuacagcaaguacugguaccugaaccacaccgucacggggcgcaccucccugccccggugcuggcuggugagcaacggcuccuaccugaacgacacccaguucagcgacgacaucgagcagcaggccgacaacaugaucaccgagaugcuccagaaggaguacauggaccgccagggcaagacgccccuggggcugguggaccucuucgucuucuccaccagcuucuaccugaucuccaucuuccugcaccuggugaagaucccgacccaccggcacaucgugggccgccccugccccaagccccaccggcucaaccacauggggaucugcagcugcggccuguacaagcacccggggguccccgugaaguggaagcgcuga

SEQ ID NO: 4138 - RNA, 1476 nt, Artificial Sequence
  derived and/or modified protein sequence (opt1) from LASV(Lassa virus/H.sapiens-wt/NGA/2016/ISTH_0133;Clade II)__AVO03635__GPCstabilized
augggccagaucaucaccuucuuccaggaggugccccacgucaucgaggaggugaugaacaucgugcugaucgcccucagccugcuggccguccucaaggcgaucuacaacguggcgaccugcgggguguucggccugaucuccuuccugcuccugugcgggcgcagcugcuccacgaccuacaagggcgucuacgagcugcagacccucgagcuggacauggccaaccugaacaugaccaugccgcucagcugcacgaagaacaacucccaccacuacaucaugguggggaacgagaccggccuggagcugacccucaccaacacgagcaucaucaaccacaaguucugcaaccuguccgacgcccacaagaagaaccuguacgaccacagccucauguccaucaucagcaccuuccaccuguccauccccaacuucaaccaguacgaggccaugagcugcgacuucaacggcgggaagaucuccgugcaguacaaccugagccacuccuacgccgucgacgccgccaagcacugcggcaccaucgccaacggggugcuccagaccuucaugcggauggcguggggcgggagcuacaucgcccuggacuccggcaagugcgggugggacugcaucaugacgagcuaccaguaccugaucauccagaacaccaccugggaggaccacugccaguucucccgccccagccccaucggcuaccucgggcugcugagccagcggacccgcgacaucuacaucucccggcgccuccgccggacguucaccuggacccugagcgacuccgagggcaacgacgcccccgggggcuacugccucacccgguggaugcugaucgaggccgagcugaagugcuucgggaacacggccaucgcgaagugcaacgagaagcacgacgaggaguucugcgacaugcuccgccuguucgacuucaaccggcaggccaucaagcgccugaagaccgagccccagaugagcauccagcucaucaacaaggccgugaacgcccugaucaacgaccagcugaucaugaagaaccaccuccgggacaucaugggcugccccuacugcaacuacuccaaguacugguaccugaaccacaccaucaccgggaagacgagccugccccgcugcuggcucgucuccaacggcagcuaccugaacgagacccacuucuccgacgacaucgagcagcaggcggacaacaugaucaccgagcugcuccagaaggaguacauggaccggcagggcaagaccccgcuggggcugguggaccucuucguguucagcacguccuucuaccugaucagcaucuuccugcaccuggucaagaucccgacccaccgccacaucgugggcaagcccugccccaagccccaccggcucaaccacauggggaucugcuccugcggccuguacaagcacccgggggugcccgucaaguggaagcgccaguga

SEQ ID NO: 4139 - RNA, 1473 nt, Artificial Sequence
  derived and/or modified protein sequence (opt1) from LASV(Lassa virus/H.sapiens-wt/NGA/2016/ISTH_0141;Clade II)__AVO03649__GPCstabilized
augggccagaucaucaccuucuuccaggaggugccccacgucaucgaggaggugaugaacaucgugcugaucacccucagccugcuggccauccucaaggggaucuacaacgucgccacgugcggccuguucgggcugguguccuuccuccugcugugcggccgcagcugcuccaccaucuacaaggggguguacgagcuccagacccuggagcuggacauggcgagccucaacaugaccaugccgcuguccugcacgaagaacaacagccaccacuacaucauggucggcaacgagaccggccuggagcucacccugaccaacacguccaucaucaaccacaaguucugcaaccugagcgacgcccacaagaagaaccucuacgaccacgcccugauguccaucaucagcaccuuccaccuguccauccccaacuucaaccaguacgaggccaugagcugcgacuucaacgggggcaagaucuccgugcaguacaaccucagccacaccuacgccguggacgcggccgagcacugcgggaccaucgccaacggcguccugcagacguucaugcggauggccuggggcggguccuacaucgcgcuggacagcggcugcggguccugggacugcaucaugaccagcuaccaguaccucaucauccagaacaccaccugggaggaccacugccaguucucccgccccagccccaucggcuaccuggggcugcucagccagcggacgcgcgacaucuacaucucccggcgccgccggggcaccuucaccuggacccucagcgacuccgagggcaacgagacgcccgggggcuacugccugacccgguggaugcugaucgaggccgagcucaagugcuucgggaacaccgccguggccaagugcaacgagaagcacgacgaggaguucugcgacaugcugcgccuguucgacuucaacaagcaggccauccggcgccucaagacccccgcgcagaugagcauccagcugaucaacaaggccgugaacgcccugaucaacgaccagcucaucaugaagaaccaccuccgggacaucaugugcauccccuacugcaacuacuccaaguacugguaccugaaccacacggucaccgggaagaccagccugccccgcugcuggcugguguccaacggcagcuaccugaacgagacccgguucuccgacgacaucgagcagcaggccgacaacaugaucacggagcuccugcagaaggaguacaucgaccgccagggcaagaccccgcuggggcucguggaccuguucgucuucagcaccuccuucuaccugaucagcaucuuccugcaccucgugaagaucccgacccaccggcacaucaucggcaagcccugccccaagccccaccgccugaaccacauggggaucugcuccugcggccuguacaagcacccggggauccccgugaaguggaagcgguga

SEQ ID NO: 4140 - RNA, 1473 nt, Artificial Sequence
  derived and/or modified protein sequence (opt1) from LASV(Lassa virus/H.sapiens-wt/NGA/2016/ISTH_0146;Clade II)__AVO03633__GPCstabilized
augggccagaucaucaccuucuuccaggaggugccccacgucaucgaggaggugaugaacaucgugcugaucgcccucagccugcuggccauccucaaggggaucuacaacgucgcgaccugcggccuguucgggcugguguccuuccuccugcugugcggccgcagcugcuccacgaccuacaaggggguguacgagcuccagacccuggagcuggacauggccagccucaacaugaccaugccgcuguccugcacgaagaacaacagccaccacuacaucauggucggcaacgagaccggccuggagcucacccugaccaacacguccaucaucaaccacaaguucugcaaccugagcgacgcccacaagaagaaccucuacgaccacgcccugauguccaucaucagcaccuuccaccuguccauccccaacuucaaccaguacgaggccaugagcugcgacuucaacgggggcaagaucuccgugcaguacaaccucagccacaccuacgcgguggacgccgccaaccacugcgggaccaucgccaacggcguccugcagacguucaugcggauggcguggggcggguccuacaucgcccuggacagcggcugcggguccugggacugcaucaugaccagcuaccaguaccucaucauccagaacaccaccugggaggaccacugccaguucucccgccccagccccaucggcuaccuggggcugcucagccagcggacgcgcgacaucuacaucucccggcgccgccggggcaccuucaccuggacccucagcgacuccgagggcaacgagacgcccgggggcuacugccugacccgguggaugcugaucgaggccgagcucaagugcuucgggaacaccgccguggccaagugcaacgagaagcacgacgaggaguucugcgacaugcugcgccuguucgacuucaacaagcaggcgauccggcgccucaagacccccgcccagaugagcauccagcugaucaacaaggccgugaacgcccugaucaacgaccagcucaucaugaagaaccaccuccgggacaucaugugcauccccuacugcaacuacuccaaguacugguaccugaaccacacggucaccgggaagaccagccugccccgcugcuggcugguguccaacggcagcuaccugaacgagacccacuucuccgacgacaucgagcagcaggccgacaacaugaucacggagcuccugcagaaggaguacauggaccggcagggcaagaccccgcuggggcucguggaccuguucgucuucagcaccuccuucuaccugaucagcaucuuccugcaccucgugaagaucccgacccaccgccacgugaucggcaagcccugccccaagccccaccggcugaaccacauggggaucugcuccugcggccuguacaagcacccggggguccccgugaaguggaagcgcuga

SEQ ID NO: 4141 - RNA, 1473 nt, Artificial Sequence
  derived and/or modified protein sequence (opt1) from LASV(Lassa virus/H.sapiens-wt/NGA/2016/ISTH_0187;Clade II)__AVO03549__GPCstabilized
augggccagaucgugaccuucuuccaggaggucccccacgugaucgaggaggugaugaacaucguccugaucgcccucagcgugcuggccauccugaaggggcucuacaacuucgcgaccugcggccugaucgggcuggugacguuccuccugcuguccggccgcagcugcuccauggucuacaaggggguguacgagcuccagacccuggagcugaacauggagacccucaacaugaccaugccgcugagcugcacgaagaacaacucccaccacuacauccgggugggcaacgacaccggccuggagcucacccugaccaacaacacgcugcucaaccacaaguucugcaaccugagcgacgcccacaagaagaaccuguacgaccacgcccucauguccaucaucagcaccuuccaccuguccauccccaacuucaaccaguacgaggccaugagcugcgacuucaacgggggccgcaucaccguccaguacaaccugucccacagcuacgccguggacgcggccaaccacugcgggaccguggccaacggcguccuccagacguucaugcggauggccuggggcggguccuacaucgcgcuggacagccgcugcggcaacugggacugcaucaugaccuccuaccaguaccugaucauccagaacaccaccugggaggaccacugccaguucagccggcccucccccaucggguaccucggccugcugagccagcgcacgcgggacaucuacaucucccgccggcgccgggggaccuucaccuggacccugagcgacagcgagggcaacgagacgccgggcggguacugccucacccgcuggaugcugaucgaggccgagcugaagugcuucggcaacaccgccguggccaagugcaacgagaagcacgacgaggaguucugcgacaugcuccggcuguucgacuucaacaagcaggccauccgccggcugaaggcgcccgcccagauguccauccagcucaucaacaaggccgugaacgcccugaucaacgaccagcugaucaugaagaaccaccuccgcgacaucaugugcauccccuacugcaacuacagcaaguacugguaccugaaccacaccuccacgggcaagaccagccugccccggugcuggcucgucuccaacgggagcuaccugaacgagacccacuucuccgacgacaucgagcagcaggccgacaacaugaucaccgagaugcugcagaaggaguaccucgaccgccagggcaagacgccccugggccugguggacaucuucguguucagcaccuccuucuaccugaucagcaucuuccuccaccugaucaagaucccgacccaccggcacaucgucgggaagcccugccccaagccccaccgccugaaccacaugggcaucugcuccugcgggcucuacaagcagccgggcgugcccgugcgguggaagcgcuga

SEQ ID NO: 4142 - RNA, 1473 nt, Artificial Sequence
  derived and/or modified protein sequence (opt1) from LASV(Lassa virus/H.sapiens-wt/NGA/2016/ISTH_0199;Clade II)__AVO03653__GPCstabilized
augggccagaucaucaccuucuuccaggaggugccccacgucaucgaggaggugaugaacaucgugcugaucgcccucagccugcuggccauccucaaggggaucuacaacgucgcgaccugcggccuguucgggcugguguccuuccuccugcugugcggccgcagcugcuccacgaccuacaaggggguguacgagcuccagacccuggagcuggacauggccagccucaacaugaccaugccgcuguccugcacgaagaacaacagccaccacuacaucauggucggcaacgagaccggccuggagcucacccugaccaacacguccaucaucaaccacaaguucugcaaccugagcgacgcccacaagaagaaccucuacgaccacgcccugauguccaucaucagcaccuuccaccuguccauccccaacuucaaccaguacgaggccaugagcugcgacuucaacgggggcaagaucuccgugcaguacaaccucagccacaccuacgcgguggacgccgccaaccacugcgggaccaucgccaacggcguccugcagacguucaugcggauggcguggggcggguccuacaucgcccuggacagcggcugcgggaacugggacugcaucaugaccuccuaccaguaccucaucauccagaacaccaccugggaggaccacugccaguucagccgccccucccccaucggcuaccuggggcugcucagccagcggacgcgcgacaucuacaucagccggcgccgccggggcaccuucaccuggacccucuccgacagcgagggcaacgagacgcccgggggcuacugccugacccgguggaugcugaucgaggccgagcucaagugcuucgggaacaccgccguggccaagugcaacgagaagcacgacgaggaguucugcgacaugcugcgccuguucgacuucaacaagcaggcgaucucccggcucaagacccccgcccagaugagcauccagcugaucaacaaggccgugaacgcccugaucaacgaccagcucaucaugaagaaccaccuccgcgacaucaugugcauccccuacugcaacuacuccaaguacugguaccugaaccacacggucaccgggaagaccagccugccccggugcuggcugguguccaacggcagcuaccugaacgagacccacuucuccgacgacaucgagcagcaggccgacaacaugaucacggagaugcuccagaaggaguacaucgaccgccagggcaagaccccgcuggggcugguggaccucuucgucuucagcaccuccuucuaccugaucagcaucuuccugcaccuggugaagaucccgacccaccggcacgugaucggcaagcccugccccaagccccaccgccucaaccacauggggaucugcuccugcggccuguacaagcacccggggguccccgugaaguggaagcgguga

SEQ ID NO: 4143 - RNA, 1473 nt, Artificial Sequence
  derived and/or modified protein sequence (opt1) from LASV(Lassa virus/H.sapiens-wt/NGA/2016/ISTH_0419;Clade II)__AVO03539__GPCstabilized
augggccagaucgugaccuucuuccaggaggucccccacgugaucgaggaggugaugaacaucguccugaucgcccucagccugcuggccauccucaaggggaucuacaacuucgcgaccugcggccugaucgggcugaucacguuccucuuccugugcggccgcuccugcagcgccaucuacaagggguccuaccagcugcagaccaucgagcucaacauggagacccugaacaugaccaugccgcugagcugcacgaagaacuccagccaccacuacauccgggugggcaacgagaccggccucgagcugacccugaccaacaucuccaucaucgaccacaaguucugcaaccucagcgacgcccacaagaagaaccuguacgaccacgcccugauguccaucaucagcacguuccaccucuccauccccaacuucaaccaguacgaggccaugagcugcgacuucaacgggggcaagaucuccgugcaguacaaccugagccacaccuacgcggucgacgccgccaaccacugcgggaccguggccaacggcgugcugcagaccuucaugcgcauggcguggggcggguccuacaucgcccucgacagcggcugcgggaacugggacugcaucaugacguccuaccaguaccugaucauccagaacaccaccugggaggaccacugccaguucagccgccccucccccaucggcuaccuggggcuccugagccagcggacccgcgacaucuacaucagccggcgccgccggggcacguucaccuggacccuguccgacagcgagggcaaggagacccccgggggcuacugccugacgcgguggaugcucaucgaggccgagcugaagugcuucgggaacaccgccgucgccaagugcaacgagaagcacgacgaggaguucugcgacaugcugcgccucuucgacuucaacaagcaggcgauccagcggcugaaggcccccgcccagauguccauccagcugaucaacaaggccgugaacgcccucaucaacgaccagcugaucaugaagaaccaccuccgcgacaucaugugcauccccuacugcaacuacagcaaguacugguaccugaaccacaccuccaccgggcggacgagccugccccgcugcuggcugguguccaacggcagcuaccucaacgagacccacuucuccgacgacaucgagcagcaggcggacaacaugaucaccgagaugcugcagaaggaguacaucgaccggcagggcaagaccccgcuggggcucgucgaccuguucguguucagcacguccuucuaccugaucagcaucuuccuccaccugaucaagaucccgacccaccgccacaucgugggcaaguccugccccaagccccaccggcugaaccacauggggaucugcagcugcggccuguacaagcagcccggggucccggugaaguggaagcgcuga

SEQ ID NO: 4144 - RNA, 1473 nt, Artificial Sequence
  derived and/or modified protein sequence (opt1) from LASV(Lassa virus/H.sapiens-wt/NGA/2016/ISTH_0447;Clade II)__AVO03559__GPCstabilized
augggccagaucaucaccuucuuccaggaggugccccacgucaucgaggaggugaugaacaucgugcugaucgcccucagccugcuggccauccucaaggggaucuacaacaucgcgaccugcggccuguucgggcuggucuccuuccuccugcugugcggccgcagcugcuccacgaccuacaaggggguguacgagcuccagacccuggagcuggacauggccagccucaacaugaccaugccgcuguccugcacgaagaacaacagccaccacuacaucauggugggcaacgagaccggccuggagcucacccugaccaacacguccaucaucaaccacaaguucugcaaccugagcgacgcccacaagaagaaccucuacgaccacacccugauguccaucaucagcaccuuccaccuguccauccccaacuucaaccaguacgaggccaugagcugcgacuucaacgggggcaagaucuccguccaguacaaccucagccacgccuacgcgguggacgccgccaaccacugcgggaccaucgccaacggcgugcugcagacguucaugcggauggcguggggcggguccuacaucgcccuggacagcggcugcgggaacugggacugcaucaugaccuccuaccaguaccucaucauccagaacaccaccugggaggaccacugccaguucagccgccccucccccaucggcuaccuggggcugcucagccagcggacgcgcgacaucuacaucagccggcgccgccggggcaccuucaccuggacccucuccgacagcgagggcaacgagacgcccgggggcuacugccugacccgguggaugcugaucgaggccgagcucaagugcuucgggaacaccgccgucgccaagugcaacgagaagcacgacgaggaguucugcgacaugcugcgccuguucgacuucaacaagcaggcgauccggcgccucaagacccccgcccagauguccauccagcugaucaacaaggccgugaacgcccugaucaacgaccagcucaucaugaagaaccaccuccgggacaucaugugcauccccuacugcaacuacagcaaguacugguaccugaaccacacggugaccgggaagaccucccugccccgcugcuggcuggucagcaacggcuccuaccugaacgagacccacuucagcgacgacaucgagcagcaggccgacaacaugaucacggagcuccugcagaaggaguacaucgaccggcagggcaagaccccgcuggggcucguggaccuguucguguucuccaccagcuucuaccugaucuccaucuuccugcaccucgucaagaucccgacccaccgccacguggugggcaagcccugccccaagccccaccggcugaaccacauggggaucugcagcugcggccuguacaagcacccggggguccccgugaaguggaagcgcuga

SEQ ID NO: 4145 - RNA, 1473 nt, Artificial Sequence
  derived and/or modified protein sequence (opt1) from LASV(Lassa virus/H.sapiens-wt/NGA/2016/ISTH_0543;Clade II)__AVO03595__GPCstabilized
augggccagaucaucaccuucuuccaggaggugccccacgucaucgaggaggugaugaacaucgugcugaucgcccucagccugcuggccauccucaaggggaucuacaacaucgcgaccugcggccuguucgggcugaucuccuuccuccugcugugcggccgcagcugcuccacgaccuacaagggggucuacgagcuccagacccuggagcuggacauggccaaccucaacaugaccaugccgcugagcugcacgaagaacaacucccaccacuacaucauggugggcaacgagaccggccuggagcucacccugaccaacacgagcaucaucaaccacaaguucugcaaccuguccgacgcccacaagaagaaccucuacgaccacgcccugaugagcaucaucuccaccuuccaccugagcauccccaacuucaaccaguacgaggccauguccugcgacuucaacgggggcaagaucagcgugcaguacaaccucucccacagcuacgcggucgacgccgccgggcacugcggcaccaucgccaacggggugcugcagaccuucaugcggauggcguggggcggcuccuacaucgcccuggacagcgggugcggcaacugggacugcaucaugacguccuaccaguaccucgugauccagaacaccaccugggaggaccacugccaguucagccgccccucccccaucggguaccugggccugcucagccagcggacccgcgacaucuacaucagccggcgccgccggggcacguucaccuggacccucuccgacagcgaggggaacgaggccccgggcggguacugccugacccgguggaugcugaucgaggccgagcucaagugcuucggcaacacggccaucgcgaagugcaacgagaagcacgacgaggaguucugcgacaugcugcgccuguucgacuucaacaagcaggccauccggcgccucaaggcccccgcccagauguccauccagcugaucaacaaggccgucaacgcgcugaucaacgaccagcucaucaugaagaaccaccuccgggacaucaugugcauccccuacugcaacuacagcaaguacugguaccugaaccacaccgugaccggcaagaccucccugcccaagugcuggcuggugagcaacggcuccuaccugaacgagacgcacuucagcgacgacaucgagcagcaggccgacaacaugaucaccgagcuccugcagaaggaguacauggaccgccaggggaagacgccccugggccucgucgaccuguucguguucuccaccagcuucuaccugaucuccaucuuccugcaccucgugaagaucccgacccaccggcacaucgucgggcgccccugccccaagccccaccggcugaaccacaugggcaucugcagcugcgggcuguacaagcacccgggcgugcccgugaaguggaagcgcuga

SEQ ID NO: 4146 - RNA, 1473 nt, Artificial Sequence
  derived and/or modified protein sequence (opt1) from LASV(Lassa virus/H.sapiens-wt/NGA/2016/ISTH_0565;Clade II)__AVO03637__GPCstabilized
augggccagaucgugaccuucuuccaggaggucccccacgugaucgaggaggugaugaacaucguccugaucgcccucagccugcuggccauccucaaggggaucuacaacguggcgaccugcggccuguucgggcugaucuccuuccuccugcugugcggccgcagcugcuccacgaccuacaaggggguguacgagcuccagacccuggagcuggacauggccaaccucaacaugaccaugccgcugagcugcacgaagaacuccagccaccacuacaucauggucggcaacgagaccggccuggagcucacccugaccaacacguccaucaucaaccacaaguucugcaaccugagcgacgcccacaagaagaaccucuacgaccacgcccugauguccaucaucagcaccuuccaccuguccauccccaacuucaaccaguacgaggccaugagcugcgacuucaacgggggcaagaucuccgugcaguacaaccucagccacaccuacgcgguggacgccgccaaccacugcgggaccaucgccaacggcguccugcagacguucaugcggauggcguggggcggguccuacaucgcccuggacagcggcugcgggaacugggacugcaucaugaccuccuaccaguaccucaucauccagaacaccaccugggaggaccacugccaguucagccgccccucccccaucggcuaccuggggcugcucagccagcggacgcgcgacaucuacaucagccggcgccgccggggcaccuucaccuggacccucuccgacagcgagggcaacgaggcccccgggggcuacugccugacgcgguggaugcugaucgaggccgagcucaagugcuucgggaacaccgccaucgcgaagugcaacgagaagcacgacgaggaguucugcgacaugcugcgccuguucgacuucaacaagcaggccaucaagcggcucaagucccccgcccagaugagcauccagcugaucaacaaggccgugaacgcccugaucaacgaccagcucaucaugaagaaccaccuccgcgacaucaugugcauccccuacugcaacuacucccgguacugguaccugaaccacaccgugaccgggaagacgagccugccccgcugcuggcugaucuccaacggcagcuaccugaacgagacccacuucuccgacgacaucgagcagcaggcggacaacaugaucaccgagcuccugcagaaggaguacauggaccggcagggcaagaccccgcuggggcucgucgaccuguucguguucagcacguccuucuaccugaucagcaucuuccugcaccucgugaagaucccgacccaccgccacaucgucggccggcccugccccaagccccaccgccugaaccacauggggaucugcuccugcggccuguacaagcacccgggggugcccgugaaguggaagcgguga

SEQ ID NO: 4147 - RNA, 1473 nt, Artificial Sequence
  derived and/or modified protein sequence (opt1) from LASV(Lassa virus/H.sapiens-wt/NGA/2016/ISTH_0572;Clade II)__AVO03611__GPCstabilized
augggccagaucaucaccuucuuccaggaggugccccacgucaucgaggaggugaugaacaucgugcugaucgcccucagccugcuggccauccucaaggggaucuacaacgucgcgaccugcggccuguucgggcugguggccuuccuccugcugugcggccgcuccugcagcacgaccuacaaggggguguacgagcuccagacccuggagcuggacauggccucccucaacaugaccaugccgcugagcugcacgaagaacaacucccaccacuacaucauggucggcaacgagaccggccuggagcucacccugaccaacacgagcaucaucaaccacaaguucugcaaccuguccgacgcccacaagaagaaccucuacgaccacgcccugaugagcaucaucuccaccuuccaccugagcauccccaacuucaaccagcacgaggcgauguccugcgacuucaacgggggcaagaucagcgugcaguacaaccucucccacaccuacgccguggacgccgccaaccacugcgggaccaucgcgaacggcguccugcagacguucaugcggauggccuggggcgggagcuacaucgcccuggacuccggcugcgggagcugggacugcaucaugaccuccuaccaguaccucaucauccagaacaccaccugggaggaccacugccaguucagccgccccucccccaucggcuaccuggggcugcucagccagcggacgcgcgacaucuacaucagccggcgccgccggggcaccuucaccuggacccucuccgacagcgagggcaacgagacgcccgggggcuacugccugacccgguggaugcugaucgaggccgagcucaagugcuucgggaacaccgccguggcgaagugcaacgagaagcacgacgaggaguucugcgacaugcugcgccuguucgacuucaacaagcaggccauccggcgccucaagacccccgcccagauguccauccagcugaucaacaaggccgugaacgcccugaucaacgaccagcucaucaugaagaaccaccuccgggacaucaugugcauccccuacugcaacuacagcaaguacugguaccugaaccacacggucaccgggcgcaccucccugccccggugcuggcuggugagcaacggcuccuaccugaacgagacccacuucagcgacgacaucgagcagcaggcggacaacaugaucacggagcuccugcagaaggaguacauggaccgccagggcaagaccccgcuggggcucguggaccuguucgucuucuccaccagcuucuaccugaucuccaucuuccugcaccucaucaagaucccgacccaccggcacgugaucggcaagcccugccccaagccccaccgccugaaccacauggggaucugcagcugcggccuguacaagcacccgggggugcccgucaaguggaagcgguga

SEQ ID NO: 4148 - RNA, 1473 nt, Artificial Sequence
  derived and/or modified protein sequence (opt1) from LASV(Lassa virus/H.sapiens-wt/NGA/2016/ISTH_0610;Clade II)__AVO03585__GPCstabilized
augggccagaucaucaccuucuuccaggaggugccccacgucaucgaggaggugaugaacaucgugcugaucgcccucagccugcuggccauccucaagggggucuacaacguggcgaccugcggccuguucgggcugguguccuuccuccugcugugcggccgcagcugcuccacgaccuacaagggggucuacgagcuccagacccuggagcuggacauggccagccucaacaugaccaugccgcuguccugcacgaagaacaacagccaccacuacaucauggugggcaacgagaccggccuggagcucacccugaccaacacguccaucaucaaccacaaguucugcaaccugagcgacgcccacaagaagaaccucuacgaccacgcccugauguccaucaucagcaccuuccaccuguccauccccaacuucaaccaguacgaggccaugagcugcgacuucaacgggggcaagaucuccgugcaguacaaccucagccacaccuacgcggucgacgccgccaaccacugcgggaccaucgccaacggcgugcugcagacguucaugcggauggcguggggcggguccuacaucgcccuggacagcggcugcggguccugggacugcaucaugaccagcuaccaguaccucaucauccagaacaccaccugggaggaccacugccaguucucccggcccagccccaucggcuaccuggggcugcucagccagcgcacgcgggacaucuacaucucccgccggcgccggggcaccuucaccuggacccucagcgacuccgagggcaacgagacgcccgggggcuacugccugacccgcuggaugcugaucgaggccgagcucaagugcuucgggaacaccgccguggccaagugcaacgagaagcacgacgaggaguucugcgacaugcugcggcuguucgacuucaacaagcaggcgauccgccggcucaaggcccccgcccagaugagcauccagcugaucaacaaggccgucaacgcccugaucaacgaccagcucaucaugaagaaccaccuccgcgacaucaugugcaucccguacugcaacuacuccaaguacugguaccugaaccacaccgugacggggcggaccagccugccccgcugcuggcugguguccaacggcagcuaccugaacgagacccacuucuccgacgacaucgagcagcaggcggacaacaugaucaccgagcuccugcagaaggaguacaucgaccggcagggcaagacgccccuggggcucgucgaccuguucguguucagcaccuccuucuaccugaucagcaucuuccugcaccucgugaagaucccgacccaccgccacaucaucggcaagcccugccccaagccccaccggcugaaccacauggggaucugcuccugcggccuguacaagcacccggggguccccgugaaguggaagcgcuga

SEQ ID NO: 4149 - RNA, 1473 nt, Artificial Sequence
  derived and/or modified protein sequence (opt1) from LASV(Lassa virus/H.sapiens-wt/NGA/2016/ISTH_0621;Clade II)__AVO03543__GPCstabilized
augggccagaucgugaccuucuuccaggagaucccccacgucguggaggagaucaugaacaucgugcugaucacccucagccugcuggccauccucaaggggcuguacaacuucgccacgugcggccugaucgggcucaucaccuuccuguuccugugcggccgcuccugcagcaccaucuacaagggguccuaccagcuccaggcgcuggagcugaacauggagacccucaacaugacgaugccgcugagcugcaccaagaacaacucccaccacuacauccgggucggcaacgagaccggccuggagcucacccugacgaacaccagcaucaucgaccacaaguucugcaaccuguccgacgcccacaagcgcaaccucuacgaccacacccugaugagcaucaucuccaccuuccaccugagcauccccaacuucaaccaguacgaggccauguccugcgacuucaacgggggcaagaucagcgugcaguacaaccucucccacagcuacgccggggacgccgcgcggcacugcggcacgguggccaacgggguccugcagaccuucaugcgcauggccuggggcggcuccuacaucgcccuggacagcgggugcggcaacugggacugcaucaugaccuccuaccaguaccucaucauccagaacaccacgugggagaaccacugccaguucagccggcccucccccaucggguaccugggccugcucagccagcgcacccgggacaucuacaucagccgccggcgccggggcaccuucaccuggacgcucuccgacagcgaggggaaggagaccccgggcggguacugccugacccgcuggaugcugaucgaggcggagcucaagugcuucggcaacaccgccguggccaagugcaacgagaagcacgacgaggaguucugcgacaugcugcggcuguucgacuucaacaagcaggccauccagcgccucaagacgcccgcccagauguccauccagcugaucaacaaggcggugaacgcccugaucaacgaccagcucaucaugaagaaccaccuccgggacaucaugugcauccccuacugcaacuacagcaaguacugguaccugaaccacaccaccaccggcaagacgucccugcccaagugcuggcuggucagcaacggcuccuaccugaacgagacccacuucagcgacgacaucgagcagcaggccgacaacaugaucaccgagaugcuccagaaggaguacaucgaccgccaggggaagacgccccugggccugguggaccucuucguguucuccaccagcuucuaccugaucuccaucuuccugcaccugaucaagaucccgacccaccggcacaucgucggcaagagcugccccaagccccaccgccucaaccacauggggaucugcuccugcgggcuguacaagcagcccggcgugcuggugaaguggaagcgguga

SEQ ID NO: 4150 - RNA, 1473 nt, Artificial Sequence
  derived and/or modified protein sequence (opt1) from LASV(Lassa virus/H.sapiens-wt/NGA/2016/ISTH_0701;Clade II)__AVO03629__GPCstabilized
augggccagaucaucaccuucuuccaggaggugccccacgucaucgaggaggugaugaacaucgugcugaucgcccucagccugcuggccauccucaaggggaucuacaacgucgcgaccugcggccuguucgggcugguguccuuccuccugcugugcggccgcagcugcuccacgaccuacaaggggguguacgagcuccagacccuggagcuggacauggccagccucaacaugaccaugccgcuguccugcacgaagaacaacagccaccacuacaucauggucggcaacgagaccggccuggagcucacccugaccaacacguccaucaucgggcacaaguucugcaaccugagcgacgcccacaagaagaaccucuacgaccacgcccugauguccaucaucagcaccuuccaccuguccauccccaacuucaaccaguacgaggccaugagcugcgacuucaacggcgggaagaucuccgugcaguacaaccucagccacgcguacgccguggacgccgccaaccacugcggcaccaucgcgaacgggguccugcagaccuucaugcggauggccuggggcggcuccuacaucgcccuggacagcgggugcggcuccugggacugcaucaugacgagcuaccaguaccucaucauccagaacaccaccugggaggaccacugccaguucucccgccccagccccaucggguaccugggccugcucagccagcggacccgcgacaucuacaucucccggcgccgccggggcacguucaccuggacccucagcgacuccgaggggaacgagaccccgggcggguacugccugacgcgguggaugcugaucgaggccgagcucaagugcuucggcaacaccgccguggcgaagugcaacgagaagcacgacgaggaguucugcgacaugcugcgccuguucgacuucaacaagcaggccauccggcgccucaagacccccgcccagaugagcauccagcugaucaacaaggccgugaacgcccugaucaacgaccagcucaucaugaagaaccaccuccgggacaucaugugcauccccuacugcaacuacuccaaguacugguaccugaaccacaccgucacgggcaagaccagccugccccgcugcuggcugguguccaacggcagcuaccugaacgagacccacuucuccgacgacaucgagcagcaggcggacaacaugaucaccgagcuccugcagaaggaguacaucgaccggcaggggaagacgccccugggccucguggaccuguucgucuucagcaccuccuucuaccugaucagcaucuuccugcaccucgugaagaucccgacccaccgccacgugaucgggaagcccugccccaagccccaccggcugaaccacaugggcaucugcuccugcgggcuguacaagcacccgggcguccccgugaaguggaagcgcuga

SEQ ID NO: 4151 - RNA, 1473 nt, Artificial Sequence
  derived and/or modified protein sequence (opt1) from LASV(Lassa virus/H.sapiens-wt/NGA/2016/ISTH_0702;Clade II)__AVO03557__GPCstabilized
augggccagaucaucaccuucuuccaggaggugccccacgucaucgaggaggugaugaacaucgugcugaucgcccucagccugcuggccguccucaaggggaucuacaacguggcgaccugcggccuguucgggcugguggccuuccuccugcugugcggccgcuccugcagcacgaccuacaagggggucuacgagcuccagacccuggagcuggacauggccaaccucaacaugaccaugccgcuguccugcacgaagaacaacagccaccacuacaucauggugggcaacgagaccggccuggagcucacccugaccaacacguccaucaucaaccacaaguucugcaaccugagcgacgcccacaagaagaaccucuacgaccacgcccugauguccaucaucagcaccuuccaccuguccauccccaacuucaaccaguacgaggcgaugagcugcgacuucaacgggggcaagaucuccgugcaguacaaccucagccacaccuacgccgucgacgccgccaaccacugcgggaccaucgcgaacggcgugcugcagacguucaugcggauggccuggggcggguccuacaucgcccuggacagcggcugcggguccugggacugcaucaugaccagcuaccaguaccucaucauccagaacaccaccugggaggaccacugccaguucucccgccccagccccaucggcuaccuggggcugcucucccagcggacgcgcgacaucuacaucagccggcgccgccggggcaccuucaccuggacccucagcgacuccgagggcaacgagacgcccgggggcuacugccugacccgguggaugcugaucgaggccgagcucaagugcuucgggaacaccgccguggcgaagugcaacgagaagcacgacgaggaguucugcgacaugcugcgccuguucgacuucaacaagcaggccauccggcgccucaagacccccgcccagaugagcauccagcugaucaacaaggccgucaacgcccugaucaacgaccagcucaucaugaagaaccaccuccgggacaucaugugcauccccuacugcaacuacuccaaguacugguaccugaaccacacggugaccgggcgcaccagccugccccggugcuggcugguguccaacggcagcuaccugaacgagacccacuucuccgacgacaucgagcagcaggcggacaacaugaucacggagcuccugcagaaggaguacauggaccgccagggcaagaccccgcuggggcucgucgaccuguucguguucagcaccuccuucuaccugaucagcaucuuccugcaccucaucaagaucccgacccaccggcacgugaucggcaagcccugccccaagccccaccgccugaaccacauggggaucugcuccugcggccuguacaagcacccggggguccccgugaaguggaagcgguga

SEQ ID NO: 4152 - RNA, 1473 nt, Artificial Sequence
  derived and/or modified protein sequence (opt1) from LASV(Lassa virus/H.sapiens-wt/NGA/2016/ISTH_0703;Clade II)__AVO03597__GPCstabilized
augggccagaucaucaccuucuuccaggaggugccccacgucaucgaggaggugaugaacaucgugcugaucgcccucagccugcuggccauccucaaggggaucuacaacgucgcgaccugcggccuguucgggcugguguccuuccuccugcugugcggccgcagcugcuccacgaccuacaaggggguguacgagcuccagacccuggagcuggacauggccagccucaacaugaccaugccgcuguccugcacgaagaacaacagccaccacuacaucauggucggcaacgagaccggccuggagcucacccugaccaacacguccaucaucaaccacaaguucugcaaccugagcgacgcccacaagaagaaccucuacgaccacgcccugauguccaucaucagcaccuuccaccuguccauccccaacuucaaccaguacgaggccaugagcugcgacuucaacgggggcaagaucuccgugcaguacaaccucagccacaccuacgcgguggacgccgccucccacugcgggaccaucgccaacggcguccugcagacguucaugcggauggcguggggcgggagcuacaucgcccuggacuccggcugcgggagcugggacugcaucaugaccuccuaccaguaccucaucauccagaacaccaccugggaggaccacugccaguucagccgccccagccccaucggcuaccuggggcugcucucccagcggacgcgcgacaucuacaucagccggcgccgccggggcaccuucaccuggacccucuccgacagcgagggcaacgagacgcccgggggcuacugccugacccgguggaugcugaucgaggccgagcucaagugcuucgggaacaccgccguggccaagugcaacgagaagcacgacgaggaguucugcgacaugcugcgccuguucgacuucaacaagcaggcgauccggcgccucaagacccccgcccagauguccauccagcugaucaacaaggccgugaacgcccugaucaacgaccagcucaucaugaagaaccaccuccgggacaucaugugcauccccuacugcaacuacagcaaguacugguaccugaaccacacggucaccgggcgcaccucccugccccggugcuggcuggugagcaacggcuccuaccugaacgagacccacuucagcgacgacaucgagcagcaggccgacaacaugaucacggagcuccugcagaaggaguacaucgagcgccagggcaagaccccgcuggggcucguggaccuguucgucuucuccaccagcuucuaccugaucuccaucuuccugcaccucaucaagaucccgacccaccggcacgugaucggcaagcccugccccaagccccaccgccugaaccacauggggaucugcagcugcggccuguacaagcacccgggggugcccgucaaguggaagcgguga

SEQ ID NO: 4153 - RNA, 1473 nt, Artificial Sequence
  derived and/or modified protein sequence (opt1) from LASV(Lassa virus/H.sapiens-wt/NGA/2016/ISTH_0717;Clade II)__AVO03547__GPCstabilized
augggccagaucgugaccuucuuccaggaggucccccacgugaucgaggaggugaugaacaucguccugaucgcccucagcauccuggccauccugaaggggcucuacaacguggcgaccugcggccugaucgggcuggugacguuccuccugcuguccggccgcagcugcuccaugaucuacaagggggucuacgagcuccagacccuggagcugaacauggagacccucaacaugaccaugccgcugagcugcacgaagaacaacucccaccacuacaucauggugggcaacgagaccggccuggagcucacccugaccaacacgagccugcucaaccacaaguucugcaaccuguccgacgcccacaagaagaaccuguacgaccacacccucaugagcaucaucuccaccuuccaccugagcauccccaacuucaaccaguacgaggccauguccugcgacuucaacgggggcaagaucaccgugcaguacaaccugagccacacguacgccgucgacgccgugaaccacugcgggacccucgcgaacggcauccugcagaccuucaugcggauggccuggggcggguccuacaucgcccuggacagccgcugcggcuccugggacugcaucaugaccagcuaccaguaccucaucauccagaacacgaccugggaggaccacugccaguucucccggcccagccccaucggguaccugggccugcucucccagcgcacccgggacaucuacaucagccgccggcgccgggggaccuucacguggacccucagcgacuccgagggcaacgagaccccgggcggguacugccugacccgcuggaugcugaucgaggccgagcucaagugcuucggcaacacggcgguggccaagugcaacgagaagcacgacgaggaguucugcgacaugcugcggcuguucgacuucaacaagcaggccauccgccggcucaaggcccccgcccagaugagcauccagcugaucaacaaggcggucaacgcccugaucaacgaccagcucaucaugaagaaccaccuccgcgacaucaugugcauccccuacugcaacuacuccaaguacugguaccugaaccacaccagcaccggccggaccucccugccccgcugcuggcuggugagcaacggguccuaccugaacgagacgcacuucagcgacgacaucgagcagcaggccgacaacaugaucaccgagaugcuccagaaggaguaccuggaccggcagggcaagacgccccugggccugguggaccucuucgucuucuccaccagcuucuaccugaucuccaucuuccugcaccucaucaagaucccgacccaccgccacaucguggggaagcccugccccaagccccaccggcugaaccacaugggcaucugcagcugcgggcuguacaagcagccgggcgugcccguccgcuggaagcgguga

SEQ ID NO: 4154 - RNA, 1473 nt, Artificial Sequence
  derived and/or modified protein sequence (opt1) from LASV(Lassa virus/H.sapiens-wt/NGA/2016/ISTH_0753;Clade II)__AVO03609__GPCstabilized
augggccagaucaucaccuucuuccaggaggugccccacgucaucgaggaggugaugaacaucgugcugaucgcccucagccugcuggccauccucaaggggaucuacaacgucgcgaccugcggccuguucgggcugguguccuuccuccugcugugcggccgcagcugcuccacgaccuacaaggggguguacgagcuccagacccuggagcuggacauggccagccucaacaugaccaugccgcuguccugcacgaagaacaacagccaccacuacaucauggucggcaacgagaccggccuggagcucacccugaccaacacguccaucaucaaccacaaguucugcaaccugagcgacgcccacaagaagaaccucuacgaccacgcccugauguccaucaucagcaccuuccaccuguccauccccaacuucaaccaguacgaggccaugagcugcgacuucaacgggggcaagaucuccgugcaguacaaccucagccacaccuacgcgguggacgccgccaaccacugcgggaccaucgccaacggcguccugcagacguucaugcggauggcguggggcggguccuacaucgcccuggacagcggcugcgggaacugggacugcaucaugaccuccuaccaguaccucaucauccagaacaccaccugggaggaccacugccaguucagccgccccucccccaucggcuaccuggggcugcucagccagcggacgcgcgacaucuacaucagccggcgccgccggggcaccuucaccuggacccucuccgacagcgagggcaacgagacgcccgggggcuacugccugacccgguggaugcugaucgaggccgagcucaagugcuucgggaacaccgccguggccaagugcaacgagaagcacgacgaggaguucugcgacaugcugcgccuguucgacuucaacaagcaggcgaucucccggcucaagacccccgcccagaugagcauccagcugaucaacaaggccgugaacgcccugaucaacgaccagcucaucaugaagaaccaccuccgcgacaucaugugcauccccuacugcaacuacuccaaguacugguaccugaaccacacggucaccgggcggaccagccugccccgcugcuggcugguguccaacggcagcuaccugaacgagacccacuucuccgacgacaucgagcagcaggccgacaacaugaucacggagcuccugcagaaggaguacauggaccggcagggcaagaccccgcuggggcucguggaccuguucgucuucagcaccuccuucuaccugaucagcaucuuccugcaccucgugaagaucccgacccaccgccacgugaucggcaagcccugccccaagccccaccggcugaaccacauggggaucugcuccugcggccuguacaagcacccggggguccccgugaaguggaagcgcuga

SEQ ID NO: 4155 - RNA, 1473 nt, Artificial Sequence
  derived and/or modified protein sequence (opt1) from LASV(Lassa virus/H.sapiens-wt/NGA/2016/ISTH_0759;Clade II)__AVO03593__GPCstabilized
augggccagaucaucaccuucuuccaggaggugccccacgucaucgaggaggugaugaacaucgugcugaucgcccucagccugcuggccauccucaaggggaucuacaacgucgcgaccugcggccuguucgggcugguguccuuccuccugcugugcggccgcagcugcuccacgaccuacaaggggguguacgagcuccagacccuggagcuggacauggccagccucaacaugaccaugccgcuguccugcacgaagaacaacagccaccacuacaucauggucggcaacgagaccggccuggagcucacccugaccaacacguccaucaucaaccacaaguucugcaaccugagcgacgcccacaagaagaaccucuacgaccacacccugauguccaucaucagcaccuuccaccuguccauccccaacuucaaccaguacgaggccaugagcugcgacuucaacgggggcaagaucuccgugcaguacaaccucagccacaccuacgccguggacgcggccaaccacugcgggacgaucgccaacggcguccugcagaccuucaugcggauggccuggggcggguccuacaucgcgcuggacagcggcugcggguccugggacugcaucaugaccagcuaccaguaccucaucauccagaacaccuccugggaggaccacugccaguucagccgccccagccccaucggcuaccuggggcugcucucccagcggacgcgcgacaucuacaucagccggcgccgccggggcaccuucaccuggacccucuccgacagcgagggcaacgagacgcccgggggcuacugccugacccgguggaugcugaucgaggccgagcucaagugcuucgggaacaccgccguggccaagugcaacgagaagcacgacgaggaguucugcgacaugcugcgccuguucgacuucaacaagcaggccauccggcgccucaagacccccgcgcagauguccauccagcugaucaacaaggccgugaacgcccugaucaacgaccagcucaucaugaagaaccaccuccgggacaucaugugcauccccuacugcaacuacagcaaguacugguaccugaaccacacggucaccgggaagaccucccugccccgcugcuggcuggugagcaacggcuccuaccugaacgagacccacuucagcgacgacaucgagcagcaggccgacaacaugaucacggagcuccugcagaaggaguacaucgaccggcagggcaagaccccgcuggggcucguggaccuguucgucuucuccaccagcuucuaccugaucuccaucuuccugcaccucgugaagaucccgacccaccgccacgugaucggcaagcccugccccaagccccaccggcugaaccacauggggaucugcagcugcggccuguacaagcacccggggguccccgugaaguggaagcgcuga

SEQ ID NO: 4156 - RNA, 1473 nt, Artificial Sequence
  derived and/or modified protein sequence (opt1) from LASV(Lassa virus/H.sapiens-wt/NGA/2016/ISTH_0777;Clade II)__AVO03615__GPCstabilized
augggccagaucaucaccuucuuccaggaggugccccacgucaucgaggaggugaugaacaucgugcugaucgcccucagccugcuggccauccucaaggggaucuacaacgucgcgaccugcggccugcuggggcucaucuccuuccugcugcucugcggccgcagcugcuccacgaccuacaaggggguguacgagcugcagacccuggagcucgacauggccaaccugaacaugaccaugccgcugagcugcacgaagaacuccagccaccacuacaucauggugggcaacgagaccggccucgagcugacccugaccaacacguccaucaucaaccacaaguucugcaaccucagcgacgcccacaagaagaaccuguacgaccacgcccugauguccaucaucagcaccuuccaccucuccauccccaacuucaaccaguacgaggccaugagcugcgacuucaacgggggcaagaucuccguccaguacaaccugagccacgcguacgccguggacgccgccaaccacugcgggaccaucgcgaacggcgugcugcagaccuucaugcggauggccuggggcggguccuacaucgcccucgacagcggcugcgggaacugggacugcaucaugacguccuaccaguaccugaucauccagaacaccaccugggaggaccacugccaguucagccgccccucccccaucggcuaccuggggcuccugagccagcggacccgcgacaucuacaucagccggcgccgccggggcacguucaccuggacccuguccgacagcgagggcaacgaggcccccgggggcuacugccugacccgguggaugcucaucgaggccgagcugaagugcuucgggaacacggcgaucgccaagugcaacgagaagcacgacgaggaguucugcgacaugcugcgccucuucgacuucaacaagcaggccauccggcgccugaagacccccgcccagauguccauccagcugaucaacaaggccgucaacgcgcucaucaacgaccagcugaucaugaagaaccaccuccgggacaucaugugcauccccuacugcaacuacagcaaguacugguaccugaaccacaccgugaccgggaagacgucccugccccgcugcuggcugaucagcaacggcuccuaccucaacgagacccacuucagcgacgacaucgagcagcaggccgacaacaugaucaccgagcugcugcagaaggaguacauggaccggcagggcaagaccccgcucgggcugguggaccuguucgucuucuccacgagcuucuaccugaucuccaucuuccuccaccuggugaagaucccgacccaccgccacaucgugggcaagcccugccccaagccccaccggcugaaccacauggggaucugcagcugcggccucuacaagcacccggggguccccgugaaguggaagcgcuga

SEQ ID NO: 4157 - RNA, 1473 nt, Artificial Sequence
  derived and/or modified protein sequence (opt1) from LASV(Lassa virus/H.sapiens-wt/NGA/2016/ISTH_0779;Clade II)__AVO03655__GPCstabilized
augggccagaucaucaccuucuuccaggaggugccccacgucguggaggaggugaugaacgucgugcugaucgcccucagccugcuggccauccucaaggggaucuacaacaucgcgaccugcggccuguucgggcugaucuccuuccuccugcugugcggccgcagcugcuccacgaccuacaaggggguguacgagcuccagacccuggagcuggacauggccaaccucaacaugaccaugccgcugagcugcacgaagaacaacucccaccacuacaucauggucggcaacgagaccggccuggagcucacccugaccaacacgagcaucaucaaccacaaguucugcaaccuguccgacgcccacaagaagaaccucuacgaccacacccugaugagcaucaucuccaccuuccaccugagcauccccaacuucaaccaguacgaggccauguccugcgacuucaacgggggcaagaucagcgugcaguacaaccucucccacggguacgccguggacgcggccaaccacugcggcaccaucgccaacgggguccugcagacguucaugcggauggccuggggcggcagcuacaucgcgcuggacuccgggugcggcaacugggacugcaucaugaccagcuaccaguaccucgugauccagaacaccaccugggaggaccacugccaguucucccgccccagccccaucggguaccugggccugcucucccagcggacgcgcgacaucuacaucagccggcgccgccggggcaccuucaccuggacccucagcgacuccgaggggaacgacgccccgggcggguacugccugacgcgguggaugcugaucgaggccgagcucaagugcuucggcaacaccgccaucgccaagugcaacgagaagcacgacgaggaguucugcgacaugcugcgccuguucgacuucaaccggcaggcgaucaagcgccucaagacccccgcccagaugagcauccagcugaucaacaaggccgugaacgcccugaucaacgaccagcucaucaugaagaaccaccuccgggacaucaugugcauccccuacugcaacuacuccaaguacugguaccugaacaacaccgucacgggcaagagcucccugcccaagugcuggcuggugagcaacggcuccuaccugaacgagacccacuucagcgacgacaucgagcagcaggccgacaacaugaucaccgagaugcuccagaaggaguacaucgaccgccaggggaagacgccccugggccugguggaccucuucgucuucuccaccagcuucuaccugaucuccaucuuccugcaccuggugcggaucccgacccaccgccacaucaccgggaagcccugccccaagccccaccggcucaaccacaugggcaucugcagcugcgggcuguacaagcagccgggcgugcccgucaaguggaagcgcuga

SEQ ID NO: 4158 - RNA, 1473 nt, Artificial Sequence
  derived and/or modified protein sequence (opt1) from LASV(Lassa virus/H.sapiens-wt/NGA/2016/ISTH_0917;Clade II)__AVO03535__GPCstabilized
augggccagaucgugaccuucuuccaggaggucccccacgugaucgaggagaucaugaacaucgugcugaucacccucagccugcuggccauccucaagggggucuacaaccuggccacgugcggccugaucgggcucaucaccuuccuguuccugugcggccgcuccugcagcaugaccuacaaggggaacuaccagcucgagacccuggagcugaacauggagaugcucaacaugacgaugccgcuguccugcaccaagaacaacagccaccacuacauccgggugggcaacgagaccggccuggagcucacccugacgaacaccuccaucauccagcacaaguucugcaaccugagcgacgcgcacaagcgcaaccucuacgaccacucccugaugagcaucguguccaccuuccaccugagcauccccaacuucaaccaguacgaggccauguccugcgacuucaacgggggcaagaucagcauccaguacaaccucucccacaccuacgccggggacgccgccaagcacugcggcacgcuggcgaacgggauccugcagaccuucaugcggauggccuggggcggcagcuacaucgcccucgacuccgggugcggcgggugggacugcaucaugaccaacuaccaguaccugaucauccagaacgucaccugggaggaccacugccaguucagccggcccucccccaucggcuaccugggccuccugagccagcgcacgcgggagguguacaucucccgccggcgccgggggaccuucaccuggacccugagcgacagcgagggcaacgaggcccccgggggcuacugccugacgcgcuggaugcucaucgaggcggagcugaagugcuucgggaacaccgccguggccaagugcaacgagaagcacgacgaggaguucugcgacaugcugcggcuguucgacuucaacaagcaggccauccgccggcugaaggcccccacccagauguccauccagcugaucaacaaggcggucaacgcccucaucaacgaccagcugaucaugaagaaccaccuccgcgacaucaugugcaucccguacugcaacuacagcaaguacugguaccucaaccacaccaucacgggccggaccucccugccccgcugcuggcuggugagcaacggguccuaccucaacgagacccacuucagcgacgacaucgagcagcaggccgacaacaugaucaccgagaugcugcagaaggaguacaucgaccggcagggcaagacgccccuggggcucguggaccuguucgucuucuccaccagcuucuaccugaucuccaucuuccugcaccucgugaagaucccgacccaccgccacaucgugggcaagagcugccccaagccccaccggcugaaccacauggggaucugcuccugcggccuguacaagcgccccggcgucagcgugcgguggaagcgcuga

SEQ ID NO: 4159 - RNA, 1473 nt, Artificial Sequence
  derived and/or modified protein sequence (opt1) from LASV(Lassa virus/H.sapiens-wt/NGA/2016/ISTH_1006;Clade II)__AVO03643__GPCstabilized
augggccagaucaucaccuucuuccaggaggugccccacgucaucgaggaggugaugaacaucgugcugaucgcccucagccugcuggccauccucaaggggaucuacaacgucgcgaccugcggccuguucgggcugguggccuuccuccugcugugcggccgcuccugcagcacgaccuacaaggggguguacgagcuccagacccuggagcuggacauggccucccucaacaugaccaugccgcugagcugcacgaagaacaacucccaccacuacaucauggucggcaacgagaccggccuggagcucacccugaccaacacgagcaucaucaaccacaaguucugcaaccuguccgacgcccacaagaagaaccucuacgaccacgcccugaugagcaucaucuccaccuuccaccugagcauccccaacuucaaccaguacgaggcgauggggugcgacuucaacggcgggaagaucuccgugcaguacaaccucagccacuccuacgccguggacgccgccaaccacugcggcaccaucgcgaacgggguccugcagaccuucaugcggauggccuggggcggcagcuacaucgcccuggacuccgggugcggcagcugggacugcaucaugacguccuaccaguaccucaucauccagaacaccaccugggaggaccacugccaguucagccgccccucccccaucggguaccugggccugcucagccagcggacccgcgacaucuacaucagccggcgccgccggggcacguucaccuggacccucuccgacagcgaggggaacgagaccccgggcggguacugccugacgcgguggaugcugaucgaggccgagcucaagugcuucggcaacaccgccguggcgaagugcaacgagaagcacgacgaggaguucugcgacaugcugcgccuguucgacuucaacaagcaggccauccggcgccucaagacccccgcccagauguccauccagcugaucaacaaggccgugaacgcccugaucaacgaccagcucaucaugaagaaccaccuccgggacaucaugugcauccccuacugcaacuacagcaaguacugguaccugaaccacaccgucacgggccgcaccucccugccccggugcuggcuggugagcaacggcuccuaccugaacgagacccacuucagcgacgacaucgagcagcaggcggacaacaugaucaccgagcuccugcagaaggaguacauggaccgccaggggaagacgccccugggccucguggaccuguucgucuucuccaccagcuucuaccugaucuccaucuuccugcaccucaucaagaucccgacccaccggcacgugaucgggaagcccugccccaagccccaccgccugaaccacaugggcaucugcagcugcgggcuguacaagcacccgggcgugcccgucaaguggaagcgguga

SEQ ID NO: 4160 - RNA, 1473 nt, Artificial Sequence
  derived and/or modified protein sequence (opt1) from LASV(Lassa virus/H.sapiens-wt/NGA/2016/ISTH_1026;Clade II)__AVO03589__GPCstabilized
augggccagaucaucaccuucuuccaggaggugccccacgucaucgaggaggugaugaacaucgugcugaucgcccucagccugcuggccauccucaaggggaucuacaacgucgcgaccugcggccuguucgggcugguguccuuccuccugcugugcggccgcagcugcuccacgaccuacaaggggguguacgagcuccagacccuggagcuggacauggccagccucaacaugaccaugccgcuguccugcacgaagaacaacagccaccacuacaucauggucggcaacgagaccggccuggagcucacccugaccaacacguccaucaucaaccacaaguucugcaaccugagcgacgcccacaagaagaaccucuacgaccacgcccugauguccaucaucagcaccuuccaccuguccauccccaacuucaaccaguacgaggccaugagcugcgacuucaacgggggcaagaucuccgugcaguacaaccucagccacgcguacgccaucgacgccgccucccacugcgggaccaucgcgaacggcgugcugcagaccuucaugcggauggccuggggcgggagcuacaucgcccuggacuccggcugcgggagcugggacugcaucaugacguccuaccaguaccucaucauccagaacaccaccugggaggaccacugccaguucagccgccccagccccaucggcuaccuggggcugcucucccagcggacccgcgacaucuacaucagccggcgccgccggggcacguucaccuggacccucuccgacagcgagggcaacgagacccccgggggcuacugccugacgcgguggaugcugaucgaggccgagcucaagugcuucgggaacaccgccgucgcgaagugcaacgagaagcacgacgaggaguucugcgacaugcugcgccuguucgacuucaacaagcaggccauccggcgccucaagacccccgcccagauguccauccagcugaucaacaaggccgugaacgcccugaucaacgaccagcucaucaugaagaaccaccuccgggacaucaugugcaucccguacugcaacuacagcaaguacugguaccugaaccacaccgugacggggaagaccucccugccccgcugcuggcuggucagcaacggcuccuaccugaacgagacccacuucagcgacgacaucgagcagcaggcggacaacaugaucaccgagcuccugcagaaggaguaccuggaccggcagggcaagacgccccucgggcugguggaccuguucguguucuccaccagcuucuaccugaucuccaucuuccuccaccuggucaagaucccgacccaccgccacgugaucggccggcccugccccaagccccaccgccugaaccacauggggaucugcagcugcggccucuacaagcacccgggggugcccgucaaguggaagcgguga

SEQ ID NO: 4161 - RNA, 1473 nt, Artificial Sequence
  derived and/or modified protein sequence (opt1) from LASV(Lassa virus/H.sapiens-wt/NGA/2016/ISTH_1070;Clade II)__AVO03651__GPCstabilized
augggccagaucaucaccuucuuccaggaggugccccacgucaucgaggaggugaugaacaucgugcugaucgcccucagccugcuggccauccucaaggggaucuacaacgucgcgaccugcggccuguucgggcugguguccuuccuccugcugugcggccgcagcugcuccacgaccuacaaggggguguacgagcuccagacccuggagcuggacauggccagccucaacaugaccaugccgcuguccugcacgaagaacaacagccaccacuacaucauggucggcaacgagaccggccuggagcucacccugaccaacacguccaucaucaaccacaaguucugcaaccugagcgacgcccacaagaagaaccucuacgaccacgcccugauguccaucaucagcaccuuccaccuguccauccccaacuucaaccaguacgaggccaugagcugcgacuucaacgggggcaagaucuccgugcaguacaaccucagccacaccuucgcgguggacgccgccaaccacugcgggaccaucgccaacggcguccugcagacguucaugcggauggcguggggcggguccuacaucgcccuggacagcggcugcggguccugggacugcaucaugaccagcuaccaguaccucaucauccagaacaccaccugggaggaccacugccaguucucccgccccagccccaucggcuaccuggggcugcucagccagcggacgcgcgacaucuacaucucccggcgccgccggggcaccuucaccuggacccucagcgacuccgagggcaacgagacgcccgggggcuacugccugacccgguggaugcugaucgaggccgagcucaagugcuucgggaacaccgccguggccaagugcaacgagaagcacgacgaggaguucugcgacaugcugcgccuguucgacuucaacaagcaggcgauccggcgccucaagacccccgcccagaugagcauccagcugaucaacaaggccgugaacgcccugaucaacgaccagcucaucaugaagaaccaccuccgggacaucaugugcauccccuacugcaacuacuccaaguacugguaccugaaccacacggucaccgggaagaccagccugccccgcugcuggcugguguccaacggcagcuaccugaacgagacccacuucuccgacgacaucgagcagcaggccgacaacaugaucacggagcuccugcagaaggaguacauggaccggcagggcaagaccccgcuggggcucguggaccuguucgucuucagcaccuccuucuaccugaucagcaucuuccugcaccucgugaagaucccgacccaccgccacaucaucggcaagcccugccccaagccccaccggcugaaccacauggggaucugcuccugcggccuguacaagcacccgggggugcccgucaaguggaagcgcuga

SEQ ID NO: 4162 - RNA, 1473 nt, Artificial Sequence
  derived and/or modified protein sequence (opt1) from LASV(Lassa virus/H.sapiens-wt/NGA/2016/ISTH_1123;Clade II)__AVO03645__GPCstabilized
augggccagaucaucaccuucuuccaggaggugccccacgucaucgaggaggugaugaacaucgugcugaucgcccucagccugcuggccauccucaaggggaucuacaacgucgcgaccugcggccuguucgggcugguguccuuccuccugcugugcggccgcagcugcuccacgaccuacaaggggguguacgagcuccagacccuggagcuggacaugggcagccucaacaugaccaugccgcuguccugcacgaagaacaacagccaccacuacaucauggucggcaacgagaccgggcuggagcucacccugaccaacacguccaucaucaaccacaaguucugcaaccugagcgacgcccacaagaagaaccucuacgaccacgcccugauguccaucaucagcaccuuccaccuguccauccccaacuucaaccaguacgaggccaugagcugcgacuucaacggcgggaagaucuccgugcaguacaaccucagccacgccuacgcgguggacgccgccaaccacugcggcaccaucgccaacgggguccugcagaccuucaugcggauggcguggggcggcuccuacaucgcccuggacagcgggugcggcuccugggacugcaucaugacgagcuaccaguaccucaucauccagaacaccuccugggaggaccacugccaguucagccgccccagccccaucggguaccugggccugcucucccagcggacccgcgacaucuacaucagccggcgccgccggggcaccuucacguggacccucuccgacagcgaggggaacgagaccccgggcggguacugccugacccgguggaugcugaucgaggccgagcucaagugcuucggcaacacggccguggccaagugcaacgagaagcacgacgaggaguucugcgacaugcugcgccuguucgacuucaacaagcaggcgauccggcgccucaagacccccgcccagauguccauccagcugaucaacaaggccgugaacgcccugaucaacgaccagcucaucaugaagaaccaccuccgggacaucaugugcauccccuacugcaacuacagcaaguacugguaccugaaccacaccgucaccggcaagacgucccugccccgcugcuggcuggugagcaacggcuccuaccugaacgagacccacuucagcgacgacaucgagcagcaggccgacaacaugaucaccgagcuccugcagaaggaguacaucgaccggcaggggaagacgccccugggccucguggaccuguucgucuucuccaccagcuucuaccugaucuccaucuuccugcaccucgugaagaucccgacccaccgccacgugaucgggaagcccugccccaagccccaccggcugaaccacaugggcaucugcagcugcgggcuguacaagcacccgggcguccccgugaaguggaagcgcuga

SEQ ID NO: 4163 - RNA, 1473 nt, Artificial Sequence
  derived and/or modified protein sequence (opt1) from LASV(Lassa virus/H.sapiens-wt/NGA/2016/ISTH_1150;Clade II)__AVO03627__GPCstabilized
augggccaggugaucaccuucuuccaggagaucccccacgucaucgaggaggugaugaacaucgugcugaucacccucagccugcuggccauccucaaggggaucuacaacgucgccacgugcggccuguucgggcugaucuccuuccuccugcugugcggccgcagcugcuccaccaccuacaaggggguguacgagcuccagacccuggagcuggacauggcgaaccucaacaugacgaugccgcugagcugcaccaagaacuccagccaccacuacaucauggugggcaacgagaccggccuggagcucacccugacgaacaccuccaucaucaaccacaaguucugcaaccugagcgacgcccacaagaagaaccucuacgaccacgcccugauguccaucaucagcaccuuccaccuguccauccccaacuucaaccaguacgaggccaugagcugcgacuucaacgggggcaagaucuccguccaguacaaccucagccacgccuacgcgguggacgccgccaaccacugcgggaccaucgccaacggcgugcugcagacguucaugcggauggcguggggcggguccuacaucgcccuggacagcggcugcgggaacugggacugcaucaugaccuccuaccaguaccucaucauccagaacaccaccugggaggaccacugccaguucagccgccccucccccaucggcuaccuggggcugcucagccagcggacgcgcgacaucuacaucagccggcgccgccggggcaccuucaccuggacccucuccgacagcgagggcaacgaggcccccgggggcuacugccugacgcgguggaugcugaucgaggccgagcucaagugcuucgggaacaccgccaucgcgaagugcaacgagaagcacgacgaggaguucugcgacaugcugcgccuguucgacuucaacaagcaggccauccggcgccucaagacccccgcccagaaguccauccagcugaucaacaaggccgucaacgcccugaucaacgaccagcucaucaugaagaaccaccuccgggacaucaugugcaucccguacugcaacuacagcaaguacugguaccugaaccacaccgugacggggaagaccucccugcccaagugcuggcugaucagcaacggcuccuaccugaacgagacccacuucagcgacgacaucgagcagcaggcggacaacaugaucaccgagcuccugcagaaggaguacauggaccgccagggcaagacgccccuggggcucguggaccuguucgucuucuccaccagcuucuaccugaucuccaucuuccugcaccucgugaagaucccgacccaccggcacaucgugggccgccccugccccaagccccaccggcugaaccacauggggaucugcagcugcggccuguacaagcacccggggguccccgugaaguggaagcgcuga

SEQ ID NO: 4164 - RNA, 1473 nt, Artificial Sequence
  derived and/or modified protein sequence (opt1) from LASV(Lassa virus/H.sapiens-wt/NGA/2016/ISTH_1174;Clade II)__AVO03555__GPCstabilized
augggccagaucaucaccuucuuccaggaggugccccacgucaucgaggaggugaugaacaucgugcugaucgcccucagccugcuggccauccucaaggggaucuacaacgucgcgaccugcggcuucuucgggcugguguccuuccugcuccugugcggccgcagcugcuccacgaucuacaaggggguguacgagcugcagacccucgagcuggacauggccagccugaacaugaccaugccgcucuccugcaccaagaacaacagccaccacuacaucauggucggcaacgagacgggccuggagcugacccucaccaacaccuccaucaucaaccacaaguucugcaaccugagcgacgcccacaagaagaaccuguacgaccacgcccucauguccaucaucagcacguuccaccuguccaucccccacuucaaccaguacgaggccaugagcugcgacuucaacgggggcaagaucuccgugcaguacaaccugagccacaccuacgcgguggacgccgccaaccacugcgggaccaucgccaacggcguccuccagaccuucaugcggauggcguggggcggguccuacaucgcccuggacagcggcugcggguccugggacugcaucaugacgagcuaccaguaccugaucauccagaacaccaccugggaggaccacugccaguucucccgccccagccccaucggcuaccucgggcugcugagccagcggacccgcgacaucuacaucucccggcgccgccggggcacguucaccuggacccugagcgacuccgagggcaacgagacccccgggggcuacugccucacgcgguggaugcugaucgaggccgagcugaagugcuucgggaacaccgccguggccaagugcaacgagaagcacgacgaggaguucugcgacaugcuccgccuguucgacuucaacaagcaggcgauccggaagcugaagacccccgcccagaugagcauccagcucaucaacaaggccgugaacgcccugaucaacgaccagcugaucaugaagaaccaccuccgcgacaucaugugcaucccguacugcaacuacuccaaguacugguaccugaaccacaccgucacggggaagaccagccugccccggugcuggcucguguccaacggcagcuaccugaacgagacccacuucuccgacgacaucgagcagcaggccgacaacaugaucaccgagcugcuccagaaggaguacauggaccgccagggcaagacgccccuggggcugguggaccucuucgucuucagcaccuccuucuaccugaucagcaucuuccugcaccuggugaagaucccgacccaccggcacgugaucggcaagcccugccccaagccccaccgccucaaccacauggggaucugcuccugcggccuguacaagcacccggggguccccgugaaguggaagcgguga

SEQ ID NO: 4165 - RNA, 1473 nt, Artificial Sequence
  derived and/or modified protein sequence (opt1) from LASV(Lassa virus/H.sapiens-wt/NGA/2016/ISTH_1207;Clade II)__AVO03599__GPCstabilized
augggccagaucaucaccuucuuccaggaggugccccacgucaucgaggaggugaugaacaucgugcugaucgcccucagccugcuggccauccucaaggggaucuacaacgucgcgaccugcggccuguucgggcugguguccuuccuccugcugugcggccgcagcugcuccacgaccuacaaggggguguacgagcuccagacccuggagcuggacaugaccagccucaacaugacgaugccgcuguccugcaccaagaacaacagccaccacuacaucauggucggcaacgagaccggccuggagcucacccugacgaacaccuccaucaucaaccacaaguucugcaaccugagcgacgcccacaagaagaaccucuacgaccacgcccugauguccaucaucagcaccuuccaccuguccauccccaacuucaaccaguacgaggccaugagcugcgacuucaacgggggcaagaucuccgugcaguacaaccucagccacaccuacgccguggacgcggccaaccacugcgggacgaucgccaacggcguccugcagaccuucaugcggauggccuggggcggguccuacaucgcgcuggacagcggcugcggguccugggacugcaucaugaccagcuaccaguaccucaucauccagaacaccacgugggaggaccacugccaguucucccgccccagccccaucggcuaccuggggcugcucagccagcggacccgcgacaucuacaucucccggcgccgccggggcaccuucaccuggacgcucagcgacuccgagggcaacgacacccccgggggcuacugccugacccgguggaugcugaucgaggccgagcucaagugcuucgggaacaccgccguggccaagugcaacgagaagcacgacgaggaguucugcgacaugcugcgccuguucgacuucaacaagcaggccauccggcgccucaagacgcccgcgcagaugagcauccagcugaucaacaaggccgugaacgcccugaucaacgaccagcucaucaugaagaaccaccuccgggacaucaugugcauccccuacugcaacuacuccaaguacugguaccugaaccacaccgucaccgggaagaccagccugccccgcugcuggcugguguccaacggcagcuaccugaacgagacgcacuucuccgacgacaucgagcagcaggccgacaacaugaucaccgagcuccugcagaaggaguacaucgaccggcagggcaagaccccgcuggggcucguggaccuguucgucuucagcaccuccuucuaccugaucagcaucuuccugcaccucgugaagaucccgacgcaccgccacgugaucggcaagcccugccccaagccccaccggcugaaccacauggggaucugcuccugcggccuguacaagcacccggggguccccgugaaguggaagcgcuga

SEQ ID NO: 4166 - RNA, 1473 nt, Artificial Sequence
  derived and/or modified protein sequence (opt1) from LASV(Lassa virus/H.sapiens-wt/NGA/2016/ISTH_1306;Clade II)__AVO03623__GPCstabilized
augggccagaucaucaccuucuuccaggaggugccccacgucaucgaggaggugaugaacaucgugcugaucgcccucagccugcuggccauccucaaggggaucuacaacgucgcgaccugcggccuguucgggcugguguccuuccuccugcugugcggccgcagcugcuccacgaccuacaaggggguguacgagcuccagacccuggagcuggacauggccagccucaacaugaccaugccgcuguccugcacgaagaacaacagccaccacuacaucauggucggcaacgagaccggccuggagcucacccugaccaacacguccaucaucaaccacaaguucugcaaccugagcgacgcccacaagaagaaccucuacgaccacgcccugauguccaucaucagcaccuuccaccuguccauccccaacuucaaccaguacgaggccaugagcugcgacuucaacgggggcaagaucuccgugcaguacaaccucagccacaccuacgcgguggacgccgccaaccacugcgggaccgucgccaacggcgugcugcagacguucaugcggauggcguggggcggguccuacaucgcccuggacagcggcugcggguccugggacugcaucaugaccagcuaccaguaccucaucauccagaacaccaccugggaggaccacugccaguucucccgccccagccccaucggcuaccuggggcugcucagccagcggacgcgcgacaucuacaucucccggcgccgccggggcaccuucaccuggacccucagcgacuccgagggcaacgagacgcccgggggcuacugccugacccgguggaugcugaucgaggccgagcucaagugcuucgggaacaccgccguggccaagugcaacgagaagcacgacgaggaguucugcgacaugcugcgccuguucgacuucaacaagcaggcgauccggcgccucaagacccccgcccagaugagcauccagcugaucaacaaggccgucaacgcccugaucaacgaccagcucaucaugaagaaccaccuccgggacaucaugugcauccccuacugcaacuacuccaaguacugguaccugaaccacacggugaccgggcgcaccagccugccccggugcuggcugguguccaacggcagcuaccugaacgagacccacuucuccgacgacaucgagcagcaggccgacaacaugaucacggagcuccugcagaaggaguacaucgaccgccagggcaagaccccgcuggggcucgucgaccuguucguguucagcaccuccuucuaccugaucagcaucuuccugcaccucgugaagaucccgacccaccggcacgucaucggcaagcccugccccaagccccaccgccugaaccacauggggaucugcuccugcggccuguacaagcacccgggggugcccgugaaguggaagcgguga

SEQ ID NO: 4167 - RNA, 1473 nt, Artificial Sequence
  derived and/or modified protein sequence (opt1) from LASV(Lassa virus/H.sapiens-wt/NGA/2016/ISTH_1311;Clade II)__AVO03575__GPCstabilized
augggccagaucgugaccuucuuccaggaggucccccacgugaucgaggaggugaugaacaucguccugaucgcccucagccugcuggccauccucaaggggaucuacaacguggcgaccugcggccuguucgggcugaucuccuuccuccugcugugcggccgcagcugcuccacgaccuacaaggggguguacgagcuccagacccuggagcuggacauggccaaccucaacaugaccaugccgcugagcugcacgaagaacaacucccaccacuacaucauggucggcaacgagaccggccuggagcucacccugaccaacacgagcaucaucaaccacaaguucugcaaccuguccgacgcccacaagaagaaccucuacgaccacgcccugaugagcaucaucuccaccuuccaccugagcauccccaacuucaaccaguacgaggccauguccugcgacuucaacgggggcaagaucagcgugcaguacaaccucucccacgcguacgccggggacgccgccagccacugcggcaccaucgcgaacggggugcugcagaccuucaugcggauggccuggggcggcuccuacaucgcccuggacagcgggugcggcaacugggacugcaucaugacguccuaccaguaccucaucauccagaacaccaccugggaggaccacugccaguucagccgccccucccccaucggguaccugggccugcucagccagcggacccgcgacaucuacaucagccggcgccgccggggcacguucaccuggacccucuccgacagcgaggggaacgacgccccgggcggguacugccugacccgguggaugcugaucgaggccgagcucaagugcuucggcaacacggcgaucgccaagugcaacgagaagcacgacgaggaguucugcgacaugcugcgccuguucgacuucaacaagcaggccaucaagcggcucaagacccccgcccagauguccauccagcugaucaacaaggccgucaacgcgcugaucaacgaccagcucaucaugaagaaccaccuccgcgacaucaugugcauccccuacugcaacuacagcaaguacugguaccugaaccacaccaccacgggcaagaccucccugcccaagugcuggcugaucagcaacggcuccuaccugaacgagacccacuucagcgacgacaucgagcagcaggccgacaacaugaucaccgagcuccugcagaaggaguaccuggaccggcaggggaagacgccccucggccugguggaccuguucguguucuccaccagcuucuaccugaucuccaucuuccuccaccugaucaagaucccgacccaccgccacaucgucgggcggcccugccccaagccccaccgccugaaccacaugggcaucugcagcugcgggcucuacaagcacccgggcgugcccgugaaguggaagcgguga

SEQ ID NO: 4168 - RNA, 1473 nt, Artificial Sequence
  derived and/or modified protein sequence (opt1) from LASV(Lassa virus/H.sapiens-wt/NGA/2016/ISTH_1423;Clade II)__AVO03577__GPCstabilized
augggccagaucgugaccuucuuccaggaggucccccacgugaucgaggaggugaugaacaucguccugaucgcccucagccugcuggccauccucaaggggaucuacaacguggcgaccugcggccuguucgggcugguguccuuccuccugcugugcggccgcagcugcuccacgaccuacaagggggucuacgagcuccagacccuggagcuggacauggccaaccucaacaugaccaugccgcugagcugcacgaagaacaacucccaccacuacaucauggugggcaacgagaccggccuggagcucacccugaccaacacgagcaucaucaaccacaaguucugcaaccuguccgacgcccacaagaagaaccucuacgaccacgcccugaugagcaucaucuccaccuuccaccugagcauccccaacuucaaccaguacgaggccauguccugcgacuucaacgggggcaagaucagcgugcaguacaaccucucccacagcuacgcggucgacgccgccaaccacugcgggaccguggccaacggcgugcugcagaccuucaugcggauggcguggggcggguccuacaucgcccuggacagcggcugcggguccugggacugcaucaugacgagcuaccaguaccucaucauccagaacaucaccugggaggaccacugccaguucucccgccccagccccaucggcuaccuggggcugcucagccagcggacccgcgacaucuacaucucccggcgccgccggggcaccuucacguggacccucagcgacuccgagggcaaggagacccccgggggcuacugccugacccgguggaugcugaucgaggccgagcucaagugcuucgggaacacggccgucgccaagugcaacgagaagcacgacgaggaguucugcgacaugcugcgccuguucgacuucaacaagcaggcgauccggcgccucaagacccccgcccagaugagcauccagcugaucaacaaggccgugaacgcccugaucaacgaccagcucaucaugaagaaccaccuccgggacaucaugugcauccccuacugcaacuacuccaaguacugguaccugaaccacaccgugaccgggaagacgagccugccccgcugcuggcuggucuccaacggcagcuaccugaacgagacccacuucuccgacgacaucgagcagcaggccgacaacaugaucaccgagcuccugcagaaggaguacaucgaccggcagggcaagaccccgcuggggcucguggaccuguucguguucagcacguccuucuaccugaucagcaucuuccugcaccucgucaagaucccgacccaccgccacauccugggcaagcccugccccaagccccaccggcugaaccacauggggaucugcuccugcggccucuacaagcacccgggggugcccgugaaguggaagcgcuga

SEQ ID NO: 4169 - RNA, 1473 nt, Artificial Sequence
  derived and/or modified protein sequence (opt1) from LASV(Lassa virus/H.sapiens-wt/NGA/2016/ISTH_1462;Clade II)__AVO03587__GPCstabilized
augggccagaucaucaccuucuuccaggaggugccccacgucaucgaggaggugaugaacaucgugcugaucgcccucagccugcuggccauccucaaggggaucuacaacgucgcgaccugcggccuguucgggcugguguccuuccuccugcugugcggccgcagcugcuccacgaccuacaaggggguguacgagcuccagacccuggagcuggacauggccagccucaacaugaccaugccgcuguccugcacgaagaacaacagccaccacuacaucauggucggcaacgagaccggccuggagcucacccugaccaacacguccaucaucaaccacaaguucugcaaccugagcgacgcccacaagaagaaccucuacgaccacgcccugauguccaucaucagcaccuuccaccuguccauccccaacuucaaccaguacgaggccaugagcugcgacuucaacgggggcaagaucuccgugcaguacaaccucagccacaccuacgcgguggacgccgccaaccacugcgggaccaucgccaacggcguccugcagacguucaugcggauggcguggggcggguccuacaucgcccuggacagcggcugcggguccugggacugcaucaugaccagcuaccaguaccucaucauccagaacaccaccugggaggaccacugccaguucucccgccccagccccaucggcuaccuggggcugcucagccagcggacgcgcgacaucuacaucucccggcgccgccggggcaccuucaccuggacccucagcgacuccgagggcaacgagacgcccgggggcuacugccugacccgguggaugcugaucgaggccgagcucaagugcuucgggaacaccgccguggccaagugcaacgagaagcacgacgaggaguucugcgacaugcugcgccuguucgacuucaacaagcaggcgauccggcgccucaagacccccgcccagaugagcauccagcugaucaacaaggccgugaacgcccugaucaacgaccagcucaucaugaagaaccaccuccgggacaucaugugcauccccuacugcaacuacuccaaguacugguaccugaaccacacggucaccgggcgcaccagccugccccggugcuggcugguguccaacggcagcuaccugaacgagacccacuucuccgacgacaucgagcagcaggccgacaacaugaucacggagcuccugcagaaggaguacaucgagcgccagggcaagaccccgcuggggcucguggaccuguucgucuucagcaccuccuucuaccugaucagcaucuuccugcaccucaucaagaucccgacccaccggcacgugaucggcaagcccugccccaagccccaccgccugaaccacauggggaucugcuccugcggccuguacaagcacccgggggugcccgucaaguggaagcgguga

SEQ ID NO: 4170 - RNA, 1473 nt, Artificial Sequence
  derived and/or modified protein sequence (opt1) from LASV(Lassa virus/H.sapiens-wt/NGA/2016/ISTH_1472;Clade II)__AVO03605__GPCstabilized
augggccagaucaucaccuucuuccaggaggugccccacgucaucgaggaggugaugaacaucgugcugaucgcccucagccugcuggccauccucaaggggaucuacaacgucgcgaccugcggccuguucgggcugguguccuuccuccugcugugcggccgcagcugcuccacgaccuacaaggggguguacgagcuccagacccuggagcuggacauggccagccucaacaugaccaugccgcuguccugcacgaagaacaacagccaccacuacaucauggucggcaacgagaccggccuggagcucacccugaccaacacguccaucaucaaccacaaguucugcaaccugagcgacgcccacaagaagaaccucuacgaccacgcccugauguccaucaucagcaccuuccaccuguccauccccaacuucaaccaguacgaggccaugagcugcgacuucaacgggggcaagaucuccgugcaguacaaccucagccacaccuacgcgguggacgccgccaaccacugcgggaccaucgccaacggcguccugcagacguucaugcggauggcguggggcggguccuacaucgcccuggacagcggcugcggguccugggacugcaucaugaccagcuaccaguaccucaucauccagaacaccaccugggaggaccacugccaguucucccgccccagccccaucggcuaccuggggcugcucagccagcggacgcgcgacaucuacaucucccggcgccgccggggcaccuucaccuggacccucagcgacuccgagggcaacgagacgcccgggggcuacugccugacccgguggaugcugaucgaggccgagcucaagugcuucgggaacaccgccguggccaagugcaacgagaagcacgacgaggaguucugcgacaugcugcgccuguucgacuucaacaagcaggcgauccggcgccucaagacccccgcccagaugagcauccagcugaucaacaaggccgugaacgcccugaucaacgaccagcucaucaugaagaaccaccuccgggacaucaugugcauccccuacugcaacuacuccaaguacugguaccugaaccacacggucaccgggcgcaccagccugccccggugcuggcugguguccaacggcagcuaccugaacgagacccacuucuccgacgacaucgagcagcaggccgacaacaugaucacggagcuccugcagaaggaguacaucgaccgccagggcaagaccccgcuggggcucguggaccuguucgucuucagcaccuccuucuaccugaucagcaucuuccugcaccucaucaagaucccgacccaccggcacgugaucggcaagcccugccccaagccccaccgccugaaccacauggggaucugcuccugcggccuguacaagcacccgggggugcccgucaaguggaagcgguga

SEQ ID NO: 4171 - RNA, 1473 nt, Artificial Sequence
  derived and/or modified protein sequence (opt1) from LASV(Lassa virus/H.sapiens-wt/NGA/2016/ISTH_1474;Clade II)__AVO03613__GPCstabilized
augggccagaucaucaccuucuuccaggaggugccccacgucaucgaggaggugaugaacaucgugcugaucgcccucagccugcuggccauccucaaggggaucuacaacgucgcgaccugcggccuguucgggcugguguccuuccuccugcugugcggccgcagcugcuccacgaccuacaaggggguguacgagcuccagacccuggagcuggacauggccagccucaacaugaccaugccgcuguccugcacgaagaacaacagccaccacuacaucauggucggcaacgagaccggccuggagcucacccugaccaacacguccaucauccaccacaaguucugcaaccugagcgacgcccacaagaagaaccucuacgaccacgcccugauguccaucaucagcaccuuccaccuguccauccccaacuucaaccaguacgaggccaugagcugcgacuucaacgggggcaagaucuccgugcaguacaaccucagccacaccuacgcgguggacgccgccaaccacugcgggaccaucgccaacggcguccugcagacguucaugcggauggcguggggcggguccuacaucgcccuggacagcggcugcggguccugggacugcaucaugaccagcuaccaguaccucaucauccagaacaccaccugggaggaccacugccaguucucccgccccagccccaucggcuaccuggggcugcucagccagcggacgcgcgacaucuacaucucccggcgccgccggggcaccuucaccuggacccucagcgacuccgagggcaacgagacgcccgggggcuacugccugacccgguggaugcugaucgaggccgagcucaagugcuucgggaacaccgccguggccaagugcaacgagaagcacgacgaggaguucugcgacaugcugcgccuguucgacuucaacaagcaggcgauccggcgccucaagacccccgcccagaugagcauccagcugaucaacaaggccgugaacgcccugaucaacgaccagcucaucaugaagaaccaccuccgggacaucaugugcauccccuacugcaacuacuccaaguacugguaccugaaccacacggucaccgggcgcaccagccugccccggugcuggcugguguccaacggcagcuaccugaacgagacccacuucuccgacgacaucgagcagcaggccgacaacaugaucacggagcuccugcagaaggaguacaucgaccgccagggcaagaccccgcuggggcucguggaccuguucgucuucagcaccuccuucuaccugaucagcaucuuccugcaccucaucaagaucccgacccaccggcacgugaucggcaagcccugccccaagccccaccgccugaaccacauggggaucugcuccugcggccuguacaagcacccgggggugcccgucaaguggaagcgguga

SEQ ID NO: 4172 - RNA, 1476 nt, Artificial Sequence
  derived and/or modified protein sequence (opt1) from LASV(Lassa virus/H.sapiens-wt/NGA/2016/ISTH_1496;Clade II)__AVO03579__GPCstabilized
augggccagaucaucaccuucuuccaggaggugccccacgucaucgaggaggugaugaacaucgugcugaucgcccucagccugcuggccauccucaagggggucuacaacguggcgaccugcggccuguucgggcugguguccuuccuccugcugugcggccgcagcugcuccacgaccaucuacaagggggucuacgagcuccagacccuggagcuggacauggccagccucaacaugaccaugccgcuguccugcacgaagaacaacagccaccacuacaucauggugggcaacgagaccggccuggagcucacccugaccaacacguccaucaucaaccacaaguucugcaaccugagcgacgcccacaagaagaaccucuacgaccacgcccugauguccaucaucagcaccuuccaccuguccauccccaacuucaaccaguacgaggccaugagcugcgacuucaacgggggcaagaucuccgugcaguacaaccucagccacgcguacgccgucgacgccgccaaccacugcgggaccaucgcgaacggcgugcugcagaccuucaugcggauggccuggggcggguccuacaucgcccuggacagcggcugccgcuccugggacugcaucaugacgagcuaccaguaccucaucauccagaacaccaccugggaggaccacugccaguucucccggcccagccccaucggguaccugggccugcucagccagcgcacccgggacaucuacaucucccgccggcgccgggggacguucaccuggacccucagcgacuccgagggcaacgagaccccgggcggguacugccugacgcgcuggaugcugaucgaggccgagcucaagugcuucggcaacaccgccguggcgaagugcaacgagaagcacgacgaggaguucugcgacaugcugcggcuguucgacuucaacaagcaggccauccgccggcucaagacccccgcccagaugagcauccagcugaucaacaaggccgucaacgcccugaucaacgaccagcucaucaugaagaaccaccuccgcgacaucaugugcauccccuacugcaacuacuccaaguacugguaccugaaccacaccgugacgggcaagaccagccugccccggugcuggcugguguccaacgggagcuaccugaacgagacccacuucuccgacgacaucgagcagcaggcggacaacaugaucaccgagcuccugcagaaggaguacaucgaccgccagggcaagacgccccugggccucgucgaccuguucguguucagcaccuccuucuaccugaucagcaucuuccugcaccucgugaagaucccgacccaccggcacgucaucgggaagcccugccccaagccccaccgccugaaccacaugggcaucugcuccugcgggcuguacaagcacccgggcgugcccgugaaguggaagcgguga

SEQ ID NO: 4173 - RNA, 1473 nt, Artificial Sequence
  derived and/or modified protein sequence (opt1) from LASV(Lassa virus/H.sapiens-wt/NGA/2016/ISTH_1541;Clade II)__AVO03553__GPCstabilized
augggccagaucgugaccuucuuccaggaggucccccacgugaucgaggagaucaugaacaucgugcugaucacccucagccugcuggccguccucaaggggaucuacaacuucgccacgugcggccugaucgggcugaucaccuuccucuuccugugcggccgcuccugcagcaccaucuacaaggggaacuaccagcugcagacccucgagcugaacauggagacgcugaacaugaccaugccgcucuccugcaccaagaacaacagccaccacuacauccgggugggcaacgagaccggccuggagcugacgcucaccaacguguccaucaucaaccaccgcuucugcaaccugagcgacgcgcacaagcggaaccuguacgaccacacccucauguccaucaucagcaccuuccaccuguccauccccaacuucaaccaguacgaggccaugagcugcgacuucaacgggggcaagaucuccguccaguacaaccugagccacggguacgccguggacgccgccaagcacugcggcacgguggcgaacgggguccuccagaccuucaugcgcauggccuggggcggcuccuacaucgcccuggacagcgggugcggcaacugggacugcaucaugaccuccuaccaguaccugaucauccagaacaccacgugggaggaccacugccaguucagccggcccucccccaucggguaccucggccugcugagccagcgcacccgggacaucuacaucucccgccggcgccggggcaccuucaccuggacgcugagcgacagcgaggggcgcgagaccccgggcggguacugccucacccgguggaugcugaucgaggccgagcugaagugcuucggcaacaccgcgguggccaagugcaacgagaagcacgacgaggaguucugcgacaugcuccgccuguucgacuucaacaagcaggccauccagcggcugaagacgcccgcccagauguccauccagcucaucaacaaggccgugaacgcgcugaucaacgaccagcugaucaugaagaaccaccuccgcgacaucaugugcauccccuacugcaacuacagcaaguacugguaccugaaccacaccaccaccggcaagacgucccugcccaagugcuggcucgucaccaacggcagcuaccugaacgagacccacuucuccgacgacaucgagcagcaggccgacaacaugaucaccgagaugcugcagaaggaguacaucgaccggcaggggaagacgccccucggccugguggaccuguucguguucagcaccuccuucuaccucaucagcaucuuccugcaccugaucaagaucccgaaccaccgccacaucgucgggaagcccugccccaagccccaccggcugaaccacaugggcaucugcuccugcggguucuacaagcagccgggcgugcccgugcgcuggaagcgguga

SEQ ID NO: 4174 - RNA, 1473 nt, Artificial Sequence
  derived and/or modified protein sequence (opt1) from LASV(Lassa virus/H.sapiens-wt/NGA/2016/ISTH_1546;Clade II)__AVO03537__GPCstabilized
augggccagaucgugaccuucuuccaggagaucccccacgucguggaggagaucaugaacaucgugcugaucacccucagccugcuggccauccucaaggggcuguacaacuucgccacgugcggccugaucgggcucaucaccuuccuguuccugugcggccgcuccugcagcaccaucuacaagggguccuaccagcuccaggcgcuggagcugaacauggagacccucaacaugacgaugccgcugagcugcaccaagaacaacucccaccacuacauccgggucggcaacgagaccggccuggagcucacccugacgaacaccagcaucaucaaccacaaguucugcaaccuguccgacgcccacaagaagaaccucuacgaccacacccugaugagcaucaucuccaccuuccaccugagcauccccaacuucaaccaguacgaggccauguccugcgacuucaacgggggcaagaucagcgugcaguacaaccucucccacagcuacgccggggacgccgcgcgccacugcggcacgguggccaacgggguccugcagaccuucaugcggauggccuggggcggcuccuacaucgcccuggacagcgggugcggcaacugggacugcaucaugaccuccuaccaguaccucaucauccagaacaccacgugggaggaccacugccaguucagccgccccucccccaucggguaccugggccugcucagccagcggacccgcgacaucuacaucagccggcgccgccggggcaccuucaccuggacgcucuccgacagcgaggggaaggagaccccgggcggguacugccugacccgguggaugcugaucgaggcggagcucaagugcuucggcaacaccgccguggccaagugcaacgagaagcacgacgaggaguucugcgacaugcugcgccuguucgacuucaacaagcaggccauccagcggcucaagacgcccgcccagauguccauccagcugaucaacaaggcggugaacgcccugaucaacgaccagcucaucaugaagaaccaccuccgcgacaucaugugcauccccuacugcaacuacagcaaguacugguaccugaaccacaccaccaccggcaagacgucccugccccggugcuggcuggucagcaacggcuccuaccugaacgagacccacuucagcgacgacaucgagcagcaggccgacaacaugaucaccgagaugcuccagaaggaguacaucgaccgccaggggaagacgccccugggccugguggaccucuucguguucuccaccagcuucuaccugaucuccaucuuccugcaccugaucaagaucccgacccaccggcacaucgucggcaagagcugccccaagccccaccgccucaaccacauggggaucugcuccugcgggcuguacaagcagcccggcgugccggugaaguggaagcgguga

SEQ ID NO: 4175 - RNA, 1473 nt, Artificial Sequence
  derived and/or modified protein sequence (opt1) from LASV(Lassa virus/H.sapiens-wt/NGA/2016/ISTH_1591;Clade II)__AVO03647__GPCstabilized
augggccagaucaucaccuucuuccaggaggugccccacgucaucgaggaggugaugaacaucgugcugaucgcccucagccugcuggccauccucaaggggaucuacaacgucgcgaccugcggccuguucgggcugguguccuuccuccugcugugcggccgcagcugcuccacgaccuacaaggggguguacgagcuccagacccuggagcuggacauggccagccucaacaugaccaugccgcuguccugcacgaagaacaacagccaccacuacaucauggucggcaacgagaccggccuggagcucacccugaccaacacguccaucauccagcacaaguucugcaaccugagcgacgcccacaagaagaaccucuacgaccacgcccugauguccaucgugagcaccuuccaccuguccauccccaacuucaaccaguacgaggccaugagcugcgacuucaacgggggcaagaucaccgugcaguacaaccucucccacagcuacgcgaucgacgccgccaaccacugcgggaccgucgccaacggcgugcugcagacguucaugcggauggcguggggcggguccuacaucgcccuggacagcggcugcggguccugggacugcaucaugaccagcuaccaguaccucaucauccagaacaccaccugggaggaccacugccaguucucccggcccagccccaucggcuaccuggggcugcucagccagcgcacgcgggacaucuacaucucccgccggcgccggggcaccuucaccuggacccucagcgacuccgagggcaacgagacgcccgggggcuacugccugacccgcuggaugcugaucgaggccgagcucaagugcuucgggaacaccgccguggccaagugcaacgagaagcacgacgaggaguucugcgacaugcugcggcuguucgacuucaacaagcaggcgauccgccggcucaaggcccccgcccagaugagcauccagcugaucaacaaggccgucaacgcccugaucaacgaccagcucaucaugaagaaccaccuccgcgacaucaugugcaucccguacugcaacuacuccaaguacugguaccugaaccacaccgugacggggcggaccagccugccccgcugcuggcugguguccaacggcagcuaccugaacgagacccacuucuccgacgacaucgagcagcaggcggacaacaugaucaccgagcuccugcagaaggaguacauggaccggcagggcaagacgccccuggggcucgucgaccuguucguguucagcaccuccuucuaccugaucagcaucuuccugcaccucgugaagaucccgacccaccgccacaucaucggcaagcccugccccaagccccaccggcugaaccacaugggggucugcuccugcggccuguacaagcacccgggggugcccgugaaguggaagcgcuga

SEQ ID NO: 4176 - RNA, 1473 nt, Artificial Sequence
  derived and/or modified protein sequence (opt1) from LASV(Lassa virus/H.sapiens-wt/NGA/2016/ISTH_1604;Clade II)__AVO03541__GPCstabilized
augggccagaucgugaccuucuuccaggaggucccccacgugaucgaggagaucaugaacaucgugcugaucacccucagccugcuggccauccucaagggggucuacaaccuggccacgugcggccugaucgggcucaucaccuuccuguuccugugcggccgcuccugcagcaugaccuacaagggguccuaccagcucgagacccuggagcugaacauggagacgcucaacaugaccaugccgcugagcugcaccaagaacaccucccaccacuacauccgggugggcaacgagacgggccuggagcucacccugaccaacaccagcaucaucaaccacaaguucugcaaccuguccgacgcgcacaagaagaaccucuacgaccacagccugauguccaucgugagcacguuccaccuguccauccccaacuucaaccaguacgaggccaugagcugcgacuucaacgggggcaagaucuccauccaguacaaccucagccacgccuacgccggggacgccgcgaagcacugcggcacccuggccaacgggguccugcagaccuucaugcgcauggccuggggcggcuccuacaucgcccucgacagcgggugcggcaacugggacugcaucaugaccuccuaccaguaccugaucauccagaacacgaccugggaggaccacugccaguucagccgccccucccccaucggguaccugggccuccugagccagcggacccgcgagaucuacaucagccggcgccgccggggcaccuucacguggacccuguccgacagcgaggggaacgaggcgccgggcggguacugccugacccgguggaugcucaucgaggccgagcugaagugcuucggcaacgccgccguggccaagugcaacgagaagcacgacgaggaguucugcgacaugcugcgccucuucgacuucaacaagcaggcgauccagcggcugaagacccccgcccagauguccauccagcugaucaacaaggccgugaacgcccucaucaacgaccagcugaucaugaagaaccaccuccgcgacaucaugugcauccccuacugcaacuacagcaaguacugguaccugaaccacacgaccaccggccggaccucccugccccgcugcuggcuggucagcaacggcuccuaccucaacgagacgcacuucagcgacgacaucgagcagcaggccgacaacaugaucaccgagaugcugcagaaggaguacaucgaccggcaggggaagacgccccugggccucguggaccuguucguguucuccaccagcuucuaccugaucuccaucuuccugcaccucgucaagaucccgacccaccgccacaucgugggcaagagcugccccaagccccaccggcugaaccacauggggaucugcuccugcgggcuguacaagcagcccggcgugccgguccgcuggaagcgguga

SEQ ID NO: 4177 - RNA, 1473 nt, Artificial Sequence
  derived and/or modified protein sequence (opt1) from LASV(Lassa virus/H.sapiens-wt/NGA/2016/ISTH_1609;Clade II)__AVO03661__GPCstabilized
augggccagaucgugaccuucuuccaggagaucccccacgucaucgaggaggugaugaacaucgugcugaucacccucagccugcuggccguccucaaggggaucuacaacuucgccacgugcggccugaucgggcugaucaccuuccucuuccugugcggccgcuccugcagcaccaucuacaagggguccuaccagcugcagaagcucgagcugaacauggagacccugaacaugacgaugccgcucagcugcaccaagaacuccagccaccacuacauccgggugggcaacgagaccggccuggagcugacccucacgaacaccuccaucaucagccacaaguucugcaaccuguccgacgcgcacaagaagaaccuguacgaccacgcccucaugagcaucaucuccaccuuccaccugagcauccccaacuucaaccaguacgaggccauguccugcgacuucaacgggggcaagaucagcgugcaguacaaccugucccacagcuacgccggggacgccgcgcgccacugcggcacccucgccaacgggguccugcagacguucaugcggauggccuggggcggcuccuacaucgcccuggacagcgggugcggcaacugggacugcaucaugaccuccuaccaguuccucaucauccagaacaccaccugggaggaccacugccaguucagccgccccagccccaugggguaccugggccugcucucccagcggacgcgcgacaucuacaucagccggcgccgccggggcaccuucaccuggacccucuccgacagcgaggggaaggagacgccgggcggguacugccugacccgguggaugcugaucgaggcggagcucaagugcuucggcaacaccgccguggccaagugcaacgagaagcacgacgaggaguucugcgacaugcugcgccuguucgacuucaacaagcaggccauccagcggcucaagacccccgcccagauguccauccagcugaucaacaaggcggugaacgcccugaucaacgaccagcucaucaugaagaaccaccuccgcgacaucaugugcauccccuacugcaacuacagccaguacugguaccugaaccacacgaucaccggcaagaccucccugcccaagugcuggcuggucagcaacggcuccuaccugaacgagacccacuucagcgacgacaucgagcagcaggccgacaacaugaucacggagaugcuccagaaggaguacaucgaccggcaggggaagaccccgcugggccugguggaccucuucguguucuccaccagcuucuaccugaucuccaucuuccugcaccugaucaagauccccacccaccgccacaucgucggcaagagcugccccaagccccaccggcucaaccgcauggggaucugcuccugcgggcuguacaagcagcccggcgugccggugaaguggaagcgguga

SEQ ID NO: 4178 - RNA, 1473 nt, Artificial Sequence
  derived and/or modified protein sequence (opt1) from LASV(Lassa virus/H.sapiens-wt/NGA/2016/ISTH_1610;Clade II)__AVO03603__GPCstabilized
augggccagaucaucaccuucuuccaggaggugccccacgucaucgaggaggugaugaacaucgugcugaucgcccucagccugcuggccauccucaaggggaucuacaacgucgcgaccugcggccuguucgggcugguguccuuccucuuccugugcggccgcagcugcuccacgaccuacaaggggguguacgagcugcagacccucgagcuggacauggccagccugaacaugaccaugccgcucuccugcacgaagaacaacagccaccacuacaucauggucggcaacgagaccggccuggagcugacccucaccaacacguccaucaucaaccacaaguucugcaaccugagcgacgcccacaagaagaaccuguacgaccacgcccucauguccaucaucagcaccuuccaccuguccauccccaacuucaaccaguacgaggccaugagcugcgacuucaacgggggcaagaucuccgugcaguacaaccugagccacaccuacgcgaucgacgccgccaaccacugcgggaccaucgccaacggcgugcuccagacguucaugcggauggcguggggcggguccuacaucgcccuggacagcggcugcggguccugggacugcaucaugaccagcuaccaguaccugaucauccagaacaccaccugggaggaccacugccaguucucccggcccagccccaucggcuaccucgggcugcugagccagcgcacgcgggacaucuacaucucccgccggcgccggggcaccuucaccuggacccugagcgacuccgagggcaacgagacgcccgggggcuacugccucacccgcuggaugcugaucgaggccgagcugaagugcuucgggaacaccgccgucgccaagugcaacgagaagcacgacgaggaguucugcgacaugcuccggcuguucgacuucaacaagcaggcgauccgccggcugaaggcccccgcccagaugaacauccagcucaucaacaaggccgugaacgcccugaucaacgaccagcugaucaugaagaaccaccuccgcgacaucaugugcaucccguacugcaacuacagcaaguacugguaccugaaccacaccgugacggggcggaccucccugccccgcugcuggcucgucagcaacggcuccuaccugaacgagacccacuucagcgacgacaucgagcagcaggcggacaacaugaucaccgagcugcuccagaaggaguacauggaccggcagggcaagacgccccuggggcugguggaccucuucguguucuccaccagcuucuaccugaucuccaucuuccugcaccugaucaagaucccgacccaccgccacaucgucggcaagcccugccccaagccccaccggcucaaccacauggggaucugcagcugcggccuguacaagcacccgggggugcccgugaaguggaagcgcuga

SEQ ID NO: 4179 - RNA, 1473 nt, Artificial Sequence
  derived and/or modified protein sequence (opt1) from LASV(Lassa virus/H.sapiens-wt/NGA/2018/ISTH_0959;Clade II)__AVV65099__GPCstabilized
augggccagaucaucaccuucuuccaggaggugccccacgucaucgaggaggugaugaacaucgugcugaucgcccucagccugcuggccauccucaaggggaucuacaacgucgugaccugcggccuguucgggcugguguccuuccuccugcugugcggccgcagcugcuccacgaccuacaagggggucuacgagcuccagacccuggagcuggacauggcgagccucaacaugaccaugccgcuguccugcacgaagaacaacagccaccacuacaucauggugggcaacgagaccggccuggagcucacccugaccaacacguccaucaucaaccacaaguucugcaaccugagcgacgcccacaagaagaaccucuacgaccacgcccugauguccaucaucagcaccuuccaccuguccauccccaacuucaaccaguacgaggccaugagcugcgacuucaacgggggcaagaucuccgugcaguacaaccucagccacgccuacgcgaucgacgccgccaaccacugcgggaccaucgccaacggcguccugcagaccuucaugcggauggcguggggcggguccuacaucgcccuggacagcggcugcggguccugggacugcaucaugacgagcuaccaguaccucaucauccagaacaccaccugggaggaccacugccaguucucccgccccagccccaucggcuaccuggggcugcucagccagcggacccgcgacaucuacaucucccggcgccgccggggcacguucaccuggacccucagcgacuccgagggcaacgagacccccgggggcuacugccugacgcgguggaugcugaucgaggccgagcucaagugcuucgggaacaccgccguggccaagugcaacgagaagcacgacgaggaguucugcgacaugcugcgccuguucgacuucaacaagcaggcgauccggcgccucaagacccccgcccagaugagcauccagcugaucaacaaggccgugaacgcccugaucaacgaccagcucaucaugaagaaccaccuccgggacaucaugugcaucccguacugcaacuacuccaaguacugguaccugaaccacaccgucacggggaagaccagccugccccgcugcuggcugguguccaacggcagcuaccugaacgagacccacuucuccgacgacaucgagcagcaggccgacaacaugaucaccgagcuccugcagaaggaguacaucgaccggcagggcaagacgccccuggggcucguggaccuguucgucuucagcaccuccuucuaccugaucagcaucuuccugcaccucgugaagaucccgacccaccgccacgugaucggcaagcccugccccaagccccaccggcugaaccacauggggaucugcuccugcggccuguacaagcacccggggguccccgugaaguggaagcgcuga

SEQ ID NO: 4180 - RNA, 1473 nt, Artificial Sequence
  derived and/or modified protein sequence (opt1) from LASV(Lassa virus/H.sapiens-wt/NGA/2018/ISTH_1024;Clade II)__AVV65105__GPCstabilized
augggccagaucaucaccuucuuccaggaggugccccacgucaucgaggaggugaugaacaucgugcugaucgcccucagccugcuggccauccucaagggggucuacaacguggcgaccugcggccuguucgggcugguguccuuccuccugcugugcggccgcagcugcuccacgaccuacaagggggucuacgagcuccagacccuggagcuggacauggccaaccucaacaugaccaugccgcugagcugcacgaagaacaacucccaccacuacauccgggugggcaacgagaccggccuggagcucacccugaccaacacgagcaucaucaaccacaaguucugcaaccuguccgacgcccacaagaacaaccucuacgaccacgcccugaugagcaucaucuccaccuuccaccugagcauccccaacuucaaccaguacgaggccauguccugcgacuucaacgggggcaagaucagcgugcaguacaaccucucccacgcguacgccgucgacgccgccaaccacugcgggaccaucgcgaacggcgugcugcagaccuucaugcgcauggccuggggcgggagcuacaucgcccuggacuccggcugcgggagcugggacugcaucaugacguccuaccaguaccucaucauccagaacaccaccugggaggaccacugccaguucagccgccccucccccaucggcuaccuggggcugcucagccagcggacccgcgacaucuacaucagccggcgccgccggggcacguucaccuggacccucuccgacagcgagggcaacgagacccccgggggcuacugccugacgcgguggaugcugaucgaggccgagcucaagugcuucgggaacaccgccguggcgaagugcaacgagaagcacgacgaggaguucugcgacaugcugcgccuguucgacuucaacaagcaggccauccggcgccucaagacccccgcccagauguccauccagcugaucaacaaggccgucaacgcccugaucaacgaccagcucaucaugaagaaccaccuccgggacaucaugugcauccccuacugcaacuacagcaaguacugguaccugaaccacaccgugacggggaagaccucccugccccgcugcuggcuggugagcaacggcaccuaccugaacgagacccacuucuccgacgacaucgagcagcaggcggacaacaugaucacggagcuccugcagaaggaguacauggaccggcagggcaagaccccgcuggggcucgucgaccuguucguguucagcaccuccuucuaccugaucagcaucuuccugcaccucgugaagaucccgacccaccgccacgucaucggcaagcccugccccaagccccaccggcugaaccacauggggaucugcuccugcggccuguacaagcacccgggggugcccgugaaguggaagcgcuga

SEQ ID NO: 4181 - RNA, 1473 nt, Artificial Sequence
  derived and/or modified protein sequence (opt1) from LASV(Lassa virus/H.sapiens-wt/NGA/2018/ISTH_1079;Clade II)__AVV65107__GPCstabilized
augggccagaucaucaccuucuuccaggaggugccccacgucaucgaggaggugaugaacaucgugcugaucgcccucagccugcuggccauccucaaggggaucuacaacgucgcgaccugcggccuguucgggcugguggccuuccuccugcugugcggccgcuccugcagcacgaccuacaaggggguguacgagcuccagacccuggagcuggacauggccucccucaacaugaccaugccgcugagcugcacgaagaacaacucccaccacuacaucauggucggcaacgagaccggccuggagcucacccugaccaacacgagcaucaucaaccacaaguucugcaaccuguccgacgcccacaagaagaaccucuacgaccacgcccugaugagcaucaucuccaccuuccaccugagcauccccaacuucaaccaguacgaggcgauguccugcgacuucaacgggggcaagaucagcgugcaguacaaccucucccacaccuacgccguggacgccgccaaccacugcgggaccaucgcgaacggcguccugcagacguucaugcggauggccuggggcgggagcuacaucgcccuggacuccggcugcgggagcugggacugcaucaugaccuccuaccaguaccucaucauccagaacaccaccugggaggaccacugccaguucagccgccccucccccaucggcuaccuggggcugcucagccagcggacgcgcgacaucuacaucagccggcgccgccggggcaccuucaccuggacccucuccgacagcgagggcaacgagacgcccgggggcuacugccugacccgguggaugcugaucgaggccgagcucaagugcuucgggaacaccgccguggcgaagugcaacgagaagcacgacgaggaguucugcgacaugcugcgccuguucgacuucaacaagcaggccauccggcgccucaagacccccgcccagauguccauccagcugaucaacaaggccgugaacgcccugaucaacgaccagcucaucaugaagaaccaccuccgggacaucaugugcauccccuacugcaacuacagcaaguacugguaccugaaccacacggucaccgggcgcaccucccugccccggugcuggcuggugagcaacggcuccuaccugaacgagacccacuucagcgacgacaucgagcagcaggcggacaacaugaucacggagcuccugcagaaggaguacauggaccgccagggcaagaccccgcuggggcucguggaccuguucgucuucuccaccagcuucuaccugaucuccaucuuccugcaccucaucaagaucccgacccaccggcacgugaucggcaagcccugccccaagccccaccgccugaaccacauggggaucugcagcugcggccuguacaagcacccgggggugcccgucaaguggaagcgguga

SEQ ID NO: 4182 - RNA, 1473 nt, Artificial Sequence
  derived and/or modified protein sequence (opt1) from LASV(Lassa virus/H.sapiens-wt/NGA/2018/ISTH_1177;Clade II)__AVV65101__GPCstabilized
augggccagaucaucaccuucuuccaggaggugccccacgucaucgaggaggugaugaacaucgugcugaucgcccucagccugcuggccauccucaaggggaucuacaacgucgcgaccugcggccuguucgggcugguguccuuccuccugcugugcggccgcagcugcuccacgaccuacaaggggguguacgagcuccagacccuggagcuggacauggccagccucaacaugaccaugccgcuguccugcacgaagaacaacagccaccacuacauccgggucggcaacgagaccggccuggagcucacccugaccaacacguccaucaucgaccacaaguucugcaaccugagcgacgcccacaagaagaaccucuacgaccacgcccugauguccaucaucagcaccuuccaccuguccauccccaacuucaaccaguacgaggccaugagcugcgacuucaacgggggcaagaucuccgugcaguacaaccucagccacaccuacgcgguggacgccgccaaccacugcgggaccaucgccaacggcguccugcagacguucaugcgcauggcguggggcggguccuacaucgcccuggacagcggcugcggguccugggacugcaucaugaccagcuaccaguaccucaucauccagaacaccaccugggaggaccacugccaguucucccggcccagccccaucggcuaccuggggcugcucagccagcgcacgcgggacaucuacaucucccgccggcgccggggcaccuucaccuggacccucagcgacuccgagggcaacgagacgcccgggggcuacugccugacccgcuggaugcugaucgaggccgagcucaagugcuucgggaacaccgccguggccaagugcaacgagaagcacgacgaggaguucugcgacaugcugcggcuguucgacuucaacaagcaggcgauccgccggcucaagacccccgcccagaugagcauccagcugaucaacaaggccgugaacgcccugaucaacgaccagcucaucaugaagaaccaccuccgcgacaucaugugcauccccuacugcaacuacuccaaguacugguaccugaaccacacgaucaccgggcggaccagccugccccgcugcuggcuggucuccaacggcagcuaccugaacgagacccacuucuccgacgacaucgagcagcaggccgacaacaugaucacggagcuccugcagaaggaguacauggaccggcagggcaagaccccgcuggggcucguggaccuguucguguucagcaccuccuucuaccugaucagcaucuuccugcaccucgucaagaucccgacccaccgccacgugaucggcaagcccugccccaagccccaccggcugaaccacauggggaucugcuccugcggccuguacaagcacccgggggugcccgucaaguggaagcgcuga

SEQ ID NO: 4183 - RNA, 1473 nt, Artificial Sequence
  derived and/or modified protein sequence (opt1) from LASV(Lassa virus/H.sapiens-wt/NGA/2018/ISTH_1375;Clade II)__AVV65115__GPCstabilized
augggccagaucaucaccuucuuccaggaggugccccacgucaucgaggaggugaugaacaucgugcugaucgcccucagccugcuggccauccucaaggggaucuacaacaucgcgaccugcggccuguucgggcuggucuccuuccuccugcugugcggccgcagcugcuccacgaccuacaaggggguguacgagcuccagacccuggagcuggacauggccagccucaacaugaccaugccgcuguccugcacgaagaacaacagccaccacuacaucauggugggcaacgagaccggccuggagcucacccugaccaacacguccaucaucaaccaccgguucugcaaccugagcgacgcccacaagaagaaccucuacgaccacgcccugauguccaucaucagcaccuuccaccuguccauccccaacuucaaccaguacgaggccaugagcugcgacuucaacgggggcaagaucuccguccaguacaaccucagccacgcguacgccguggacgccgccaaccacugcgggaccaucgcgaacggcgugcugcagaccuucaugcgcauggccuggggcggguccuacaucgcccuggacagcggcugcggguccugggacugcaucaugacgagcuaccaguaccucaucauccagaacaccaccugggaggaccacugccaguucucccggcccagccccaucggcuaccuggggcugcucagccagcgcacccgggacaucuacaucucccgccggcgccggggcacguucaccuggacccucagcgacuccgagggcaacgagacccccgggggcuacugccugacgcgcuggaugcugaucgaggccgagcucaagugcuucgggaacaccgccgucgcgaagugcaacgagaagcacgacgaggaguucugcgacaugcugcggcuguucgacuucaacaagcaggccauccgccggcucaagacccccgcccagaugagcauccagcugaucaacaaggccgugaacgcccugaucaacgaccagcucaucaugaagaaccaccuccgcgacaucaugugcaucccguacugcaacuacuccaaguacugguaccugaaccacaccgugacggggaagaccagccugccccggugcuggcuggucuccaacggcagcuaccugaacgagacccacuucuccgacgacaucgagcagcaggcggacaacaugaucaccgagcuccugcagaaggaguacaucgaccgccagggcaagacgccccuggggcucguggaccuguucguguucagcaccuccuucuaccugaucagcaucuuccugcaccucgucaagaucccgacccaccggcacgugaucggcaagcccugccccaagccccaccgccugaaccacauggggaucugcuccugcggccuguacaagcacccgggggugcccgucaaguggaagcgguga

SEQ ID NO: 4184 - RNA, 1473 nt, Artificial Sequence
  derived and/or modified protein sequence (opt1) from LASV(Lassa virus/H.sapiens-wt/NGA/2018/ISTH_1381;Clade II)__AVV65111__GPCstabilized
augggccagaucgugaccuucuuccaggaggucccccacgugaucgaggaggugaugaacaucguccugaucgcccucagccugcuggccauccucaaggggaucuacaacguggcgaccugcggccuguucgggcugguguccuuccuccugcugugcggccgcagcugcuccacgaccuacaagggggucuacgagcuccagacccuggagcuggacauggccagccucaacaugaccaugccgcuguccugcacgaagaacaacagccaccacuacaucauggugggcaacgagaccggccuggagcucacccugaccaacacguccaucaucaaccacaaguucugcaaccugagcgacgcccacaagaagaaccucuacgaccacgcccugauguccaucaucagcaccuuccaccuguccauccccaacuucaaccaguacgaggccaugagcugcgacuucaacgggggcaagaucuccgugcaguacaaccucagccacaccuacgcggucgacgccgccaaccacugcgggaccaucgccaacggcgugcugcagacguucaugcggauggcguggggcggguccuacaucgcccuggacagcggcugcggguccugggacugcaucaugaccagcuaccaguaccucaucauccagaacaccaccugggaggaccacugccaguucucccgccccagccccaucggcuaccuggggcugcucagccagcggacgcgcgacaucuacaucucccggcgccgccggggcaccuucaccuggacccucagcgacuccgagggcaacgagacgcccgggggcuacugccugacccgguggaugcugaucgaggccgagcucaagugcuucgggaacaccgccguggccaagugcaacgagaagcacgacgaggaguucugcgacaugcugcgccuguucgacuucaacaagcaggcgauccggcgccucaagacccccgcccagaugagcauccagcugaucaacaaggccgucaacgcccugaucaacgaccagcucaucaugaagaaccaccuccgggacaucaugugcauccccuacugcaacuacuccaaguacugguaccugaaccacacggugaccgggaagaccagccugccccgcugcuggcugguguccaacggcagcuaccugaacgagacccacuucuccgacgacaucgagcagcaggccgacaacaugaucacggagcuccugcagaaggaguacauggaccggcagggcaagaccccgcuggggcucgucgaccuguucguguucagcaccuccuucuaccugaucagcaucuuccugcaccucgugaagaucccgacccaccgccacgucgugggcaagcccugccccaagccccaccggcugaaccacauggggaucugcuccugcggccuguacaagcacccgggggugcccguccgcuggaagcgguga

SEQ ID NO: 4185 - RNA, 1473 nt, Artificial Sequence
  derived and/or modified protein sequence (opt1) from LASV(Lassa virus/H.sapiens-wt/NGA/2018/ISTH_1643;Clade II)__AVV65119__GPCstabilized
augggccagaucaucaccuucuuccaggaggugccccacgucaucgaggaggugaugaacaucgugcugaucgcccucagccugcuggccauccucaaggggaucuacaacgucgcgaccugcggccuguucgggcugguguccuuccuccugcugugcggccgcagcugcuccacgaccuacaaggggguguacgagcuccagacccuggagcuggacauggccagccucaacaugaccaugccgcuguccugcacgaagaacaacagccaccacuacaucauggucggcaacgagaccggccuggagcucacccugaccaacacguccaucaucaaccacaaguucugcaaccugagcgacgcccacaagaagaaccucuacgaccacgcccugauguccaucaucagcaccuuccaccuguccauccccaacuucaaccaguacgaggccaugagcugcgacuucaacgggggcaagaucuccgugcaguacaaccucagccacaccuacgcgguggacgccgccaaccacugcgggaccaucgccaacggcguccugcagacguucaugcggauggcguggggcggguccuacaucgcccuggacagcggcugcggguccugggacugcaucaugaccagcuaccaguaccucaucauccagaacaccuccugggaggaccacugccaguucagccgccccagccccaucggcuaccuggggcugcucucccagcggacccgcgacaucuacaucagccggcgccgccggggcacguucaccuggacccucuccgacagcgagggcaacgagacccccgggggcuacugccugacgcgguggaugcugaucgaggccgagcucaagugcuucgggaacaccgccguggccaagugcaacgagaagcacgacgaggaguucugcgacaugcugcgccuguucgacuucaacaagcaggcgauccggcgccucaagacccccgcccagauguccauccagcugaucaacaaggccgugaacgcccugaucaacgaccagcucaucaugaagaaccaccuccgggacaucaugugcauccccuacugcaacuacagcaaguacugguaccugaaccacaccgucacggggaagaccucccugccccgcugcuggcuggugagcaacggcaccuaccugaacgagacccacuucuccgacgacaucgagcagcaggccgacaacaugaucacggagcuccugcagaaggaguacaucgaccggcagggcaagaccccgcuggggcucguggaccuguucgucuucagcaccuccuucuaccugaucagcaucuuccugcaccucgugaagaucccgacccaccgccacgugaucggcaagcccugccccaagccccaccggcugaaccacauggggaucugcuccugcggccuguacaagcacccggggguccccgugaaguggaagcgcuga

SEQ ID NO: 4186 - RNA, 1473 nt, Artificial Sequence
  derived and/or modified protein sequence (opt1) from LASV(LASV003-NIG-2008;Clade II)__AIT17580__GPCstabilized
augggccagaucaucaccuucuuccaggaggugccccacgucaucgaggaggugaugaacaucgugcugaucgcccucagccugcuggccauccucaaggggaucuacaacgucgcgaccugcggccuguucgggcugguguccuuccuccugcugugcggccgcagcugcuccacgaccuacaaggggguguacgagcuccagacccuggagcuggacauggccagccucaacaugaccaugccgcuguccugcacgaagaacaacagccaccacuacaucauggucggcaacgagaccggccuggagcucacccugaccaacacguccaucaucaaccacaaguucugcaaccugagcgacgcccacaagaagaaccucuacgaccacgcccugauguccaucaucagcaccuuccaccuguccauccccaacuucaaccaguacgaggccaugagcugcgacuucaacgggggcaagaucuccgugcaguacaaccucagccacaccuacgcgguggacgccgccaaccacugcgggaccaucgccaacggcguccugcagacguucaugcggauggcguggggcggguccuacaucgcccuggacagcggcugcggguccugggacugcaucaugaccagcuaccaguaccucaucauccagaacaccaccugggaggaccacugccaguucucccgccccagccccaucggcuaccuggggcugcucagccagcggacgcgcgacaucuacaucucccggcgccgccggggcaccuucaccuggacccucagcgacuccgagagcaacgagacgccgggcggguacugccugacccgguggaugcugaucgaggccgagcucaagugcuucggcaacaccgccguggccaagugcaacgagaagcacgacgaggaguucugcgacaugcugcgccuguucgacuucaacaagcaggcgauccggcgccucaaggcccccgcccagauguccauccagcugaucaacaaggccgugaacgcccugaucaacgaccagcucaucaugaagaaccaccuccgggacaucaugugcauccccuacugcaacuacagcaaguacugguaccugaaccacaccgucacgggccgcaccucccugccccggugcuggcuggugagcaacggguccuaccugaacgagacccacuucagcgacgacaucgagcagcaggcggacaacaugaucaccgagcuccugcagaaggaguacauggaccgccagggcaagacgccccugggccucguggaccuguucgucuucuccaccagcuucuaccugaucuccaucuuccugcaccucgugaagaucccgacccaccggcacgugaucgggaagcccugccccaagccccaccgccugaaccacaugggcaucugcagcugcgggcuguacaagcacccgggcguccccgugaaguggaagcgguga

SEQ ID NO: 4187 - RNA, 1473 nt, Artificial Sequence
  derived and/or modified protein sequence (opt1) from LASV(LASV006-NIG-2008;Clade II)__AIT17584__GPCstabilized
augggccagaucaucaccuucuuccaggaggugccccaggucaucgaggaggugaugaacaucgugcugaucgcccucagccugcuggccauccucaaggggaucuacaacgucgcgaccugcggccuguucgggcugguguccuuccuccugcugugcggccgcagcugcuccacgaccuacaaggggguguacgagcuccagacccuggagcuggacauggccagccucaacaugaccaugccgcuguccugcacgaagaacaacagccaccacuacaucauggucggcaacgagaccggccuggagcucacccugaccaaccaguccaucaucaaccacaaguucugcaaccugagcgacgcccacaagaagaaccucuacgaccacgcccugauguccaucaucagcacguuccaccuguccauccccaacuucaaccaguacgaggccaugagcugcgacuucaacgggggcaagaucuccgugcaguacaaccucagccacuccuucgcgguggacgccgccaaccacugcgggaccaucgccaacggcguccugcagaccuucaugcggauggcguggggcgggagcuacaucgcccuggacuccggcugcgggagcugggacugcaucaugaccuccuaccaguaccucaucauccagaacacgaccugggaggaccacugccaguucagccgccccagccccaucggcuaccuggggcugcucucccagcggacccgcgacaucuacaucagccggcgccgccggggcaccuucacguggacccucuccgacagcgagggcaacgagacccccgggggcuacugccugacccgguggaugcugaucgaggccgagcucaagugcuucgggaacacggccguggccaagugcaacgagaagcacgacgaggaguucugcgacaugcugcgccuguucgacuucaacaagcaggcgauccggcgccucaagacccccgcccagauguccauccagcugaucaacaaggccgugaacgcccugaucaacgaccagcucaucaugaagaaccaccuccgggacaucaugugcauccccuacugcaacuacagcaaguacugguaccugaaccacaccaagaccgggaagacgucccugccccgcugcuggcuggucagcaacggcuccuaccugaacgagacccacuucagcgacgacaucgagcagcaggccgacaacaugaucaccgagcuccugcagaaggaguacauggaccggcagggcaagaccccgcuggggcucguggaccuguucguguucuccacgagcuucuaccugaucuccaucuuccugcaccucgucaagaucccgacccaccgccacgugaucggcaagcccugccccaagccccaccggcugaaccacauggggaucugcagcugcggccuguacaagcacccgggggugcccgucaaguggaagcgcuga

SEQ ID NO: 4188 - RNA, 1473 nt, Artificial Sequence
  derived and/or modified protein sequence (opt1) from LASV(LASV035-NIG-2009;Clade II)__AIT17588__GPCstabilized
augggccagaucaucaccuucuuccaggaggugccccacgucaucgaggaggugaugaacaucgugcugaucgcccucagccugcuggccauccucaaggggaucuacaacgucgcgaccugcggccuguucgggcugguguccuuccuccugcugugcggccgcagcugcuccacgaccuacaaggggguguacgagcuccagacccuggagcuggacauggccagccucaacaugaccaugccgcuguccugcacgaagaacaacagccaccacuacaucauggucggcaacgagaccggccuggagcucacccugaccaacacguccaucaucaaccacaaguucugcaaccugagcgacgcccacaagaagaaccucuacgaccacgcccugauguccaucaucagcaccuuccaccuguccauccccaacuucaaccaguacgaggccaugagcugcgacuucaacgggggcaagaucuccgugcaguacaaccucagccacgcguacgccguggacgccgccaaccacugcgggaccaucgcgaacggcguccugcagaccuucaugcggauggccuggggcggguccuacaucgcccuggacagcggcugcggguccugggacugcaucaugacgagcuaccaguaccucaucauccagaacaccaccugggaggaccacugccaguucucccgccccagccccaucggcuaccuggggcugcucagccagcggacccgcgacaucuacaucucccggcgccgccggggcacguucaccuggacccucagcgacuccgagggcaacgagacccccgggggcuacugccugacgcgguggaugcugaucgaggccgagcucaagugcuucgggaacaccgccguggcgaagugcaacgagaagcacgacgaggaguucugcgacaugcugcgccuguucgacuucaacaagcaggccauccggcgccucaaggcccccgcccagaugagcauccagcugaucaacaaggccgugaacgcgcugaucaacgaccagcucaucaugaagaaccaccuccgggacaucaugugcauccccuacugcaacuacuccaaguacugguaccugaaccacaccgucaccgggaagacgagccugccccgcugcuggcugguguccaacggcagcuaccugaacgagacccacuucuccgacgacaucgagcagcaggccgacaacaugaucaccgagcuccugcagaaggaguacaucgaccggcagggcaagaccccgcuggggcucguggaccuguucgucuucagcacguccuucuaccugaucagcaucuuccugcaccucgugaagaucccgacccaccgccacgugaucggcaagcccugccccaagccccaccggcugaaccacauggggaucugcuccugcggccuguacaagcacccggggguccccgugaaguggaagcgcuga

SEQ ID NO: 4189 - RNA, 1473 nt, Artificial Sequence
  derived and/or modified protein sequence (opt1) from LASV(LASV042-NIG-2009;Clade II)__AIT17592__GPCstabilized
augggccagaucaucaccuucuuccaggaggugccccacgucaucgaggaggugaugaacaucgugcugaucgcccucagccugcuggccauccucaaggggaucuacaacgucgcgaccugcggccuguucgggcugguguccuuccuccugcugugcggccgcagcugcuccacgaccuacaaggggguguacgagcuccagacccuggagcuggacauggccagccucaacaugaccaugccgcuguccugcacgaagaacaacagccaccacuacaucauggucggcaacgagaccggccuggagcucacccugaccaacacguccaucaucaaccacaaguucugcaaccugagcgacgcccacaagaagaaccucuacgaccacacccugauguccaucaucagcaccuuccaccuguccauccccaacuucaaccaguacgaggccaugagcugcgacuucaacgggggccggaucuccgugcaguacaaccucagccacgccuacgcgguggacgccgccaaccacugcgggaccaucgccaacggcguccugcagacguucaugcgcauggcguggggcggguccuacaucgcccuggacagcggcugcggguccugggacugcaucaugaccagcuaccaguaccucaucauccagaacaccaccugggaggaccacugccaguucucccggcccagccccaucggcuaccuggggcugcucagccagcgcacgcgggacaucuacaucucccgccggcgccggggcaccuucaccuggacccucagcgacuccgagggcaacgagacgcccgggggcuacugccugacccgcuggaugcugaucgaggccgagcucaagugcuucgggaacaccgccguggccaagugcaacgagaagcacgacgaggaguucugcgacaugcugcggcuguucgacuucaacaagcaggcgauccgccggcucaagacccccgcccagaugagcauccagcugaucaacaaggccgugaacgcccugaucaacgaccagcucaucaugaagaaccaccuccgcgacaucaugugcauccccuacugcaacuacuccaaguacugguaccugaaccacacgaucaccgggaagaccagccugccccggugcuggcuggucuccaacggcagcuaccugaacgagacccacuucuccgacgacaucgagcagcaggccgacaacaugaucacggagcuccugcagaaggaguacaucgaccgccagggcaagaccccgcuggggcucguggaccuguucguguucagcaccuccuucuaccugaucagcaucuuccugcaccucgucaagaucccgacccaccggcacguggugggcaagcccugccccaagccccaccgccugaaccacauggggaucugcuccugcggccuguacaagcacccggggguccccgugaaguggaagcgguga

SEQ ID NO: 4190 - RNA, 1473 nt, Artificial Sequence
  derived and/or modified protein sequence (opt1) from LASV(LASV045-NIG-2009;Clade II)__AIT17596__GPCstabilized
augggccagaucaucaccuucuuccaggaggugccccacgucaucgaggaggugaugaacaucgugcugaucgcccucagccugcuggccauccucaaggggaucuacaacgucgcgaccugcggccuguucgggcugguguccuuccuccugcugugcggccgcagcugcuccacgaccuacaaggggguguacgagcuccagacccuggagcuggacauggccagccucaacaugaccaugccgcuguccugcacgaagaacaacagccaccacuacaucauggucggcaacgagaccggccuggagcucacccugaccaacacguccaucaucaaccacaaguucugcaaccugagcgacgcccacaagaagaaccucuacgaccacgcccugauguccaucaucagcaccuuccaccuguccauccccaacuucaaccaguacgaggccaugagcugcgacuucaacgggggcaagaucuccgugcaguacaaccucagccacaccuacgcgguggacgccgccaaccacugcgggaccaucgccaacggcguccugcagacguucaugcggauggcguggggcggguccuacaucgcccuggacagcggcugcggguccugggacugcaucaugaccagcuaccaguaccucaucauccagaacaccuccugggaggaccacugccaguucagccgccccagccccaucggcuaccuggggcugcucucccagcggacccgcgacaucuacaucagccggcgccgccggggcacguucaccuggacccucuccgacagcgagggcaacgagacccccgggggcuacugccugacgcgguggaugcugaucgaggccgagcucaagugcuucgggaacaccgccguggccaagugcaacgagaagcacgacgaggaguucugcgacaugcugcgccuguucgacuucaacaagcaggcgauccggcgccucaagacccccgcccagauguccauccagcugaucaacaaggccgugaacgcccugaucaacgaccagcucaucaugaagaaccaccuccgggacaucaugugcaucccguacugcaacuacagcaaguacugguaccugaaccacaccgucacggggaagaccucccugccccgcugcuggcuggugagcaacggcuccuaccugaacgagacccacuucagcgacgacaucgagcagcaggccgacaacaugaucaccgagcuccugcagaaggaguacaucgaccggcagggcaagacgccccuggggcucguggaccuguucgucuucuccaccagcuucuaccugaucuccaucuuccugcaccucgugaagaucccgacccaccgccacgugaucggcaagcccugccccaagccccaccggcugaaccacauggggaucugcagcugcggccuguacaagcacccggggguccccgugaaguggaagcgcuga

SEQ ID NO: 4191 - RNA, 1473 nt, Artificial Sequence
  derived and/or modified protein sequence (opt1) from LASV(LASV046-NIG-2009;Clade II)__AIT17600__GPCstabilized
augggccagaucaucaccuucuuccaggaggugccccacgucaucgaggaggugaugaacaucgugcugaucgcccucagccugcuggccauccucaaggggaucuacaacgucgcgaccugcggccuguucgggcugguguccuuccuccugcugugcggccgcagcugcuccacgaccuacaaggggguguacgagcuccagacccuggagcuggacauggccagccucaacaugaccaugccgcuguccugcacgaagaacaacagccaccacuacaucauggucggcaacgagaccggccuggagcucacccugaccaacacguccaucaucaaccacaaguucugcaaccugagcgacgcccacaagaagaaccucuacgaccacgcccugauguccaucaucagcaccuuccaccuguccauccccaacuucaaccaguacgaggccaugagcugcgacuucaacgggggcaagaucuccgugcaguacaaccucagccacgcguacgccggggacgccgccaaccacugcggcaccaucgcgaacggggugcugcagaccuucaugcggauggccuggggcggcuccuacaucgcccuggacagcgggugcggcuccugggacugcaucaugacgagcuaccaguaccucaucauccagaacaccaccugggaggaccacugccaguucucccgccccagccccaucggguaccugggccugcucagccagcggacccgcgacaucuacaucucccggcgccgccggggcacguucaccuggacccucagcgacuccgaggggaacgagaccccgggcggguacugccugacgcgguggaugcugaucgaggccgagcucaagugcuucggcaacaccgccgucgcgaagugcaacgagaagcacgacgaggaguucugcgacaugcugcgccuguucgacuucaacaagcaggccauccggcgccucaagacccccgcccagaugagcauccagcugaucaacaaggccgugaacgcccugaucaacgaccagcucaucaugaagaaccaccuccgggacaucaugugcauccccuacugcaacuacuccaaguacugguaccugaaccacaccgugacgggcaagaccagccugccccgcugcuggcuggucuccaacggcagcuaccugaacgagacccacuucuccgacgacaucgagcagcaggcggacaacaugaucaccgagcuccugcagaaggaguacaucgaccggcaggggaagacgccccugggccucguggaccuguucguguucagcaccuccuucuaccugaucagcaucuuccugcaccucgucaagaucccgacccaccgccacgugaucgggaagcccugccccaagccccaccggcugaaccacaugggcaucugcuccugcgggcuguacaagcacccgggcgugcccgucaaguggaagcgcuga

SEQ ID NO: 4192 - RNA, 1473 nt, Artificial Sequence
  derived and/or modified protein sequence (opt1) from LASV(LASV049-NIG-2009;Clade II)__AIT17604__GPCstabilized
augggccagaucaucaccuucuuccaggaggugccccacgucaucgaggaggugaugaacaucgugcugaucgcccucagccugcuggccauccucaaggggaucuacaacgucgcgaccugcggccuguucgggcugguguccuuccuccugcugugcggccgcagcugcuccacgaccuacaaggggguguacgagcuccagacccuggagcuggacaugaccagccucaacaugacgaugccgcuguccugcaccaagaacaacagccaccacuacaucauggucggcaacgagaccggccuggagcucacccugacgaacaccuccaucaucaaccacaaguucugcaaccugagcgacgcccacaagaaggaccucuacgaccacgcccugauguccaucaucagcaccuuccaccuguccauccccaacuucaaccaguacgaggccaugagcugcgacuucaacgggggcaagaucuccgugcaguacaaccucagccacaccuacgccguggacgcggccaagcacugcgggacgaucgccaacggcguccugcagaccuucaugcggauggccuggggcggguccuacaucgcgcuggacagcggcugcggguccugggacugcaucaugaccagcuaccaguaccucaucauccagaacaccacgugggaggaccacugccaguucucccgccccagccccgugggcuaccuggggcugcucagccagcggacccgcgacaucuacaucucccggcgccgccggggcaccuucaccuggacgcucagcgacuccgagggcaacgagacccccgggggcuacugccugacccgguggaugcugaucgaggccgagcucaagugcuucgggaacaccgccguggccaagugcaacgagaagcacgacgaggaguucugcgacaugcugcgccuguucgacuucaacaagcaggccauccggcgccucaagacgcccgcgcagaugagcauccagcugaucaacaaggccgucaacgcccugaucaacgaccagcucaucaugaagaaccaccuccgggacaucaugugcauccccuacugcaacuacuccaaguacugguaccugaaccacaccgugaccgggaagaccagccugccccgcugcuggcugguguccaacggcagcuaccugaacgagacgcacuucuccgacgacaucgagcagcaggccgacaacaugaucaccgagcuccugcagaaggaguaccuggaccggcagggcaagaccccgcucgggcuggucgaccuguucguguucagcaccuccuucuaccugaucagcaucuuccuccaccuggugaagaucccgacgcaccgccacgucaucggcaagcccugccccaagccccaccggcugaaccacauggggaucugcuccugcggccucuacaagcacccgggggugcccgugaaguggaagcgcuga

SEQ ID NO: 4193 - RNA, 1473 nt, Artificial Sequence
  derived and/or modified protein sequence (opt1) from LASV(LASV052-NIG-2008;Clade II)__AIT17608__GPCstabilized
augggccagaucaucaccuucuuccaggaggugccccacgucaucgaggaggugaugaacaucgugcugaucgcccucagccugcuggccauccucaaggggaucuacaacgucgcgaccugcggccuguucgggcugguguccuuccuccugcugugcggccgcagcugcuccacgaccuacaaggggguguacgagcuccagacccuggagcuggacauggccagccucaacaugaccaugccgcuguccugcacgaagaacaacagccaccacuacaucauggucggcaacgagaccggccuggagcucacccugaccaacacguccaucaucaaccacaaguucugcaaccugagcgacgcccacaagcggaaccucuacaaccacgcccugauguccaucaucagcaccuuccaccuguccauccccaacuucaaccaguacgaggccaugagcugcgacuucaacgggggcaagaucuccgugcaguacaaccucagccacaccuacgcgguggacgccgccaaccacugcgggaccaucgccaacggcguccugcagacguucaugcgcauggcguggggcggguccuacaucgcccuggacagcggcugcggguccugggacugcaucaugaccagcuaccaguaccucaucauccagaacaccaccugggaggaccacugccaguucucccggcccagccccaucggcuaccuggggcugcucagccagcgcacgcgggacaucuacaucucccgccggcgccggggcaccuucaccuggacccucagcgacuccgagggcaacgagacgcccgggggcuacugccugacccgcuggaugcugaucgaggccgagcucaagugcuucgggaacaccgccguggccaagugcaacgagaagcacgacgaggaguucugcgacaugcugcggcuguucgacuucaacaagcaggcgauccgccggcucaagacccccgcccagaugagcauccagcugaucaacaaggccgugaacgcccugaucaacgaccagcucaucaugaagaaccaccuccgcgacaucaugugcauccccuacugcaacuacuccaaguacugguaccugaaccacacggucaccgggaagaccagccugccccggugcuggcugguguccaacggcagcuaccugaacgagacccacuucuccgacgacaucgagcagcaggccgacaacaugaucacggagcuccugcagaaggaguacaucgaccgccagggcaagaccccgcuggggcucguggaccuguucgucuucagcaccuccuucuaccugaucagcaucuuccugcaccucgugaagaucccgacccaccggcacaucaucggcaagcccugccccaagccccaccgccugaaccacauggggaucugcuccugcggccuguacaagcacccgggggugcccgucaaguggcggcgcuga

SEQ ID NO: 4194 - RNA, 1473 nt, Artificial Sequence
  derived and/or modified protein sequence (opt1) from LASV(LASV056-NIG-2008;Clade II)__AIT17612__GPCstabilized
augggccagaucaucaccuucuuccaggaggugccccacgucaucgaggaggugaugaacaucgugcugaucgcccucagccugcuggccauccucaaggggaucuacaacgucgcgaccugcggccuguucgggcugguguccuuccuccugcugugcggccgcagcugcuccacgaccuacaaggggguguacgagcuccagacccuggagcuggacauggccagccucaacaugaccaugccgcuguccugcacgaagaacaacagccaccacuacauccgggucggcaacgagaccggccuggagcucacccugaccaacacguccaucaucaaccacaaguucugcaaccugagcgacgcccacaagaagaaccucuacgaccacucccugaugagcaucaucuccaccuuccaccugagcauccccaacuucaaccaguacgaggccauguccugcgacuucaacgggggcaagaucagcgugcaguacaaccucucccacaccuacgccguggacgcggccaaccacugcgggaccaucgccaacggcguccugcagacguucaugcgcauggccuggggcgggagcuacaucgcgcuggacuccggcugcgggaacugggacugcaucaugaccagcuaccaguaccucaucauccagaacaccaccugggaggaccacugccaguucucccggcccagccccaucggcuaccuggggcugcucagccagcgcacgcgggacaucuacaucucccgccggcgccggggcaccuucaccuggacccucagcgacuccgagggcaacgagacgcccgggggcuacugccugacccgcuggaugcugaucgaggccgagcucaagugcuucgggaacaccgccguggccaagugcaacgagaagcacgacgaggaguucugcgacaugcugcggcuguucgacuucaacaagcaggccauccgccggcucaagacccccgcgcagaugagcauccagcugaucaacaaggccgugaacgcccugaucaacgaccagcucaucaugaagaaccaccuccgcgacaucaugugcauccccuacugcaacuacuccaaguacugguaccugaaccacacggucaccgggaagaccagccugccccggugcuggcugguguccaacggcagcuaccugaacgagacccacuucuccgacgacaucgagcagcaggccgacaacaugaucacggagcuccugcagaaggaguacaucgaccgccagggcaagaccccgcuggggcucguggaccuguucgucuucagcaccuccuucuaccugaucagcaucuuccugcaccucgugaagaucccgacccaccggcacguggucggcaagcccugccccaagccccaccgccugaaccacauggggaucugcuccugcggccuguacaagcacccgggggugcccgugaaguggaagcgguga

SEQ ID NO: 4195 - RNA, 1473 nt, Artificial Sequence
  derived and/or modified protein sequence (opt1) from LASV(LASV058-NIG-2008;Clade II)__AIT17616__GPCstabilized
augggccagaucaucaccuucuuccaggaggugccccacgucaucgaggaggugaugaacaucgugcugaucgcccucagccugcuggccauccucaaggggaucuacaacgucgcgaccugcggccuguucgggcugguguccuuccuccugcugugcggccgcagcugcuccacgaccuacaaggggguguacgagcuccagacccuggagcuggacauggccagccucaacaugaccaugccgcuguccugcacgaagaacaacagccaccacuacaucauggucggcaacgagaccggccuggagcucacccugaccaacacguccaucaucaaccacaaguucugcaaccugagcgacgcccacaagaagaaccucuacgaccacgcccugauguccaucaucagcaccuuccaccuguccauccccaacuucaaccaguacgaggccaugagcugcgacuucaacgggggcaagaucuccgugcaguacaaccucagccacgcguacgccguggacgccgccaaccacugcgggaccaucgcgaacggcguccugcagaccuucaugcggauggccuggggcggguccuacaucgcccuggacagcggcugcggguccugggacugcaucaugacgagcuaccaguaccucaucauccagaacaccaccugggaggaccacugccaguucucccgccccagccccaucggcuaccuggggcugcucagccagcggacccgcgacaucuacaucucccggcgccgccggggcacguucaccuggacccucagcgacuccgagggcaacgagacccccgggggcuacugccugacgcgguggaugcugaucgaggccgagcucaagugcuucgggaacaccgccguggcgaagugcaacgagaagcacgacgaggaguucugcgacaugcugcgccuguucgacuucaacaagcaggccauccggcgccucaagacccccgcccagaugagcauccagcugaucaacaaggccgugaacgcccugaucaacgaccagcucaucaugaagaaccaccuccgggacaucaugugcaucccguacugcaacuacuccaaguacugguaccugaaccacaccgucacggggaagaccagccugccccgcugcuggcugguguccaacggcagcuaccugaacgagacccacuucuccgacgacaucgagcagcaggcggacaacaugaucaccgagcuccugcagaaggaguacaucgaccggcagggcaagacgccccuggggcucguggaccuguucgucuucagcaccuccuucuaccugaucagcaucuuccugcaccucgugaagaucccgacccaccgccacgugaucggcaagcccugccccaagccccaccggcugaaccacauggggaucugcuccugcggccuguacaagcacccggggguccccgugaaguggaagcgcuga

SEQ ID NO: 4196 - RNA, 1473 nt, Artificial Sequence
  derived and/or modified protein sequence (opt1) from LASV(LASV063-NIG-2009;Clade II)__AIT17620__GPCstabilized
augggccagaucaucaccuucuuccaggaggugccccacgucaucgaggaggugaugaacaucgugcugaucgcccucagccugcuggccauccucaaggggaucuacaacgucgcgaccugcggccuguucgggcugguguccuuccuccugcugugcggccgcagcugcuccacgaccuacaaggggguguacgagcuccagacccuggagcuggacauggccagccucaacaugaccaugccgcuguccugcacgaagaacaacagccaccacuacaucauggucggcaacgagaccggccuggagcucacccugaccaacacguccaucaucagccacaaguucugcaaccuguccgacgcccacaagaagaaccucuacgaccacgcccugaugagcaucaucuccaccuuccaccugagcauccccaacuucaaccaguacgaggccauguccugcgacuucaacgggggcaagaucagcgugcaguacaaccucucccacgcguacgccaucgacgccgccaaccacugcgggaccguggcgaacggcguccugcagaccuucaugcggauggccuggggcgggagcuacaucgcccuggacuccggcugcgggagcugggacugcaucaugacguccuaccaguaccucaucauccagaacaccaccugggaggaccacugccaguucagccgccccagccccaucggcuaccuggggcugcucucccagcggacccgcgacaucuacaucagccggcgccgccggggcacguucaccuggacccucuccgacagcgagggcaacgagacccccgggggcuacugccugacgcgguggaugcugaucgaggccgagcucaagugcuucgggaacaccgccguggcgaagugcaacgagaagcacgacgaggaguucugcgacaugcugcgccuguucgacuucaacaagcaggccauccggcgccucaaggcccccgcccagauguccauccagcugaucaacaaggccgugaacgcgcugaucaacgaccagcucaucaugaagaaccaccuccgggacaucaugugcauccccuacugcaacuacagcaaguacugguaccugaaccacaccgucaccgggaagacgucccugccccgcugcuggcuggugagcaacggcuccuaccugaacgagacccacuucagcgacgacaucgagcagcaggccgacaacaugaucaccgagcuccugcagaaggaguacauggaccggcagggcaagaccccgcuggggcucguggaccuguucgucuucuccacgagcuucuaccugaucuccaucuuccugcaccucgugaagaucccgacccaccgccacgugaucggcaagcccugccccaagccccaccggcugaaccacauggggaucugcagcugcggccuguacaagcacccggggguccccgugaaguggaagcgcuga

SEQ ID NO: 4197 - RNA, 1473 nt, Artificial Sequence
  derived and/or modified protein sequence (opt1) from LASV(LASV1000-NIG-2009;Clade II)__AIT17782__GPCstabilized
augggccagaucaucaccuucuuccaggaggugccccacgucaucgaggaggugaugaacaucgugcugaucgcccucagccugcuggccauccucaaggggaucuacaacgucgcgaccugcggccuguucgggcugguguccuuccuccugcugugcggccgcagcugcuccacgaccuacaaggggguguacgagcuccagacccuggagcuggacauggccagccucaacaugaccaugccgcuguccugcacgaagaacaacagccaccacuacaucauggucggcaacgagaccggccuggagcucacccugaccaacacguccaucaucaaccacaaguucugcaaccugagcgacgcccacaagaagaaccucuacgaccacgcccugauguccaucaucagcaccuuccaccuguccauccccaacuucaaccaguacgaggccaugagcugcgacuucaacgggggcaagaucuccgugcaguacaaccucagccacaccuacgcgguggacgccgccaaccacugcgggaccaucgccaacggcguccugcagacguucaugcggauggcguggggcggguccuacaucgcccuggacagcggcugcggguccugggacugcaucaugaccagcuaccaguaccucaucauccagaacaccaccugggaggaccacugccaguucucccgccccagccccaucggcuaccuggggcugcucagccagcggacgcgcgacaucuacaucucccggcgccgccggggcaccuucaccuggacccucagcgacuccgagggcaacgagacgcccgggggcuacugccugacccgguggaugcugaucgaggccgagcucaagugcuucgggaacaccgccguggccaagugcaacgagaagcacgacgaggaguucugcgacaugcugcgccuguucgacuucaacaagcaggcgaucaagcggcucaagacccccgcccagaugagcauccagcugaucaacaaggccgugaacgcccugaucaacgaccagcucaucaugaagaaccaccuccgcgacaucaugugcauccccuacugcaacuacuccaaguacugguaccugaaccacacggucaccgggaagaccagccugccccggugcuggcugguguccaacggcagcuaccugaacgagacccacuucuccgacgacaucgagcagcaggccgacaacaugaucacggagcuccugcagaaggaguacaucgaccgccagggcaagaccccgcuggggcucguggaccuguucgucuucagcaccuccuucuaccugaucagcaucuuccugcaccucgugaagaucccgacccaccggcacguggucggcaagcccugccccaagccccaccgccugaaccacauggggaucugcuccugcggccuguacaagcacccgggggugcccgugaaguggaagcgguga

SEQ ID NO: 4198 - RNA, 1473 nt, Artificial Sequence
  derived and/or modified protein sequence (opt1) from LASV(LASV1008-NIG-2009;Clade II)__AIT17786__GPCstabilized
augggccagaucaucaccuucuuccaggaggugccccacgucaucgaggaggugaugaacaucgugcugaucgcccucagccugcuggccauccucaaggggaucuacaacgucgcgaccugcggccuguucgggcugguguccuuccuccugcugugcggccgcagcugcuccacgaccuacaaggggguguacgagcuccagacccuggagcuggacauggccagccucaacaugaccaugccgcuguccugcacgaagaacaacagccaccacuacaucauggucggcaacgagaccggccuggagcucacccugaccaacacguccaucaucaaccacaaguucugcaaccugagcgacgcccacaagaagaaccucuacgaccacgcccugauguccaucaucagcaccuuccaccuguccauccccaacuucaaccaguacgaggccaugagcugcgacuucaacgggggcaagaucuccgugcaguacaaccucagccacgcguacgccaucgacgccgccgaccacugcgggaccaucgcgaacggcgugcugcagaccuucaugcggauggccuggggcggguccuacaucgcccuggacagcggcugcggguccugggacugcaucaugacgagcuaccaguaccucaucauccagaacaccaccugggaggaccacugccaguucucccgccccagccccaucggcuaccuggggcugcucagccagcggacccgcgacaucuacaucucccggcgccgccggggcacguucaccuggacccucagcgacuccgagggcaacgagacccccgggggcuacugccugacgcgguggaugcugaucgaggccgagcucaagugcuucgggaacaccgccgucgcgaagugcaacgagaagcacgacgaggaguucugcgacaugcugcgccuguucgacuucaacaagcaggccauccggcgccucaagacccccgcccagaugagcauccagcugaucaacaaggccgugaacgcccugaucaacgaccagcucaucaugaagaaccaccuccgggacaucaugugcaucccguacugcaacuacuccaaguacugguaccugaaccacaccgugacggggaagaccagccugccccgcugcuggcuggucuccaacggcagcuaccugaacgagacccacuucuccgacgacaucgagcagcaggcggacaacaugaucaccgagcuccugcagaaggaguacauggaccggcagggcaagacgccccuggggcucguggaccuguucguguucagcaccuccuucuaccugaucagcaucuuccugcaccucgucaagaucccgacccaccgccacaucaccggcaagcccugccccaagccccaccggcugaaccacauggggaucugcuccugcggccuguacaagcacccgggggugcccgugaaguggaagcgcuga

SEQ ID NO: 4199 - RNA, 1473 nt, Artificial Sequence
  derived and/or modified protein sequence (opt1) from LASV(LASV1011-NIG-2009;Clade II)__AIT17790__GPCstabilized
augggccagaucaucaccuucuuccaggaggugccccacgucaucgaggaggugaugaacaucgugcugaucgcccucagccugcuggccauccucaaggggaucuacaacgucgcgaccugcggccuguucgggcugguguccuuccuccugcugugcggccgcagcugcuccacgaccuacaaggggguguacgagcuccagacccuggagcuggacauggccagccucaacaugaccaugccgcuguccugcacgaagaacaacagccaccacuacaucauggucggcaacgagaccggccuggagcucacccugaccaacacguccaucaucaaccacaaguucugcaaccugagcgacgcccacaagaagaaccucuacgaccacgcccugauguccaucaucagcaccuuccaccuguccauccccaacuucaaccaguacgaggccaugagcugcgacuucaacgggggcaagaucuccgugcaguacaaccucagccacaccuacgcgguggacgccgccaaccacugcgggaccaucgccaacggcguccugcagacguucaugcggauggcguggggcggguccuacaucgcccuggacagcggcugcggguccugggacugcaucaugaccagcuaccaguaccucaucauccagaacaccaccugggaggaccacugccaguucucccgccccagccccaucggcuaccuggggcugcucagccagcggacgcgcgacaucuacaucucccggcgccgccggggcaccuucaccuggacccucagcgacuccgagggcaacgagacgcccgggggcuacugccugacccgguggaugcugaucgaggccgagcucaagugcuucgggaacaccgccguggccaagugcaacgagaagcacgacgaggaguucugcgacaugcugcgccuguucgacuucaacaagcaggcgauccggcgccucaagacccccgcccagaugagcauccagcugaucaacaaggccgugaacgcccugaucaacgaccagcucaucaugaagaaccaccuccgggacaucaugugcauccccuacugcaacuacuccaaguacugguaccugaaccacacggucaccgggaagaccagccugccccgcugcuggcugguguccaacggcagcuaccugaacgagacccacuucuccgacgacaucgagcagcaggccgacaacaugaucacggagcuccugcagaaggaguacauggaccggcagggcaagaccccgcuggggcucguggaccuguucgucuucagcaccuccuucuaccugaucagcaucuuccugcaccucgugaagaucccgacccaccgccacaucacgggcaagcccugccccaagccccaccggcugaaccacauggggaucugcuccugcggccuguacaagcacccgggggugcccgucaaguggaagcgcuga

SEQ ID NO: 4200 - RNA, 1473 nt, Artificial Sequence
  derived and/or modified protein sequence (opt1) from LASV(LASV1016-NIG-2009;Clade II)__AIT17798__GPCstabilized
augggccagaucaucaccuucuuccaggaggugccccacgucaucgaggaggugaugaacaucgugcugaucgcccucagccugcuggccauccucaaggggaucuacaacgucgcgaccugcggccuguucgggcugguguccuuccuccugcugugcggccgcagcugcuccacgaccuacaaggggguguacgagcuccagacccuggagcuggacauggccagccucaacaugaccaugccgcuguccugcacgaagaacaacagccaccacuacaucauggucggcaacgagaccggccuggagcucacccugaccaacacguccaucaucaaccacaaguucugcaaccugagcgacgcccacaagaagaaccucuacgaccacgcccugauguccaucaucagcaccuuccaccuguccauccccaacuucaaccaguacgaggccaugagcugcgacuucaacgggggcaagaucuccgugcaguacaaccucagccacaccuacgcgguggacgccgccaaccacugcgggaccaucgccaacggcguccugcagacguucaugcggauggcguggggcggguccuacaucgcccuggacagcggcugcggguccugggacugcaucaugaccagcuaccaguaccucaucauccagaacaccaccugggaggaccacugccaguucucccgccccagccccaucggcuaccuggggcugcucagccagcggacgcgcgacaucuacaucucccggcgccgccggggcaccuucaccuggacccucagcgacuccgagggcaacgagacgcccgggggcuacugccugacccgguggaugcugaucgaggccgagcucaagugcuucgggaacaccgccguggccaagugcaacgagaagcacgacgaggaguucugcgacaugcugcgccuguucgacuucaacaagcaggcgaucaugcggcucaagacccccgcccagaugagcauccagcugaucaacaaggccgugaacgcccugaucaacgaccagcucaucaugaagaaccaccuccgcgacaucaugugcauccccuacugcaacuacuccaaguacugguaccugaaccacacggucaccgggaagaccagccugccccggugcuggcugguguccaacggcagcuaccugaacgagacccacuucuccgacgacaucgagcagcaggccgacaacaugaucacggagaugcuccagaaggaguaccuggaccgccagggcaagaccccgcuggggcucguggaccuguucgucuucagcaccuccuucuaccugaucagcaucuuccugcaccucgugaagaucccgacccaccggcacaucaucggcaagcccugccccaagccccaccgccugaaccacauggggaucugcuccugcggccuguacaagcacccgggggugcccgucaaguggaagcgguga

SEQ ID NO: 4201 - RNA, 1473 nt, Artificial Sequence; identical to SEQ ID NO: 4113
  derived and/or modified protein sequence (opt1) from LASV(LASV221-NIG-2010;Clade II)__AIT17624__GPCstabilized

SEQ ID NO: 4202 - RNA, 1473 nt, Artificial Sequence
  derived and/or modified protein sequence (opt1) from LASV(LASV224-NIG-2010;Clade II)__AIT17626__GPCstabilized
augggccagaucaucaccuucuuccaggaggugccccacgucaucgaggaggugaugaacaucgugcugaucgcccucagccugcuggccauccucaagggggucuacaacguggcgaccugcggccuguucgggcugguguccuuccuccugcugugcggccgcagcugcuccacgaccuacaagggggucuacgagcuccagacccuggagcuggacauggccagccucaacaugaccaugccgcuguccugcacgaagaacaacagccaccacuacaucauggugggcaacgagaccggccuggagcucacccugaccaacacguccaucauccagcacaaguucugcaaccugagcgacgcccacaagaagaaccucuacgaccacgcccugauguccaucaucagcaccuuccaccuguccauccccaacuucaaccaguacgaggccaugagcugcgacuucaacgggggcaagaucaccgugcaguacaaccucucccacagcuacgcgaucgacgccgccaaccacugcgggaccaucgccaacggcguccugcagacguucaugcggauggcguggggcggguccuacaucgcccuggacagcggcugcggguccugggacugcaucaugaccagcuaccaguaccucaucauccagaacaccaccugggaggaccacugccaguucucccgccccagccccaucggcuaccuggggcugcucagccagcggacgcgcgacaucuacaucucccggcgccgccggggcaccuucaccuggacccucagcgacuccgagggcaacgagacgcccgggggcuacugccugacccgguggaugcugaucgaggccgagcucaagugcuucgggaacaccgccguggccaagugcaacgagaagcacgacgaggaguucugcgacaugcugcgccuguucgacuucaacaagcaggcgauccggcgccucaagacccccgcccagaugagcauccagcugaucaacaaggccgugaacgcccugaucaacgaccagcucaucaugaagaaccaccuccgggacaucaugugcauccccuacugcaacuacuccaaguacugguaccugaaccacacggucaccgggcgcaccagccugccccggugcuggcugguguccaacggcagcuaccugaacgagacccacuucuccgacgacaucgagcagcaggccgacaacaugaucacggagcuccugcagaaggaguacauggaccgccagggcaagaccccgcuggggcucguggaccuguucgucuucagcaccuccuucuaccugaucagcaucuuccugcaccucgugaagaucccgacccaccggcacaucaucggcaagcccugccccaagccccaccgccugaaccacaugggggugugcuccugcggccuguacaagcacccggggguccccgugaaguggaagcgguga

SEQ ID NO: 4203 - RNA, 1473 nt, Artificial Sequence
  derived and/or modified protein sequence (opt1) from LASV(LASV225-NIG-2010;Clade II)__AIT17630__GPCstabilized
augggccagaucaucaccuucuuccaggaggugccccacgucaucgaggaggugaugaacaucgugcugaucgcccucagccugcuggccauccucaaggggaucuacaacgucgcgaccugcggccuguucgggcugcucuccuuccugcugcucugcggccgcagcugcuccacgaccuacaaggggguguacgagcugcagacccuggagcucgacauggccagccugaacaugaccaugccgcuguccugcacgaagaacaacagccaccacuacaucauggugggcaacgagaccggccucgagcugacccugaccaacacguccaucaucaaccacaaguucugcaaccucagcgacgcccacaagaagaaccuguacgaccacgcccugauguccaucaucagcaccuuccaccucuccauccccaacuucaaccaguacgaggccaugagcugcgacuucaacgggggcaagaucuccguccaguacaaccugagccacgcguacgccguggacgccgccgagcacugcgggaccaucgcgaacggcgugcugcagaccuucaugcggauggccuggggcggguccuacaucgcccucgacagcggcugcggguccugggacugcgucaugacgagcuaccaguaccugaucauccagaacaccuccugggaggaccacugccaguucagccgccccagccccaucggcuaccuggggcuccugucccagcggacccgcgacaucuacaucagccggcgccgccggggcaccuucacguggacccuguccgacagcgagggcaacgagacccccgggggcuacugccugacccgguggaugcucaucgaggccgagcugaagugcuucgggaacacggccguggcgaagugcaacgagaagcacgacgaggaguucugcgacaugcugcgccucuucgacuucaacaagcaggccauccggcgccugaagacccccgcccagauguccauccagcugaucaacaaggccgugaacgcccucaucaacgaccagcugaucaugaagaaccaccuccgggacaucaugugcauccccuacugcaacuacagcaaguacugguaccugaaccacaccgucaccgggaagacgucccugccccgcugcuggcuggugagcaacggcuccuaccucaacgagacccacuucagcgacgacaucgagcagcaggcggacaacaugaucaccgagcugcugcagaaggaguacaucgaccggcagggcaagaccccgcucgggcugguggaccuguucgucuucuccacgagcuucuaccugaucuccaucuuccuccaccuggugaagaucccgacccaccgccacgugaucggcaagcccugccccaagccccaccggcugaaccacauggggaucugcagcugcggccucuacaagcacccggggguccccgugaaguggaagcgcuga

SEQ ID NO: 4204 - RNA, 1473 nt, Artificial Sequence
  derived and/or modified protein sequence (opt1) from LASV(LASV229-NIG-2010;Clade II)__AIT17634__GPCstabilized
augggccagaucaucaccuucuuccaggaggugccccacgucaucgaggaggugaugaacaucgugcugaucgcccucagccugcuggccauccucaaggggaucuacaacgucgcgaccugcggccuguucgggcugguguccuuccuccugcugugcggccgcagcugcuccacgaucuacaaggacguguacgagcuccagacccuggagcuggacauggccagccucaacaugaccaugccgcuguccugcaccaagaacaacagccaccacuacaucauggucgggaacgagacgggccuggagcucacccugaccaacaccuccaucaucaaccacaaguucugcaaccugagcgacgcccacaagaagaaccucuacgaccacgcccugauguccaucaucagcacguuccaccuguccauccccaacuucaaccaguacgaggccaugagcugcgacuucaacggcgggaagaucuccgugcaguacaaccucagccacaccuacgcgaucgacgccgccaaccacugcggcaccaucgccaacggggugcugcagaccuucaugcggauggcguggggcggguccuacaucgcccuggacagcggcugcggcuccugggacugcaucaugacgagcuaccaguaccucaucauccagaacaccaccugggaggaccacugccaguucucccgccccagccccaucggguaccugggccugcucagccagcggacccgcgacaucuacaucucccggcgccgccgggggacguucaccuggacccucagcgacuccgagggcaacgagaccccgggcggguacugccugacgcgguggaugcugaucgaggccgagcucaagugcuucggcaacaccgccgucgccaagugcaacgagaagcacgacgaggaguucugcgacaugcugcgccuguucgacuucaacaagcaggcgauccggcgccucaagacccccgcccagaugagcauccagcugaucaacaaggccgugaacgcccugaucaacgaccagcucaucaugaagaaccaccuccgggacaucaugugcauccccuacugcaacuacucccgcuacugguaccugaaccacaccgugacgggccggaccagccugccccgcugcuggcuggucuccaacgggagcuaccugaacgagacccacuucuccgacgacaucgagcagcaggccgacaacaugaucaccgagcuccugcagaaggaguacauggaccggcagggcaagacgccccugggccucguggaccuguucguguucagcaccuccuucuaccugaucagcaucuuccugcaccucgucaagaucccgacccaccgccacgugaucgggaagcccugccccaagccccaccggcugaaccacaugggcaucugcuccugcgggcuguacaaccacccgggcgugcccgucaaguggaagcgcuga

SEQ ID NO: 4205 - RNA, 1473 nt, Artificial Sequence
  derived and/or modified protein sequence (opt1) from LASV(LASV237-NIG-2010;Clade II)__AIT17638__GPCstabilized
augggccagaucaucaccuucuuccaggaggugccccacgucaucgaggaggugaugaacaucgugcugaucgcccucagccugcuggccauccucaaggggaucuacaacgucgcgaccugcggccuguucgggcugguguccuuccuccugcugugcggccgcagcugcuccacgaccuacaaggggguguacgagcuccagacccuggagcuggacauggccagccucaacaugaccaugccgcuguccugcacgaagaacaacagccaccacuacaucauggucggcaacgagaccggccuggagcucacccugaccaacacguccaucaucaaccacaaguucugcaaccugagcgacgcccacaagaaggaccucuacgaccacgcccugauguccaucaucagcaccuuccaccuguccauccccaacuucaaccaguacgaggccaugagcugcgacuucaacgggggcaagaucuccgugcaguacaaccucagccacaccuacgcgguggacgccgccaaccacugcgggaccaucgccaacggcguccugcagacguucaugcggauggcguggggcggguccuacaucgcccuggacagcggcugcggguccugggacugcaucaugaccagcuaccaguaccucaucauccagaacaccaccugggaggaccacugccaguucucccgccccagccccaucggcuaccuggggcugcucagccagcggacgcgcgacaucuacaucucccggcgccgccggggcaccuucaccuggacccucagcgacuccgagggcaacgagacgcccgggggcuacugccugacccgguggaugcugaucgaggccgagcucaagugcuucgggaacaccgccguggccaagugcaacgagaagcacgacgaggaguucugcgacaugcugcgccuguucgacuucaacaagcaggcgauccggcgccucaagacccccgcccagaugagcauccagcugaucaacaaggccgugaacgcccugaucaacgaccagcucaucaugaagaaccaccuccgggacaucaugugcauccccuacugcaacuacuccaaguacugguaccugaaccacacggucaccgggaagaccagccugccccgcugcuggcugguguccaacggcagcuaccugaacgagacccacuucuccgacgacaucgagcagcaggccgacaacaugaucacggagcuccugcagaaggaguacauggaccggcagggcaagaccccgcuggggcucguggaccuguucgucuucagcaccuccuucuaccugaucagcaucuuccugcaccucaucaagaucccgacccaccgccacaucacgggcaagcccugccccaagccccaccggcugaaccacauggggaucugcuccugcggccuguacaagcacccgggggugcccgugaaguggaagcgcuga

SEQ ID NO: 4206 - RNA, 1473 nt, Artificial Sequence
  derived and/or modified protein sequence (opt1) from LASV(LASV239-NIG-2010;Clade II)__AIT17642__GPCstabilized
augggccagaucaucaccuucuuccaggaggugccccacgucaucgaggaggugaugaacaucgugcugaucgcccucagccugcuggccauccucaagggggucuacaacguggcgaccugcggccuguucgggcugguguccuuccuccugcugugcggccgcagcugcuccacgaccuacaagggggucuacgagcuccagacccuggagcuggacauggccagccucaacaugaccaugccgcuguccugcacgaagaacaacagccaccacuacaucauggugggcaacgacaccggccuggagcucacccugaccaacacguccaucaucaaccacaaguucugcaaccugagcgacgcccacaagaagaaccucuacgaccacgcccugauguccaucaucagcaccuuccaccuguccauccccaacuucaaccaguacgaggccaugagcugcgacuucaacgggggcaagaucuccgugcaguacaaccucagccacgcguacgccgucgacgccgccucccacugcgggaccaucgcgaacggcgugcugcagaccuucaugcggauggccuggggcgggagcuacaucgcccuggacuccggcugcgggagcugggacugcaucaugacguccuaccaguaccucaucauccagaacaccaccugggaggaccacugccaguucagccgccccagccccaucggcuaccuggggcugcucucccagcggacccgcgacaucuacaucagccggcgccgccggggcacguucaccuggacccucuccgacagcgagggcaacgagacccccgggggcuacugccugacgcgguggaugcugaucgaggccgagcucaagugcuucgggaacaccgccguggcgaagugcaacgagaagcacgacgaggaguucugcgacaugcugcgccuguucgacuucaacaagcaggccauccggcgccucaagacccccgcccagauguccauccagcugaucaacaaggccgucaacgcccugaucaacgaccagcucaucaugaagaaccaccuccgggacaucaugugcaucccguacugcaacuacagcaaguacugguaccugaaccacaccgugacggggaagaccucccugccccgcugcuggcuggugagcaacggcuccuaccugaacgagacccacuucagcgacgacaucgagcagcaggcggacaacaugaucaccgagcuccugcagaaggaguacauggaccggcagggcaagacgccccuggggcucgucgaccuguucguguucuccaccagcuucuaccugaucuccaucuuccugcaccucgugaagaucccgacccaccgccacaucaucggcaagcccugccccaagccccaccggcugaaccacauggggaucugcagcugcggccuguacaagcacccggggguccccgugaaguggaagcgcuga

SEQ ID NO: 4207 - RNA, 1473 nt, Artificial Sequence
  derived and/or modified protein sequence (opt1) from LASV(LASV241-NIG-2011;Clade II)__AIT17646__GPCstabilized
augggccagaucaucaccuucuuccaggaggugccccacgucaucgaggaggugaugaacaucgugcugaucgcccucagccugcuggccauccucaaggggaucuacaacgucgcgaccugcggccuguucgggcugguguccuuccuccugcugugcggccgcagcugcuccacgaccuacaaggggguguacgagcuccagacccuggagcuggacauggccagccucaacaugaccaugccgcuguccugcacgaagaacaacagccaccacuacaucauggucggcaacgagaccggccuggagcucacccugaccaacacguccaucaucaaccacaaguucugcaaccugagcgacgcccacaagaagaaccucuacgaccacgcccugauguccaucaucagcaccuuccaccuguccauccccaacuucaaccaguacgaggccaugagcugcgacuucaacgggggcaagaucuccgugcaguacaaccucagccacgcguacgccguggacgccgccucccacugcgggaccgucgcgaacggcgugcugcagaccuucaugcggauggccuggggcgggagcuacaucgcccuggacuccggcugcgggagcugggacugcaucaugacguccuaccaguaccucaucauccagaacaccaccugggaggaccacugccaguucagccgccccagccccaucggcuaccuggggcugcucucccagcggacccgcgacaucuacaucagccggcgccgccggggcacguucaccuggacccucuccgacagcgagggcaacgagacccccgggggcuacugccugacgcgguggaugcugaucgaggccgagcucaagugcuucgggaacaccgccguggcgaagugcaacgagaagcacgacgaggaguucugcgacaugcugcgccuguucgacuucaacaagcaggccauccggcgccucaagacccccgcccagauguccauccagcugaucaacaaggccgucaacgcccugaucaacgaccagcucaucaugaagaaccaccuccgggacaucaugugcaucccguacugcaacuacagcaaguacugguaccugaaccacaccgugacggggaagaccucccugccccgcugcuggcuggugagcaacggcuccuaccugaacgagacccacuucagcgacgacaucgagcagcaggcggacaacaugaucaccgagcuccugcagaaggaguacauggaccggcagggcaagacgccccuggggcucgucgaccuguucguguucuccaccagcuucuaccugaucuccaucuuccugcaccucgugaagaucccgacccaccgccacgucaucggcaagcccugccccaagccccaccggcugaaccacauggggaucugcagcugcggccuguacaagcacccgggggugcccgugaaguggaagcgcuga

SEQ ID NO: 4208 - RNA, 1473 nt, Artificial Sequence
  derived and/or modified protein sequence (opt1) from LASV(LASV242-NIG-2010;Clade II)__AIT17650__GPCstabilized
augggccagaucaucaccuucuuccaggaggugccccacgucaucgaggaggugaugaacaucgugcugaucgcccucagccugcuggccauccucaaggggaucuacaacgucgcgaccugcggccuguucgggcugguguccuuccuccugcugugcggccgcagcugcuccacgaccuacaaggggguguacgagcuccagacccuggagcuggacauggccagccucaacaugaccaugccgcuguccugcacgaagaacaacagccaccacuacaucauggucggcaacgagaccggccuggagcucacccugaccaacaucuccaucaucaaccacaaguucugcaaccugagcgacgcccacaagaagaaccucuacgaccacgcccugauguccaucaucagcacguuccaccuguccauccccaacuucaaccaguacgaggccaugagcugcgacuucaacgggggcaagaucuccgugcaguacaaccucagccacaccuacgcgguggacgccgccaaccacugcgggaccaucgccaacggcguccugcagaccuucaugcggauggcguggggcggguccuacaucgcccuggacagcggcugcggguccugggacugcaucaugacgagcuaccaguaccucaucauccagaacaccaccugggaggaccacugccaguucucccgccccagccccaucggcuaccuggggcugcucagccagcggacccgcgacaucuacaucucccggcgccgccggggcacguucaccuggacccucagcgacuccgagggcaacgagacccccgggggcuacugccugacgcgguggaugcugaucgaggccgagcucaagugcuucgggaacaccgccguggccaagugcaacgagaagcacgacgaggaguucugcgacaugcugcgccuguucgacuucaacaagcaggcgauccggcgccucaaggcccccgcccagaugagcauccagcugaucaacaaggccgugaacgcccugaucaacgaccagcucaucaugaagaaccaccuccgggacaucaugugcauccccuacugcaacuacuccaaguacugguaccugaaccacaccgucaccgggcgcacgagccugccccggugcuggcugguguccaacggcagcuaccugaacgagacccacuucuccgacgacaucgagcagcaggcggacaacaugaucaccgagcuccugcagaaggaguacaucgaccgccagggcaagaccccgcuggggcucguggaccuguucgucuucagcacguccuucuaccugaucagcaucuuccugcaccucgugaagaucccgacccaccggcacaucaucggcaagcccugccccaagccccaccgccugaaccacauggggaucugcuccugcggccuguacaagcacccgggggugcccgucaaguggaagcgguga

SEQ ID NO: 4209 - RNA, 1473 nt, Artificial Sequence
  derived and/or modified protein sequence (opt1) from LASV(LASV246-NIG-2010;Clade II)__AIT17658__GPCstabilized
augggccagaucaucaccuucuuccaggaggugccccacgucaucgaggaggugaugaacaucgugcugaucgcccucagccugcuggccauccucaagggggucuacaacguggcgaccugcggccuguucgggcugguguccuuccuccugcugugcggccgcagcugcuccaucacguacaagggggucuacgagcuccagacccuggagcuggacauggccaaccucaacaugaccaugccgcugagcugcaccaagaacaacucccaccacuacaucauggugggcaacgagacgggccuggagcucacccugaccaacaccagcaucaucaaccacaaguucugcaaccuguccgacgcccacaagaagaaccucuacgaccacgcccugaugagcaucaucuccacguuccaccugagcauccccaacuucaaccaguacgaggccauguccugcgacuucaacgggggcaagaucagcgugcaguacaaccucucccacaccuacgcgggggacgccgccgaccacugcggcaccaucgccaacgggguccugcagaccuucaugcggauggcguggggcggcagcuacaucgcccuggacuccgggugcggcagcugggacugcaucaugacguccuaccaguaccucaucauccagaacaccaccugggaggaccacugccaguucagccgccccucccccaugggguaccugggccugcucagccagcggacccgcgacaucuacaucagccggcgccgccggggcacguucaccuggacccucuccgacagcgaggggaacgagaccccgggcggguacugccugacgcgguggaugcugaucgaggccgagcucaagugcuucggcaacaccgccguggccaagugcaacgagaagcacgacgaggaguucugcgacaugcugcgccuguucgacuucaacaagcaggcgauccggcgccucaagacccccgcccagauguccauccagcugaucaacaaggccgugaacgcccugaucaacgaccagcucaucaugaagaaccaccuccgggacaucaugugcauccccuacugcaacuacagcaaguacugguaccugaaccacaccaucacgggcaagaccucccugccccgcugcuggcuggucagcaacggcuccuaccugaacgagacccacuucagcgacgacaucgagcagcaggccgacaacaugaucaccgagcuccugcagaaggaguacaucgaccggcaggggaagacgccccugggccucguggaccuguucguguucuccaccagcuucuaccugaucuccaucuuccugcaccucgucaagaucccgacccaccgccacaucaccgggaagcccugccccaagccccaccggcugaaccacaugggcaucugcagcugcgggcuguacaagcacccgggcgugcccgugcgcuggaagcgguga

SEQ ID NO: 4210 - RNA, 1473 nt, Artificial Sequence
  derived and/or modified protein sequence (opt1) from LASV(LASV251-NIG-2010;Clade II)__AIT17666__GPCstabilized
augggccagaucgugaccuucuuccaggaggucccccacgugaucgaggaggugaugaacaucguccugaucgcccucagccugcuggccauccucaaggggaucuacaacguggcgaccugcggccuguucgggcugguguccuuccuccugcugugcggccgcagcugcuccacgaccuacaagggggucuacgagcuccagacccuggagcuggacauggccagccucaacaugaccaugccgcuguccugcacgaagaacaacagccaccacuacaucauggugggcaacgagaccggccuggagcucacccugaccaacacguccaucaucaaccacaaguucugcaaccugagcgacgcccacaagaagaaccucuacgaccacgcccugauguccaucaucagcaccuuccaccuguccauccccaacuucaaccaguacgaggccaugagcugcgacuucaacgggggcaagaucuccgugcaguacaaccucagccacaccuacgcggucgacgccgccaaccacugcgggaccaucgccaacggcgugcugcagacguucaugcggauggcguggggcggguccuacaucgcccuggacagcggcugcggguccugggacugcaucaugaccagcuaccaguaccucaucauccagaacaccaccugggaggaccacugccaguucucccgccccagccccaucggcuaccuggggcugcucagccagcggacgcgcgacaucuacaucucccggcgccgccggggcaccuucaccuggacccucagcgacuccgagggcaacgagacgcccgggggcuacugccugacccgguggaugcugaucgaggccgagcucaagugcuucgggaacaccgccguggccaagugcaacgagaagcacgacgaggaguucugcgacaugcugcgccuguucgacuucaacaagcaggcgauccggcgccucaagacccccgcccagaugagcauccagcugaucaacaaggccgucaacgcccugaucaacgaccagcucaucaugaagaaccaccuccgggacaucaugugcauccccuacugcaacuacuccaaguacugguaccugaaccacacggugaccgggaagaccagccugccccgcugcuggcugguguccaacggcagcuaccugaacgagacccacuucuccgacgacaucgagcagcaggccgacaacaugaucacggagcuccugcagaaggaguacauggaccggcagggcaagaccccgcuggggcucgucgaccuguucguguucagcaccuccuucuaccugaucagcaucuuccugcaccucgugaagaucccgacccaccgccacaucacgggcaagcccugccccaagccccaccggcugaaccacauggggaucugcuccugcggccuguacaagcacccggggguccccgugaaguggaagcgcuga

SEQ ID NO: 4211 - RNA, 1473 nt, Artificial Sequence
  derived and/or modified protein sequence (opt1) from LASV(LASV253-NIG-2011;Clade II)__AIT17670__GPCstabilized
augggccagaucaucaccuucuuccaggaggugccccacgucaucgaggaggugaugaacaucgugcugaucgcccucagccugcuggccauccucaaggggaucuacaacgucgcgaccugcggccuguucgggcugguguccuuccuccugcugugcggccgcagcugcuccacgaccuacaaggggguguacgagcuccagacccuggagcuggacauggccagccucaacaugaccaugccgcuguccugcacgaagaacaacagccaccacuacaucauggucggcaacgagaccggccuggagcucacccugaccaacacguccaucaucaaccacaaguucugcaaccugagcgacgcccacaagaagaaccucuacgaccacgcccugauguccaucaucagcaccuuccaccuguccauccccaacuucaaccaguacgaggccaugagcugcgacuucaacgggggcaagaucuccgugcaguacaaccucagccacaccuacgcgguggacgccgccaaccacugcgggaccaucgccaacggcguccugcagacguucaugcggauggcguggggcggguccuacaucgcccuggacagcggcugcggguccugggacugcaucaugaccagcuaccaguaccucaucauccagaacaccaccugggaggaccacugccaguucucccgccccagccccaucggcuaccuggggcugcucagccagcggacgcgcgacaucuacaucucccggcgccgccggggcaccuucaccuggacccucagcgacuccgagggcaacgagacgcccgggggcuacugccugacccgguggaugcugaucgaggccgagcucaagugcuucgggaacaccgccguggccaagugcaacgagaagcacgacgaggaguucugcgacaugcugcgccuguucgacuucaacaagcaggcgauccggcgccucaaggcccccgcccagaugagcauccagcugaucaacaaggccgugaacgcccugaucaacgaccagcucaucaugaagaaccaccuccgggacaucaugugcaucccguacugcaacuacuccaaguacugguaccugaaccacaccgucacggggcgcaccagccugccccggugcuggcugguguccaacggcagcuaccugaacgagacccacuucuccgacgacaucgagcagcaggcggacaacaugaucaccgagcuccugcagaaggaguacaucgaccgccagggcaagacgccccuggggcucguggaccuguucgucuucagcaccuccuucuaccugaucagcaucuuccugcaccucgugaagaucccgacccaccggcacaucaucggcaagcccugccccaagccccaccgccugaaccacauggggaucugcuccugcggccuguacaagcacccgggggugcccgucaaguggaagcgguga

SEQ ID NO: 4212 - RNA, 1473 nt, Artificial Sequence
  derived and/or modified protein sequence (opt1) from LASV(LASV254-NIG-2011;Clade II)__AIT17674__GPCstabilized
augggccagaucaucaccuucuuccaggaggugccccacgucaucgaggaggugaugaacaucgugcugaucgcccucagccugcuggccauccucaaggggaucuacaacgucgcgaccugcggccuguucgggcugguguccuuccuccugcugugcggccgcagcugcuccacgaccuacaaggggguguacgagcuccagacccuggagcuggacaugaccaaccucaacaugacgaugccgcugagcugcaccaagaacaacucccaccacuacaucauggucggcaacgagaccggccuggagcucacccugacgaacaccagcaucaucaaccacaaguucugcaaccuguccgacgcccacaagaagaaccucuacaaccacgcccugaugagcaucaucuccaccuuccaccugagcauccccaacuucaaccaguacgaggccauguccugcgacuucaacgggggcaagaucagcgugcaguacaaccucucccacagcuacgccguggacgcggccaaccacugcgggaccaucgccaacggcguccugcagacguucaugcggauggccuggggcggguccuacaucgcgcuggacagcggcugcgggaacugggacugcaucaugaccuccuaccaguaccucaucauccagaacaccaccugggaggaccacugccaguucagccgccccucccccaucggcuaccuggggcugcucagccagcggacgcgcgacaucuacaucagccggcgccgccggggcaccuucaccuggacccucuccgacagcgagggcaacgagacgcccgggggcuacugccugacccgguggaugcugaucgaggccgagcucaagugcuucgggaacaccgccguggccaagugcaacgagaagcacgacgaggaguucugcgacaugcugcgccuguucgacuucaacaagcaggccauccggcgccucaagacccccgcgcaggccaacauccagcugaucaacaaggccgugaacgcccugaucaacgaccagcucaucaugaagaaccaccuccgggacaucaugugcauccccuacugcaacuacuccaaguacugguaccugaaccacacggucaccgggaagaccagccugccccgcugcuggcugguguccaacggcagcuaccugaacgagacccacuucuccgacgacaucgagcagcaggccgacaacaugaucacggagcuccugcagaaggaguacauggaccggcagggcaagaccccgcuggggcucguggaccuguucgucuucagcaccuccuucuaccugaucagcaucuuccugcaccucgugaagaucccgacccaccgccacgugaucggcaagcccugccccaagccccaccggcugaaccacauggggaucugcuccugcggccuguacaagcacccggggguccccgugaaguggaagcgcuga

SEQ ID NO: 4213 - RNA, 1473 nt, Artificial Sequence
  derived and/or modified protein sequence (opt1) from LASV(LASV256-NIG-2010;Clade II)__AIT17678__GPCstabilized
augggccagaucaucaccuucuuccaggaggugccccacgucaucgaggaggugaugaacaucgugcugaucacccucagccugcuggccauccucaaggggaucuacaacaucgccacgugcggccuguucgggcuggucuccuuccuccugcugugcggccgcagcugcuccaccaccuacaaggggguguacgagcuccagacccuggagcuggacaugacgagccucaacaugaccaugccgcuguccugcaccaagaacaacagccaccacuacaucauggugggcaacgagaccggccuggagcucacgcugaccaacaccuccaucaucaaccacaaguucugcaaccugagcgacgcgcacaagaagaaccucuacgaccacgcccugauguccaucaucagcaccuuccaccuguccauccccaacuucaaccaguacgaggccaugagcugcgacuucaacgggggcaagaucuccguccaguacaaccucagccacacguacgccguggacgccgcgaaccacugcgggaccaucgccaacggcgugcugcagaccuucaugcggauggccuggggcggguccuacaucgcccuggacagcggcugcggguccugggacugcaucaugaccagcuaccaguaccucaucauccagaacacgaccugggaggaccacugccaguucucccgccccagccccaucggcuaccuggggcugcucagccagcggacccgcgacaucuacaucucccggcgccgccggggcaccuucacguggacccucagcgacuccgagggcaacgagacccccgggggcuacugccugacccgguggaugcugaucgaggcggagcucaagugcuucgggaacacggccgucgccaagugcaacgagaagcacgacgaggaguucugcgacaugcugcgccuguucgacuucaacaagcaggccauccggcgccucaagacccccgcccagaugagcauccagcugaucaacaaggcggugaacgcccugaucaacgaccagcucaucaugaagaaccaccuccgggacaucaugugcauccccuacugcaacuacuccaaguacugguaccugaaccacaccgugaccgggaagacgagccugccccgcugcuggcuggucuccaacggcagcuaccugaacgagacccacuucuccgacgacaucgagcagcaggccgacaacaugaucaccgagcuccugcagaaggaguacaucgaccggcagggcaagaccccgcuggggcucguggaccuguucguguucagcacguccuucuaccugaucagcaucuuccugcaccucgucaagaucccgacccaccgccacaucaucggcaagcccugccccaagccccaccggcugaaccacauggggaucugcuccugcggccuguacaagcacccggggauccccgugaaguggaagcgcuga

SEQ ID NO: 4214 - RNA, 1473 nt, Artificial Sequence
  derived and/or modified protein sequence (opt1) from LASV(LASV267-NIG-2010;Clade II)__AIT17686__GPCstabilized
augggccagaucaucaccuucuuccaggaggugccccacgucaucgaggaggugaugaacaucgugcugaucgcccucagccugcuggccauccucaaggggaucuacaacgucgcgaccugcggccuguucgggcugguguccuuccuccugcugugcggccgcagcugcuccaccaccuacaaggggguguacgagcuccagacccuggagcuggacauggccagccucaacaugaccaugccgcuguccugcacgaagaacaacagccaccacuacaucauggucggcaacgagaccggccuggagcucacccugaccaacacguccaucaucaaccacaaguucugcaaccugagcgacgcccacaagaagaaccucuacgaccacgcccugauguccaucaucagcaccuuccaccuguccauccccaacuucaaccaguacgaggccaugagcugcgacuucaacgggggcaagaucuccgugcaguacaaccucagccacaccuacgcgguggacgccgccaaccacugcgggaccaucgccaacggcguccugcagacguucaugcggauggcguggggcggguccuacaucgcccuggacagccgcugcggcuccugggacugcaucaugaccagcuaccaguaccucaucauccagaacaccaccugggaggaccacugccaguucucccggcccagccccaucggguaccugggccugcucagccagcgcacgcgggacaucuacaucucccgccggcgccgggggaccuucaccuggacccucagcgacuccgagggcaacgagacgccgggcggguacugccugacccgcuggaugcugaucgaggccgagcucaagugcuucggcaacaccgccguggccaagugcaacgagaagcacgacgaggaguucugcgacaugcugcggcuguucgacuucaacaagcaggcgauccgccggcucaagacccccgcccagaugagcauccagcugaucaacaaggccgugaacgcccugaucaacgaccagcucaucaugaagaaccaccuccgcgacaucaugugcauccccuacugcaacuacuccaaguacugguaccugaaccacacggucaccggcaagaccagccugccccggugcuggcugguguccaacgggagcuaccugaacgagacccacuucuccgacgacaucgagcagcaggccgacaacaugaucacggagcuccugcagaaggaguacauggaccgccagggcaagacgccccugggccucguggaccuguucgucuucagcaccuccuucuaccugaucagcaucuuccugcaccucaucaagaucccgacccaccggcacgugaucgggaagcccugccccaagccccaccgccugaaccacaugggcaucugcuccugcgggcuguacaagcacccgggcgugcccgucaaguggaagcgguga

SEQ ID NO: 4215 - RNA, 1473 nt, Artificial Sequence
  derived and/or modified protein sequence (opt1) from LASV(LASV271-NIG-2010;Clade II)__AIT17690__GPCstabilized
augggccagaucaucaccuucuuccaggaggugccccacgucaucgaggaggugaugaacaucgugcugaucgcccucagccugcuggccauccucaaggggaucuacaacgucgcgaccugcggccuguucgggcugguguccuuccuccugcugugcggccgcagcugcuccacgaccuacaaggggguguacgagcuccagacccuggagcuggacauggccagccucaacaugaccaugccgcuguccugcacgaagaacaacagccaccacuacaucauggucggcaacgagaccggccuggagcucacccugaccaacacguccaucaucaaccacaaguucugcaaccugagcgacgcccacaagaagaaccucuacgaccacgcccugauguccaucaucagcaccuuccaccuguccauccccaacuucaaccaguacgaggccaugagcugcgacuucaacgggggcaagaucuccgugcaguacaaccucagccacgcguacgccguggacgccgccucccacugcgggaccgucgcgaacggcgugcugcagaccuucaugcggauggccuggggcgggagcuacaucgcccuggacuccggcugcgggagcugggacugcaucaugacguccuaccaguaccucaucauccagaacaccaccugggaggaccacugccaguucagccgccccagccccaucggcuaccuggggcugcucucccagcggacccgcgacaucuacaucagccggcgccgccggggcacguucaccuggacccucuccgacagcgagggcaacgagacccccgggggcuacugccugacgcgguggaugcugaucgaggccgagcucaagugcuucgggaacaccgccguggcgaagugcaacgagaagcacgacgaggaguucugcgacaugcugcgccuguucgacuucaacaagcaggccauccggcgccucaagacccccgcccagauguccauccagcugaucaacaaggccgucaacgcccugaucaacgaccagcucaucaugaagaaccaccuccgggacaucaugugcaucccguacugcaacuacagcaaguacugguaccugaaccacaccgugacggggcgcaccucccugccccggugcuggcuggugagcaacggcuccuaccugaacgagacccacuucagcgacgacaucgagcagcaggcggacaacaugaucaccgagcuccugcagaaggaguacauggaccgccagggcaagacgccccuggggcucgucgaccuguucguguucuccaccagcuucuaccugaucuccaucuuccugcaccucgugaagaucccgacccaccggcacgucaucggcaagcccugccccaagccccaccgccugaaccacauggggaucugcagcugcggccuguacaagcacccgggggugcccgugaaguggaagcgguga

SEQ ID NO: 4216 - RNA, 1473 nt, Artificial Sequence
  derived and/or modified protein sequence (opt1) from LASV(LASV274-NIG-2010;Clade II)__AIT17694__GPCstabilized
augggccagaucaucaccuucuuccaggaggugccccacgucaucgaggaggugaugaacaucgugcugaucgcccucagccugcuggccauccucaaggggaucuacaacgucgcgaccugcggccuguucgggcugguguccuuccuccugcugugcggccgcagcugcuccacgaucuacaaggggguguacgagcuccagacccuggagcuggacauggccagccucaacaugaccaugccgcuguccugcaccaagaacaacagccaccacuacaucauggucggcaacgagacgggccuggagcucacccugaccaacaccuccaucaucaaccacaaguucugcaaccugagcgacgcccacaagaagaaccucuacgaccacgcccugauguccaucaucagcacguuccaccuguccauccccaacuucaaccaguacgaggccaugagcugcgacuucaacgggggcaagaucuccgugcaguacaaccucagccacaccuacgcgguggacgccgccaaccacugcgggaccaucgccaacggcguccugcagaccuucaugcggauggcguggggcggguccuacaucgcccuggacagcggcugcggguccugggacugcaucaugacgagcuaccaguaccucaucauccagaacaccaccugggaggaccacugccaguucucccgccccagccccaucggcuaccuggggcugcucagccagcggacccgcgacaucuacaucucccggcgccgccggggcacguucaccuggacccucagcgacuccgagggcaacgagacccccgggggcuacugccugacgcgguggaugcugaucgaggccgagcucaagugcuucgggaacaccgccguggccaagugcaacgagaagcacgacgaggaguucugcgacaugcugcgccuguucgacuucaacaagcaggcgauccggcgccucaagacccccgcccagaugagcauccagcugaucaacaaggccgugaacgcccugaucaacgaccagcucaucaugaagaaccaccuccgggacaucaugugcaucccguacugcaacuacuccaaguacugguaccugaaccacaccgucacggggaagaccagccugccccgcugcuggcugguguccaacggcagcuaccugaacgagacccacuucuccgacgacaucgagcagcaggccgacaacaugaucaccgagcuccugcagaaggaguacaucgaccggcagggcaagacgccccuggggcucguggaccuguucgucuucagcaccuccuucuaccugaucagcaucuuccugcaccucgugaagaucccgacccaccgccacguggucggcaagcccugccccaagccccaccggcugaaccacauggggaucugcuccugcggccuguacaagcacccgggggugcccgugaaguggaagcgcuga

SEQ ID NO: 4217 - RNA, 1473 nt, Artificial Sequence
  derived and/or modified protein sequence (opt1) from LASV(LASV719-NIG-2009;Clade II)__AIT17704__GPCstabilized
augggccagaucaucaccuucuuccaggaggugccccacgucaucgaggaggugaugaacaucgugcugaucgcccucagccugcuggccauccucaaggggaucuacaacgucgcgaccugcggccuguucgggcugguguccuuccuccugcugugcggccgcagcugcuccacgaccuacaaggggguguacgagcuccagacccuggagcuggacauggccagccucaacaugaccaugccgcuguccugcacgaagaacaacagccaccacuacaucauggucggcaacgagaccggccuggagcucacccugaccaacacguccaucaucaaccacaaguucugcaaccugagcgacgcccacaagaagaaccucuacgaccacgcccugauguccaucaucagcaccuuccaccuguccauccccaacuucaaccaguacgaggccaugagcugcgacuucaacgggggcaagaucuccgugcaguacaaccucagccacaccuacgcgguggacgccgccaaccacugcgggaccaucgccaacggcguccugcagacguucaugcggauggcguggggcggguccuacaucgcccuggacagcggcugcggguccugggacugcaucaugaccagcuaccaguaccucaucauccagaacaccaccugggaggaccacugccaguucucccgccccagccccaucggcuaccuggggcugcucagccagcggacgcgcgacaucuacaucucccggcgccgccggggcaccuucaccuggacccucagcgacuccgagggcaacgagacgcccgggggcuacugccugacccgguggaugcugaucgaggccgagcucaagugcuucgggaacaccgccguggccaagugcaacgagaagcacgacgaggaguucugcgacaugcugcgccuguucgacuucaacaagcaggcgauccggcgccucaagacccccgcccagaugagcauccagcugaucaacaaggccgugaacgcccugaucaacgaccagcucaucaugaagaaccaccuccgggacaucaugugcauccccuacugcaacuacuccaaguacugguaccugaaccacacggucaccgggaagaccagccugccccgcugcuggcugguguccaacggcagcuaccugaacgagacccacuucuccgacgacaucgagcagcaggccgacaacaugaucacggagcuccugcagaaggaguacaucgaccggcagggcaagaccccgcuggggcucguggaccuguucgucuucagcaccuccuucuaccugaucagcaucuuccugcaccucgugaagaucccgacccaccgccacgugaucggcaagcccugccccaagccccaccggcugaaccacauggggaucugcuccugcggccuguacaagcacccggggguccccgugaaguggaagcgcuga

SEQ ID NO: 4218 - RNA, 1473 nt, Artificial Sequence
  derived and/or modified protein sequence (opt1) from LASV(LASV738-NIG-2009;Clade II)__AIT17712__GPCstabilized
augggccagaucaucaccuucuuccaggaggugccccacgucaucgaggaggugaugaacaucgugcugaucgcccucagccugcuggccauccucaaggggaucuacaacgucgcgaccugcggccuguucgggcugguguccuuccuccugcugugcggccgcagcugcuccacgaccuacaaggggguguacgagcuccagacccuggagcuggacauggccagccucaacaugaccaugccgcuguccugcacgaagaacaacagccaccacuacaucauggucggcaacgagaccggccuggagcucacccugaccaacacguccaucaucaaccacaaguucugcaaccugagcgacgcccacaagaagaaccucuacgaccacgcccugauguccaucaucagcaccuuccaccuguccauccccaacuucaaccaguacgaggccaugagcugcgacuucaacgggggcaagaucuccgugcaguacaaccucagccacaccuacgcgguggacgccgccaaccacugcgggaccaucgccaacggcguccugcagacguucaugcggauggcguggggcggguccuacaucgcccuggacagcggcugcggggccugggacugcaucaugaccuccuaccaguaccucaucauccagaacaccaccugggaggaccacugccaguucagccgccccucccccaucggcuaccuggggcugcucagccagcggacgcgcgacaucuacaucagccggcgccgccggggcaccuucaccuggacccucuccgacagcgagggcaacgagacgcccgggggcuacugccugacccgguggaugcugaucgaggccgagcucaagugcuucgggaacaccgccguggcgaagugcaacgagaagcacgacgaggaguucugcgacaugcugcgccuguucgacuucaacaagcaggccaucaugcggcucaagacccccgcccagauguccauccagcugaucaacaaggccgugaacgcccugaucaacgaccagcucaucaugaagaaccaccuccgcgacaucaugugcauccccuacugcaacuacagcaaguacugguaccugaaccacacggucaccgggaagaccucccugccccggugcuggcuggugagcaacggcuccuaccugaacgagacccacuucagcgacgacaucgagcagcaggcggacaacaugaucacggagaugcuccagaaggaguacaucgaccgccagggcaagaccccgcuggggcugguggaccucuucgucuucuccaccagcuucuaccugaucuccaucuuccugcaccuggugaagaucccgacccaccggcacgugaucggcaagcccugccccaagccccaccgccucaaccacauggggaucugcagcugcggccuguacaagcacccggggguccccgugcgguggaagcgcuga

SEQ ID NO: 4219 - RNA, 1473 nt, Artificial Sequence
  derived and/or modified protein sequence (opt1) from LASV(LASV966-NIG-2009;Clade II)__AIT17718__GPCstabilized
augggccagaucaucaccuucuuccaggaggugccccacgucaucgaggaggugaugaacaucgugcugaucgcccucagccugcuggccauccucaaggggaucuacaacgucgcgaccugcggccuguucgggcugguguccuuccuccugcugugcggccgcagcugcuccacgaccuacaaggggguguacgagcuccagacccuggagcuggacauggccagccucaacaugaccaugccgcuguccugcacgaagaacaacagccaccacuacauccgggucggcaacgagaccggccuggagcucacccugaccaacgccuccaucaucaaccacaaguucugcaaccugagcgacgcccacaagaagaaccucuacgaccacgcccugauguccaucaucagcacguuccaccuguccauccccaacuucaaccaguacgaggcgaugagcugcgacuucaacgggggcaagaucuccgugcaguacaaccucagccacgccuacgccaucgacgccgcgaaccacugcgggaccguggccaacggcguccugcagaccuucaugcgcauggccuggggcggguccuacaucgcccuggacagcggcugcgggaacugggacugcaucaugaccuccuaccaguaccucaucauccagaacacgaccugggaggaccacugccaguucagccgccccucccccaucggcuaccuggggcugcucagccagcggacccgcgacaucuacaucagccggcgccgccggggcaccuucacguggacccucuccgacagcgagggcaacgagacccccgggggcuacugccugacccgguggaugcugaucgaggccgagcucaagugcuucgggaacacggcgguggccaagugcaacgagaagcacgacgaggaguucugcgacaugcugcgccuguucgacuucaacaagcaggccauccggcgccucaagacccccgcccagauguccauccagcugaucaacaaggccgugaacgcgcugaucaacgaccagcucaucaugaagaaccaccuccgggacaucaugugcauccccuacugcaacuacagcaaguacugguaccugaaccacaccgucaccgggaagacgucccugccccgcugcuggcuggugagcaacggcuccuaccugaacgagacccacuucagcgacgacaucgagcagcaggccgacaacaugaucaccgagcuccugcagaaggaguacauggaccggcagggcaagaccccgcuggggcucguggaccuguucgucuucuccacgagcuucuaccugaucuccaucuuccugcaccucgugaagaucccgacccaccgccacgugaucggcaagcccugccccaagccccaccggcugaaccacauggggaucugcagcugcggcuucuacaagcacccggggguccccgugaaguggaagcgcuga

SEQ ID NO: 4220 - RNA, 1473 nt, Artificial Sequence
  derived and/or modified protein sequence (opt1) from LASV(LASV969-NIG-2009;Clade II)__AIT17724__GPCstabilized
augggccagaucaucaccuucuuccaggaggugccccacgucaucgaggaggugaugaacaucgugcugaucgcccucagccugcuggccauccucaaggggaucuacaacgucgcgaccugcggccuguucgggcugguguccuuccuccugcugugcggccgcagcugcuccacgaccuacaaggggguguacgagcuccagacccuggagcuggacauggccaaccucaacaugaccaugccgcugagcugcacgaagaacaacucccaccacuacaucauggucggcaacgagaccggccuggagcucacccugaccaacacgagcaucaucaaccacaaguucugcaaccuguccgacgcccacaagaagaaccucuacgaccacgcccugaugagcaucaucuccaccuuccaccugagcauccccaacuucaaccaguacgaggccauguccugcgacuucaacgggggcaagaucagcgugcaguacaaccucucccacaccuacgcgguggacgccgccaaccacugcgggaccgucgccaacggcgugcugcagacguucaugcggauggcguggggcgggagcuacaucgcccuggacuccggcugcgggagcugggacugcaucaugaccuccuaccaguaccucaucauccagaacaccaccugggaggaccacugccaguucagccgccccucccccaucggcuaccuggggcugcucagccagcggacgcgcgacaucuacaucagccggcgccgccggggcaccuucaccuggacccucuccgacagcgagggcaacgagacgcccgggggcuacugccugacccgguggaugcugaucgaggccgagcucaagugcuucgggaacaccgccguggccaagugcaacgagaagcacgacgaggaguucugcgacaugcugcgccuguucgacuucaacaagcaggcgauccggcgccucaagacccccgcccagauguccauccagcugaucaacaaggccgucaacgcccugaucaacgaccagcucaucaugaagaaccaccuccgggacaucaugugcauccccuacugcaacuacagcaaguacugguaccugaaccacacggugaccgggaagaccucccugccccgcugcuggcuggugagcaacggcuccuaccugaacgagacccacuucagcgacgacaucgagcagcaggccgacaacaugaucacggagcuccugcagaaggaguacauggaccggcagggcaagaccccgcuggggcucgucgaccuguucguguucuccaccagcuucuaccugaucuccaucuuccugcaccucgugaagaucccgacccaccgccacaucaugggcaagcccugccccaagccccaccggcugaaccacauggggaucugcagcugcggccuguacaagcacccggggguccccgugaaguggaagcgcuga

SEQ ID NO: 4221 - RNA, 1473 nt, Artificial Sequence
  derived and/or modified protein sequence (opt1) from LASV(LASV971-NIG-2009;Clade II)__AIT17728__GPCstabilized
augggccagaucaucaccuucuuccaggaggugccccacgucaucgaggaggugaugaacaucgugcugaucgcccucagccugcuggccauccucaaggggaucuacaacgucgcgaccugcggccuguucgggcugguguccuuccuccugcugugcggccgcagcugcuccaccaccuacaaggggguguacgagcuccagacccuggagcuggacaugggcagccucaacaugaccaugccgcuguccugcacgaagaacaacagccaccacuacaucauggucggcaacgagaccgggcuggagcucacccugaccaacacguccaucaucaaccacaaguucugcaaccugagcgacgcccacaagaagaaccucuacgaccacgcccugauguccaucaucagcaccuuccaccuguccauccccaacuucaaccaguacgaggccaugagcugcgacuucaacggcgggaagaucuccgugcaguacaaccucagccacaccuacgccguggacgcggccaaccacugcggcaccaucgccaacgggguccugcagacguucaugcggauggccuggggcggcuccuacaucgcgcuggacagcgggugcggcuccugggacugcaucaugaccagcuaccaguaccucaucauccagaacaccaccugggaggaccacugccaguucucccgccccagccccaucggguaccugggccugcucagccagcggacgcgcgacaucuacaucucccggcgccgccggggcaccuucaccuggacccucagcgacuccgaggggaacgagacgccgggcggguacugccugacccgguggaugcugaucgaggccgagcucaagugcuucggcaacaccgccguggccaagugcaacgagaagcacgacgaggaguucugcgacaugcugcgccuguucgacuucaacaagcaggccauccggcgccucaagacccccgcgcagaugagcauccagcugaucaacaaggccgugaacgcccugaucaacgaccagcucaucaugaagaaccaccuccgggacaucaugugcauccccuacugcaacuacuccaaguacugguaccugaaccacacggucaccggcaagaccagccugccccgcugcuggcugguguccaacggcagcuaccugaacgagacccacuucuccgacgacaucgagcagcaggccgacaacaugaucacggagcuccugcagaaggaguacauggaccggcaggggaagacgccccugggccucguggaccuguucgucuucagcaccuccuucuaccugaucagcaucuuccugcaccucgugaagaucccgacccaccgccacgugaucgggaagcccugccccaagccccaccggcugaaccacaugggcaucugcuccugcgggcuguacaagcacccgggcguccccgugaaguggaagcgcuga

SEQ ID NO: 4222 - RNA, 1473 nt, Artificial Sequence
  derived and/or modified protein sequence (opt1) from LASV(LASV975-NIG-2009;Clade II)__AIT17732__GPCstabilized
augggccagaucaucaccuucuuccaggaggugccccacgucaucgaggaggugaugaacaucgugcugaucgcccucagccugcuggccauccucaaggggaucuacaacgucgcgaccugcggccuguucgggcugguguccuuccuccugcugugcggccgcagcugcuccacgaccuacaaggggguguacgagcuccagacccuggagcuggacauggccagccucaacaugaccaugccgcuguccugcacgaagaacaacagccaccacuacaucauggucggcaacgagaccggccuggagcucacccugaccaacacguccaucaucaaccacaaguucugcaaccugagcgacgcccacaagaagaaccucuacgaccacgcccugauguccaucaucagcaccuuccaccuguccauccccaacuucaaccaguacgaggccaugagcugcgacuucaacgggggcaagaucuccgugcaguacaaccucagccacaccuacgcgguggacgccgccaaccacugcgggaccaucgccaacggcguccugcagacguucaugcggauggcguggggcggguccuacaucgcccuggacagcggcugcggguccugggacugcaucaugaccagcuaccaguaccucaucauccagaacaccaccugggaggaccacugccaguucucccgccccagccccaucggcuaccuggggcugcucagccagcggacgcgcgacaucuacaucucccggcgccgccggggcaccuucaccuggacccucagcgacuccgagggcaacgagacgcccgggggcuacugccugacccgguggaugcugaucgaggccgagcucaagugcuucgggaacaccgccguggccaagugcaacgagaagcacgacgaggaguucugcgacaugcugcgccuguucgacuucaacaagcaggcgauccggcgccucaagacccccgcccagaugagcauccagcugaucaacaaggccgugaacgcccugaucaacgaccagcucaucaugaagaaccaccuccgggacaucaugugcauccccuacugcaacuacuccaaguacugguaccugaaccacacggucaccgggaagaccagccugccccgcugcuggcugguguccaacggcagcuaccugaacgagacccacuucuccgacgacaucgagcagcaggccgacaacaugaucacggagcuccugcagaaggaguacaucgaccggcagggcaagaccccgcuggggcucguggaccuguucgucuucagcaccuccuucuaccugaucagcaucuuccugcaccucgugaagaucccgacccaccgccacaucgugggcaagcccugccccaagccccaccggcugaaccacauggggaucugcuccugcggccuguacaagcacccggggguccccgugaaguggaagcgcuga

SEQ ID NO: 4223 - RNA, 1473 nt, Artificial Sequence
  derived and/or modified protein sequence (opt1) from LASV(LASV976-NIG-2009;Clade II)__AIT17736__GPCstabilized
augggccagaucgugaccuucuuccaggaggucccccacgugaucgaggaggugaugaacaucguccugaucgcccucagccugcuggccauccucaaggggaucuacaacguggcgaccugcggccuguucgggcugguguccuuccuccugcugugcggccgcagcugcuccacgaccuacaagggggucuacgagcuccagacccuggagcuggacauggccagccucaacaugaccaugccgcuguccugcacgaagaacaacagccaccacuacaucauggugggcaacgagaccggccuggagcucacccugaccaacacguccaucaucaaccacaaguucugcaaccugagcgacgcccacaagaaggaccucuacgaccacgcccugauguccaucaucagcaccuuccaccuguccauccccaacuucaaccaguacgaggccaugagcugcgacuucaacgggggcaagaucuccgugcaguacaaccucagccacaccuacgcggucgacgccgccaaccacugcgggaccaucgccaacggcgugcugcagacguucaugcggauggcguggggcggguccuacaucgcccuggacagcggcugcggguccugggacugcaucaugaccagcuaccaguaccucaucauccagaacaccaccugggaggaccacugccaguucucccgccccagccccaucggcuaccuggggcugcucagccagcggacgcgcgacaucuacaucucccggcgccgccggggcaccuucaccuggacccucagcgacuccgagggcaacgagacgcccgggggcuacugccugacccgguggaugcugaucgaggccgagcucaagugcuucgggaacaccgccguggccaagugcaacgagaagcacgacgaggaguucugcgacaugcugcgccuguucgacuucaacaagcaggcgaucaugcggcucaagacccccgcccagaugagcauccagcugaucaacaaggccgucaacgcccugaucaacgaccagcucaucaugaagaaccaccuccgcgacaucaugugcauccccuacugcaacuacuccaaguacugguaccugaaccacacggugaccgggaagaccagccugccccggugcuggcugguguccaacggcagcuaccugaacgagacccgcuucuccgacgacaucgagcagcaggccgacaacaugaucacggagaugcuccagaaggaguaccuggaccggcagggcaagaccccgcuggggcucgucgaccuguucguguucagcaccuccuucuaccugaucagcaucuuccugcaccucgugaagaucccgacccaccgccacaucaucggcaagcccugccccaagccccaccggcugaaccacauggggaucugcuccugcggccuguacaagcacccggggguccccgugaaguggaagcgcuga

SEQ ID NO: 4224 - RNA, 1473 nt, Artificial Sequence
  derived and/or modified protein sequence (opt1) from LASV(LASV978-NIG-2009;Clade II)__AIT17744__GPCstabilized
augggccagaucaucaccuucuuccaggaggugccccacgucaucgaggaggugaugaacaucgugcugaucgcccucagccugcuggccauccucaaggggaucuacaacgucgcgaccugcggccuguucgggcugauguccuuccuccugcugugcggccgcagcugcuccacgaccuacaaggggguguacgagcuccagacccuggagcuggacauggccaaccucaacaugaccaugccgcugagcugcacgaagaacaacucccaccacuacaucauggugggcaacgagaccggccuggagcucacccugaccaacacgagcaucaucaaccacaaguucugcaaccuguccgacgcccacaagaagaaccucuacgaccacgcccugaugagcaucaucuccaccuuccaccugagcauccccaacuucaaccaguacgaggccauguccugcgacuucaacgggggcaagaucagcguccaguacaaccucucccacgcguacgccguggacgccgccaaccacugcgggaccaucgcgaacggcgugcugcagaccuucaugcggauggccuggggcgggagcuacaucgcccuggacuccggcugcgggagcugggacugcaucaugacguccuaccaguaccucaucauccagaacaccagcugggaggaccacugccaguucucccgccccagccccaucggcuaccuggggcugcucagccagcggacccgcgacaucuacaucucccggcgccgccggggcaccuucacguggacccucagcgacuccgagggcaacgagacccccgggggcuacugccugacccgguggaugcugaucgaggccgagcucaagugcuucgggaacacggccgucgcgaagugcaacgagaagcacgacgaggaguucugcgacaugcugcgccuguucgacuucaacaagcaggccauccggcgccucaagacccccgcccagaugagcauccagcugaucaacaaggccgugaacgcccugaucaacgaccagcucaucaugaagaaccaccuccgggacaucaugugcauccccuacugcaacuacuccaaguacugguaccugaaccacaccgugaccgggaagacgagccugccccgcugcuggcuggucuccaacggcagcuaccugaacgagacccacuucuccgacgacaucgagcagcaggcggacaacaugaucaccgagcuccugcagaaggaguacaucgaccggcagggcaagaccccgcuggggcucguggaccuguucguguucagcacguccuucuaccugaucagcaucuuccugcaccucgucaagaucccgacccaccgccacgugaucggcaagcccugccccaagccccaccggcugaaccacauggggaucugcuccugcggccuguacaagcacccgggggugcccgucaaguggaagcgcuga

SEQ ID NO: 4225 - RNA, 1473 nt, Artificial Sequence
  derived and/or modified protein sequence (opt1) from LASV(LASV981-NIG-2009;Clade II)__AIT17752__GPCstabilized
augggccagaucaucaccuucuuccacgaggugccccacgucaucgaggaggugaugaacaucgugcugaucgcccucagccugcuggccauccucaaggggaucuacaacgucgcgaccugcggccuguucgggcugguguccuuccuccugcugugcggccgcagcugcuccacgaccuacaaggggguguacgagcuccagacccuggagcuggacauggccagccucaacaugaccaugccgcuguccugcacgaagaacaacagccaccacuacaucauggucggcaacgagaccggccuggagcucacccugaccaacacguccaucaucaaccacaaguucugcaaccugagcgacgcccacaagaagaaccucuacgaccacgcccugauguccaucaucagcaccuuccaccuguccauccccaacuucaaccaguacgaggccaugagcugcgacuucaacgggggcaagaucuccgugcaguacaaccucagccacaccuacgcgaucgacgccgccaaccacugcgggaccaucgccaacggcgugcugcagacguucaugcggauggcguggggcggguccuacaucgcccuggacagcggcugcggguccugggacugcaucaugaccagcuaccaguaccucaucauccagaacaccaccugggaggaccacugccaguucucccggcccagccccaucggcuaccuggggcugcucagccagcgcacgcgggacaucuacaucucccgccggcgccggggcaccuucaccuggacccucagcgacuccgagggcaacgagacgcccgggggcuacugccugacccgcuggaugcugaucgaggccgagcucaagugcuucgggaacaccgccgucgccaagugcaacgagaagcacgacgaggaguucugcgacaugcugcggcuguucgacuucaacaagcaggcgauccgccggcucaagacccccgcccagaugagcauccagcugaucaacaaggccgugaacgcccugaucaacgaccagcucaucaugaagaaccaccuccgcgacaucaugugcauccccuacugcaacuacuccaaguacugguaccugaaccacacggugaccgggaagaccagccugccccggugcuggcuggucuccaacggcagcuaccugaacgagacccacuucuccgacgacaucgagcagcaggccgacaacaugaucacggagcuccugcagaaggaguacaucgaccgccagggcaagaccccgcuggggcucguggaccuguucguguucagcaccuccuucuaccugaucagcaucuuccugcaccucgucaagaucccgacccaccggcacgugaucggcaagcccugccccaagccccaccgccugaaccacauggggaucugcuccugcggccuguacaagcacccgggggugcccgucaaguggaagcgguga

SEQ ID NO: 4226 - RNA, 1473 nt, Artificial Sequence
  derived and/or modified protein sequence (opt1) from LASV(LASV982-NIG-2009;Clade II)__AIT17756__GPCstabilized
augggccagaucaucaccuucuuccaggaggugccccacgucaucgaggaggugaugaacaucgugcugaucgcccucagccugcuggccauccucaaggggaucuacaacgucgcgaccugcggccuguucgggcugguguccuuccuccugcugugcggccgcagcugcuccaucacguacaaggggguguacgagcuccagacccuggagcuggacauggccagccucaacaugaccaugccgcuguccugcaccaagaacaacagccaccacuacaucauggucggcaacgagacgggccuggagcucacccugaccaacaccuccaucaucaaccacaaguucugcaaccugagcgacgcccacaagaagaaccucuacgaccacgcccugauguccaucaucagcacguuccaccuguccauccccaacuucaaccaguacgaggccaugagcugcgacuucaacgggggcaagaucuccgugcaguacaaccucagccacaccuacgcgguggacgccgccaaccacugcgggaccaucgccaacggcguccugcagaccuucaugcggauggcguggggcggguccuacaucgcccuggacagcggcugcggguccugggacugcaucaugacgagcuaccaguaccucaucauccagaacaccaccugggaggaccacugccaguucucccggcccagccccaucggcuaccuggggcugcucagccagcgcacccgggacaucuacaucucccgccggcgccggggcacguucaccuggacccucagcgacuccgagggcaacgagacccccgggggcuacugccugacgcgcuggaugcugaucgaggccgagcucaagugcuucgggaacaccgccguggccaagugcaacgagaagcacgacgaggaguucugcgacaugcugcggcuguucgacuucaacaagcaggcgauccgccggcucaaggcccccgcccagaugagcauccagcugaucaacaaggccgugaacgcccugaucaacgaccagcucaucaugaagaaccaccuccgcgacaucaugugcauccccuacugcaacuacuccaaguacugguaccugaaccacaccgucaccgggcggacgagccugccccgcugcuggcugguguccaacggcagcuaccugaacgagacccacuucuccgacgacaucgagcagcaggcggacaacaugaucaccgagcuccugcagaaggaguacaucgaccggcagggcaagaccccgcuggggcucguggaccuguucgucuucagcacguccuucuaccugaucagcaucuuccugcaccucgugaagaucccgacccaccgccacaucaucggcaagcccugccccaagccccaccggcugaaccacauggggaucugcuccugcggccuguacaagcacccgggggugcccgucaaguggaagcgcuga

SEQ ID NO: 4227 - RNA, 1473 nt, Artificial Sequence
  derived and/or modified protein sequence (opt1) from LASV(LASV988-NIG-2009;Clade II)__AIT17758__GPCstabilized
augggccagaucaucaccuucuuccaggaggugccccacgucaucgaggaggugaugaacaucgugcugaucgcccucagccugcuggccauccucaaggggaucuacaacgucgcgaccugcggccuguucgggcugguguccuuccuccugcugugcggccgcagcugcuccacgaccuacaaggggguguacgagcuccagacccuggagcugaacauggccagccucaacaugaccaugccgcuguccugcacgaagaacaacagccaccacuacaucauggucggcaacgagaccggccuggagcucacccugaccaacacguccaucaucaaccacaaguucugcaaccugagcgacgcccacaagcggaaccucuacgaccacgcccugauguccaucaucagcaccuuccaccuguccauccccaacuucaaccaguacgaggccaugagcugcgacuucaacgggggcaagaucuccgugcaguacaaccucagccacaccuacgcgguggacgccgccaagcacugcgggaccaucgccaacggcguccugcagacguucaugcgcauggcguggggcggguccuacaucgcccuggacagcggcugcggguccugggacugcaucaugaccagcuaccaguaccucaucauccagaacaccaccugggaggaccacugcgaguucucccggcccagccccaucggcuaccuggggcugcucagccagcgcacgcgggacaucuacaucucccgccggcgccggggcaccuucaccuggacccucagcgacuccgagggcaacgagacgcccgggggcuacugccugacccgcuggaugcugaucgaggccgagcucaagugcuucgggaacaccgccguggccaagugcaacgagaagcacgacgaggaguucugcgacaugcugcggcuguucgacuucaacaagcaggcgauccgccggcucaaggcccccgcccagaugagcauccagcugaucaacaaggccgugaacgcccugaucaacgaccagcucaucaugaagaaccaccuccgcgacaucaugugcaucccguacugcaacuacuccaaguacugguaccugaaccacaccgucacggggaagaccagccugccccggugcuggcugguguccaacggcagcuaccugaacgagacccacuucuccgacgacaucgagcagcaggcggacaacaugaucaccgagcuccugcagaaggaguacaucgaccgccagggcaagacgccccuggggcucguggaccuguucgucuucagcaccuccuucuaccugaucagcaucuuccugcaccucgugaagaucccgacccaccggcacgugaucggcaagcccugccccaagccccaccgccugaaccacauggggaucugcuccugcggccuguacaagcacccggggguccccgugaaguggaagcgguga

SEQ ID NO: 4228 - RNA, 1473 nt, Artificial Sequence
  derived and/or modified protein sequence (opt1) from LASV(LASV989-NIG-2009;Clade II)__AIT17762__GPCstabilized
augggccagaucaucaccuucuuccaggaggugccccacgucaucgaggaggugaugaacaucgugcugaucgcccucagccugcuggccauccucaaggggaucuacaacgucgcgaccugcggccuguucgggcugguguccuuccuccugcugugcggccgcagcugcuccacgaccuacaaggggguguacgagcuccagacccuggagcuggacauggccagccucaacaugaccaugccgcuguccugcacgaagaacaacagccaccacuacaucauggucggcaacgagaccggccuggagcucacccugaccaacacguccaucaucagccacaaguucugcaaccuguccgacgcccacaagaagaaccucuacgaccacgcccugaugagcaucaucuccaccuuccaccugagcauccccaacuucaaccaguacgaggccauguccugcgacuucaacgggggcaagaucagcgugcaguacaaccucucccacaccuacgcgguggacgccgccaaccacugcgggaccaucgccaacggcguccugcagacguucaugcggauggcguggggcgggagcuacaucgcccuggacuccggcugcgggagcugggacugcaucaugaccuccuaccaguaccucaucauccagaacaccaccugggaggaccacugccaguucagccgccccagccccaucggcuaccuggggcugcucucccagcggacgcgcgacaucuacaucagccggcgccgccggggcaccuucaccuggacccucuccgacagcgagggcaacgaggcccccgggggcuacugccugacgcgguggaugcugaucgaggccgagcucaagugcuucgggaacaccgccguggcgaagugcaacgagaagcacgacgaggaguucugcgacaugcugcgccuguucgacuucaacaagcaggccauccggcgccucaagacccccgcccagauguccauccagcugaucaacaaggccgugaacgcccugaucaacgaccagcucaucaugaagaaccaccuccgggacaucaugugcaucccguacugcaacuacagccgcuacugguaccugaaccacaccgucacggggaagaccucccugccccggugcuggcuggugagcaacggcuccuaccugaacgagacccacuucagcgacgacaucgagcagcaggcggacaacaugaucaccgagcuccugcagaaggaguacauggaccgccagggcaagacgccccuggggcucguggaccuguucgucuucuccaccagcuucuaccugaucuccaucuuccugcaccucgugaagaucccgacccaccggcacgugaucggcaagcccugccccaagccccaccgccugaaccacauggggaucugcagcugcggccuguacaagcacccggggguccccgugaaguggaagcgguga

SEQ ID NO: 4229 - RNA, 1473 nt, Artificial Sequence
  derived and/or modified protein sequence (opt1) from LASV(LASV991-NIG-2009;Clade II)__AIT17770__GPCstabilized
augggccagaucgugaccuucuuccaggaggucccccacgugaucgaggaggugaugaacaucguccugaucgcccucagccugcuggccauccucaaggggaucuacaacguggcgaccugcggccuguucgggcugguguccuuccuccugcugugcggccgcagcugcuccacgaccuacaagggggucuacgagcuccaggcccuggagcuggacaugagcucccucaacaugaccaugccgcugagcugcaccaagaacaacucccaccacuacaucauggugggcaacgagacgggccuggagcucacccugaccaacaccagcaucauccaccacaaguucugcaaccuguccgacgcccacaagaaggaccucuacgaccacgcccugaugagcaucaucuccacguuccaccugagcauccccaacuucaaccaguacgaggccauguccugcgacuucaacgggggcaagaucagcgugcaguacaaccucucccacaccuacgcggucgacgccgccaaccacugcgggaccaucgccaacggcgugcugcagaccuucaugcggauggcguggggcgggagcuacaucgcccuggacuccggcugcggcgggugggacugcaucaugacgagcuaccaguuccucaucauccagaacaccaccugggaggaccacugccaguucucccgccccagccccaucggguaccugggccugcucagccagcggacccgcgacaucuacaucucccggcgccgccggggcacguucaccuggacccucagcgacuccgaggggaacgagaccccgggcggguacugccugacgcgguggaugcugaucgaggccgagcucaagugcuucggcaacaccgccguggccaagugcaacgagaagcacgacgaggaguucugcgacaugcugcgccuguucgacuucaacaagcaggcgaucaagcggcucaagacccccgcccagaugagcauccaccugaucaacaaggccgucaacgcccugaucaacgaccagcucaucaugaagaaccaccuccgcgacaucaugugcauccccuacugcaacuacuccaaguacugguaccugaaccacaccgugacgggcaagaccagccugccccggugcuggcugguguccaacggcagcuaccugaacgagacccacuucuccgacgacaucgagcagcaggccgacaacaugaucaccgagcuccugcagaaggaguacaucgaccgccaggggaagacgccccugggccucgucgaccuguucguguucagcaccuccuucuaccugaucagcaucuuccugcaccucgugaagaucccgacccaccggcacgucaucgggaagcccugccccaagccccaccgccugaaccacaugggcaucugcuccugcgggcuguacaagcacccgggcgugcccgugcgguggaagcgcuga

SEQ ID NO: 4230 - RNA, 1473 nt, Artificial Sequence
  derived and/or modified protein sequence (opt1) from LASV(LASV993-NIG-2009;Clade II)__AIT17778__GPCstabilized
augggccagaucaucaccuucuuccaggaggugccccacgucaucgaggaggugaugaacaucgugcugaucgcccucagccugcuggccauccucaaggggaucuacaacgucgcgaccugcggccuguucgggcugguguccuuccuccugcugugcggccgcagcugcuccacgaccuacaaggggguguacgagcuccagacccuggagcuggacauggccaaccucaacaugaccaugccgcugagcugcacgaagaacaacucccaccacuacaucauggucggcaacgagaccggccuggagcucacccugaccaacacgagcaucaucaaccacaaguucugcaaccuguccgacgcccacaagaagaaccucuacgaccacgcccugaugagcaucaucuccaccuuccaccugagcauccccaacuucaaccaguacgaggccauguccugcgacuucaacgggggcaagaucagcgugcaguacaaccucucccacaccuacgcgcgggacgccgccaaccacugcgggaccaucgccaacggcgugcugcagacguucaugcgcauggcguggggcgggagcuacaucgcccuggacuccggcugcgggagcugggacugcaucaugaccuccuaccaguaccucaucauccagaacaccaccugggaggaccacugccaguucagccggcccucccccaucggcuaccuggggcugcucagccagcgcacgcgggacaucuacaucagccgccggcgccggggcaccuucaccuggacccucuccgacagcgagggcaacgagacgcccgggggcuacugccugacccgcuggaugcugaucgaggccgagcucaagugcuucgggaacaccgccgucgccaagugcaacgagaagcacgacgaggaguucugcgacaugcugcggcuguucgacuucaacaagcaggcgauccgccggcucaagacccccgcccagaugaacauccagcugaucaacaaggccgugaacgcccugaucaacgaccagcucaucaugaagaaccaccuccgcgacaucaugugcauccccuacugcaacuacuccaaguacugguaccugaaccacacggugaccgggaagaccagccugccccggugcuggcuggucuccaacggcagcuaccugaacgagacccacuucuccgacgacaucgagcagcaggccgacaacaugaucacggagcuccugcagaaggaguacauggaccgccagggcaagaccccgcuggggcucguggaccuguucguguucagcaccuccuucuaccugaucagcaucuuccugcaccucgucaagaucccgacccaccggcacgugaucggcaagcccugccccaagccccaccgccugaaccacauggggaucugcuccugcggccuguacaagcacccgggggugcccgucaaguggaagcgguga

SEQ ID NO: 4231 - RNA, 1473 nt, Artificial Sequence
  derived and/or modified protein sequence (opt1) from LASV(Nig08-04;Clade II)__ADU56610__GPCstabilized
augggccagaucgugaccuucuuccaggaggucccccacgugaucgaggaggugaugaacaucguccugaucgcccucagccugcuggccauccucaaggggaucuacaacguggcgaccugcggccuguucgggcugaucuccuuccuccugcugugcggccgcagcugcuccacgaccuacaaggggguguacgagcuccagacccuggagcuggacauggccaaccucaacaugaccaugccgcugagcugcacgaagaacuccagccaccacuacaucauggucggcaacgagaccggccuggagcucacccugaccaacacguccaucaucaaccacaaguucugcaaccugagcgacgcccacaagaagaaccucuacgaccacgcccugauguccaucaucagcaccuuccaccuguccauccccaacuucaaccaguacgaggccaugagcugcgacuucaacgggggcaagaucuccgugcaguacaaccucagccacgcguacgccguggacgccgccaaccacugcgggaccaucgcgaacggcguccugcagaccuucaugcggauggccuggggcggguccuacaucgcccuggacagcggcugcgggaacugggacugcaucaugacguccuaccaguaccucaucauccagaacaccaccugggaggaccacugccaguucagccgccccucccccaucggcuaccuggggcugcucagccagcggacccgcgacaucuacaucagccggcgccgccggggcacguucaccuggacccucuccgacagcgagggcaacgaggcccccgggggcuacugccugacccgguggaugcugaucgaggccgagcucaagugcuucgggaacacggcgaucgccaagugcaacgagaagcacgacgaggaguucugcgacaugcugcgccuguucgacuucaacaagcaggccaucaagcggcucaaggcccccgcccagauguccauccagcugaucaacaaggcggugaacgcccugaucaacgaccagcucaucaugaagaaccaccuccgcgacaucaugugcauccccuacugcaacuacagcaaguacugguaccugaaccacaccgugaccgggaagaccucccugccccggugcuggcugaucagcaacggcuccuaccugaacgagacgcacuucagcgacgacaucgagcagcaggccgacaacaugaucaccgagcuccugcagaaggaguacauggaccgccagggcaagaccccgcuggggcucgucgaccuguucguguucuccaccagcuucuaccugaucuccaucuuccugcaccucgugaagaucccgacgcaccggcacaucgucggccgccccugccccaagccccaccggcugaaccacauggggaucugcagcugcggccuguacaagcacccgggggugcccgugaaguggaagcgcuga

SEQ ID NO: 4232 - RNA, 1473 nt, Artificial Sequence
  derived and/or modified protein sequence (opt1) from LASV(Nig08-A41;Clade II)__ADU56626__GPCstabilized
augggccagaucaucaccuucuuccaggaggugccccacgucaucgaggaggugaugaacaucgugcugaucgcccucagccugcuggccauccucaaggggaucuacaacgucgcgaccugcggccuguucgggcugguguccuuccuccugcugugcggccgcagcugcuccacgaccuacaaggggguguacgagcuccagacccuggagcugaacauggccagccucaacaugaccaugccgcuguccugcacgaagaacaacagccaccacuacaucauggucggcaacgagaccggccuggagcucacccugaccaacacguccaucaucaaccacaaguucugcaaccugagcgacgcccacaagcggaaccucuacgaccacgcccugauguccaucaucagcaccuuccaccuguccauccccaacuucaaccaguacgaggccaugagcugcgacuucaacgggggcaagaucuccgugcaguacaaccucagccacaccuacgcgguggacgccgccaagcacugcgggaccaucgccaacggcguccugcagacguucaugcgcauggcguggggcggguccuacaucgcccuggacagcggcugcggguccugggacugcaucaugaccagcuaccaguaccucaucauccagaacaccaccugggaggaccacugccaguucucccggcccagccccaucggcuaccuggggcugcucagccagcgcacgcgggacaucuacaucucccgccggcgccggggcaccuucaccuggacccucagcgacuccgagggcaacgagacgcccgggggcuacugccugacccgcuggaugcugaucgaggccgagcucaagugcuucgggaacaccgccguggccaagugcaacgagaagcacgacgaggaguucugcgacaugcugcggcuguucgacuucaacaagcaggcgauccgccggcucaaggcccccgcccagaugagcauccagcugaucaacaaggccgugaacgcccugaucaacgaccagcucaucaugaagaaccaccuccgcgacaucaugugcaucccguacugcaacuacuccaaguacugguaccugaaccacaccgucacggggaagaccagccugccccggugcuggcugguguccaacggcagcuaccugaacgagacccacuucuccgacgacaucgagcagcaggcggacaacaugaucaccgagcuccugcagaaggaguacaucgaccgccagggcaagacgccccuggggcucguggaccuguucgucuucagcaccuccuucuaccugaucagcaucuuccugcaccucgugaagaucccgacccaccggcacgugaucggcaagcccugccccaagccccaccgccugaaccacauggggaucugcuccugcggccuguacaagcacccggggguccccgugaaguggaagcgguga

SEQ ID NO: 4233 - RNA, 1473 nt, Artificial Sequence
  derived and/or modified protein sequence (opt1) from LASV(Nig08-A47;Clade II)__ADU56630__GPCstabilized
augggccagaucaucaccuucuuccaggaggugccccacgucaucgaggaggugaugaacaucgugcugaucgcccucagccugcuggccauccucaaggggaucuacaacgucgcgaccugcggccuguucgggcugguguccuuccuccugcugugcggccgcagcugcuccacgaccuacaaggggguguacgagcuccagacccuggagcuggacauggccagccucaacaugaccaugccgcuguccugcacgaagaacaacagccaccacuacaucauggucggcaacgagaccggccuggagcucacccugaccaacacguccaucaucaaccacaaguucugcaaccugagcgacgcccacaagaagaaccucuacgaccacgcccugauguccaucaucagcaccuuccaccuguccauccccaacuucaaccaguacgaggccaugagcugcgacuucaacgggggcaagaucuccgugcaguacaaccucagccacgcguacgccguggacgccgccaaccacugcgggaccaucgcgaacggcguccugcagaccuucaugcggauggccuggggcggguccuacaucgcccuggacagcggcugcggguccugggacugcaucaugacgagcuaccaguaccucaucauccagaacaccaccugggaggaccacugccaguucucccgccccagccccaucggcuaccuggggcugcucagccagcggacccgcgacaucuacaucucccggcgccgccggggcacguucaccuggacccucagcgacuccgagggcaacgagacccccgggggcuacugccugacgcgguggaugcugaucgaggccgagcucaagugcuucgggaacaccgccguggcgaagugcaacgagaagcacgacgaggaguucugcgacaugcugcgccuguucgacuucaacaagcaggccauccggcgccucaagacccccgcccagaugagcauccagcugaucaacaaggccgugaacgcccugaucaacgaccagcucaucaugaagaaccaccuccgggacaucaugugcaucccguacugcaacuacuccaaguacugguaccugaaccacaccgucacggggaagaccagccugccccgcugcuggcugguguccaacggcagcuaccugaacgagacccacuucuccgacgacaucgagcagcaggcggacaacaugaucaccgagcuccugcagaaggaguacauggaccggcagggcaagacgccccuggggcucguggaccuguucgucuucagcaccuccuucuaccugaucagcaucuuccugcaccucgugcgcaucccgacccaccggcacgugaucggcaagcccugccccaagccccaccgccugaaccacauggggaucugcuccugcggccuguacaagcacccggggguccccgugaaguggaagcgguga

SEQ ID NO: 4234 - RNA, 1473 nt, Artificial Sequence
  derived and/or modified protein sequence (opt1) from LASV(CSF;Clade III)__AAL13212__GPCstabilized
augggccagaucgugaccuucuuccaggaggucccccacgugaucgaggagaucaugaacaucgugcugaucacccucagccugcuggccauccucaagggggucuacaaccuggccacgugcggccugaucgggcucaucaccuuccuguuccugugcggccgcuccugcagcaugaccuacaagggguccuaccagcucgagacccuggagcugaacauggagacgcucaacaugaccaugccgcugagcugcaccaagaacaccucccaccacuacauccgggugggcaacgagacgggccuggagcucacccugaccaacaccagcaucaucaaccacaaguucugcaaccuguccgacgcgcacaagaagaaccucuacgaccacagccugauguccaucaucagcacguuccaccuguccauccccaacuucaaccaguacgaggccaugagcugcgacuucaacgggggcaagaucuccauccaguacaaccucagccacaccuacgccggggacgccgccaagcacugcggcacccuggcgaacgggauccugcagaccuucaugcgcauggccuggggcggcuccuacaucgcccucgacagcgggugcggcaacugggacugcaucaugacguccuaccaguaccugaucauccagaacaccaccugggaggaccacugccaguucagccgccccucccccaucggguaccugggccuccugagccagcggacccgcgagaucuacaucagccggcgccgccggggcacguucaccuggacccuguccgacagcgaggggaacgagaacccgggcggguacugccugacccgguggaugcucaucgaggccgagcugaagugcuucggcaacacggcgguggccaagugcaacgagaagcacgacgaggaguucugcgacaugcugcgccucuucgacuucaacaagcaggccauccagcggcugaaggcccccgcccagauguccauccagcugaucaacaaggcggucaacgcccucaucaacgaccagcugaucaugaagaaccaccuccgcgacaucaugugcauccccuacugcaacuacagcaaguacugguaccugaaccacaccaccaccggccggacgucccugccccgcugcuggcuggugagcaacggcuccuaccucaacgagacccgguucagcgacgacaucgagcagcaggccgacaacaugaucaccgagaugcugcagaaggaguacaucgaccgccaggggaagacgccccugggccucguggaccuguucgucuucuccaccagcuucuaccugaucuccaucuuccugcaccucaucaagaucccgacccaccggcacaucgucgggggccccugccccaagccccaccgccugaaccacaaggggaucugcagcugcggccuguacaagcggccgggcguguccgugcgcuggaagcgguga

SEQ ID NO: 4235 - RNA, 1473 nt, Artificial Sequence
  derived and/or modified protein sequence (opt1) from LASV(ISTH2121-NIG-2012;Clade III)__AIT17540__GPCstabilized
augggccagaucgugaccuucuuccaggaggucccccacgugaucgaggagaucaugaacaucgugcugaucacccucagccugcuggccauccucaaggggaucuacaacuucgccacgugcggccugaucgggcugaucaccuuccucuuccugugcggccgcuccugcagcaccaucuacaagggguccuaccagcugcagacccucgagcugaacauggagacgcugaacaugaccaugccgcucagcugcaccaagaacaacucccaccacuacauccgggucggcaacgagaccggccuggagcugacgcucaccaacaccagcaucaucaaccacaaguucugcaaccuguccgaggcgcacaagaagaaccuguacgaccacgcccucaugagcaucaucuccaccuuccaccugagcauccccaacuucaaccaguacgaggccauguccugcgacuucaacgggggcaagaucagcgugcaguacaaccugucccacagcuacgccguggacgccgcgaaccacugcgggacggucgccaacggcgugcuccagaccuucaugcgcauggccuggggcggguccuacaucgcccuggacagcggcugcgggaacugggacugcaucaugaccuccuaccaguaccugaucauccagaacaccacgugggaggaccacugccaguucagccgccccucccccaucggcuaccucgggcugcugagccagcggacccgcgacaucuacaucagccggcgccgccggggcaccuucaccuggacgcuguccgacagcgagggcaaggagacccccgggggcuacugccucacccgguggaugcugaucgaggcggagcugaagugcuucgggaacaccgccguggccaagugcaacgagaagcacgacgaggaguucugcgacaugcuccgccuguucgacuucaacaagcaggccauccagcggcugaagacgcccgcccagauguccauccagcucaucaacaaggcggucaacgcccugaucaacgaccagcugaucaugaagaaccaccuccgcgacaucaugugcauccccuacugcaacuacagcaaguacugguaccugaaccacaccuccaccgggcggaccagccugcccaagugcuggcucguguccaacggcagcuaccugaacgagacgcacuucuccgacgacaucgagcagcaggccgacaacaugaucaccgagaugcugcagaaggaguacaucgaccgccagggcaagaccccgcucgggcugguggaccuguucgucuucagcaccuccuucuaccucaucagcaucuuccugcaccuggugaagaucccgacgcaccggcacaucgugggcaaguccugccccaagccccaccgccugaaccacauggggaucugcagcugcggccucuacaagcagcccggggucccggugaaguggaagcgguga

SEQ ID NO: 4236 - RNA, 1473 nt, Artificial Sequence
  derived and/or modified protein sequence (opt1) from LASV(Nig08-A19;Clade III)__ADU56618__GPCstabilized
augggccagaucgugaccuucuuccaggaggucccccacgugaucgaggaggugaugaacaucguccugaucgcccucagcauccuggccauccugaaggggcucuacaacaucgcgaccugcggccugaucgggcuggugacguuccuccugcuguccggccgcagcugcuccaugaccuacaaggggguguacgagcuccagacccuggagcugaacaugaacacccucaacaugacgaugccgcugagcugcaccaagaacaacucccaccacuacaucauggucggcaacgagaccggccuggagcucacccugacgaacaccagccugcuccaccacaaguucugcaaccuguccgacgcccacaagaagaaccuguacgaccacacccucaugagcaucaucuccaccuuccaccugagcauccccaacuucaaccaguacgaggccauguccugcgacuucaacgggggcaagaucacggugcaguacaaccugagccacuccuacgccaucgacgccgcgaaccacugcgggaccguggccaacggcguccuccagaccuucaugcggauggccuggggcgggagcuacaucgcccuggacuccggcugcgggaagugggacugcaucaugaccagcuaccaguaccugaucauccagaacacgaccugggaggaccacugccaguucucccggcccagccccaucggcuaccucgggcugcugucccagcgcacccgggacaucuacaucagccgccggcgccggggcaccuucacguggacccugagcgacuccgagggcaacgagacccccgggggcuacugccucacccgcuggaugcugaucgaggcggagcugaagugcuucgggaacacggccguggccaagugcaacgagaagcacgacgaggaguucugcgacaugcuccggcuguucgacuucaacaagcaggccauccgccggcugaaggcccccgcgcagaugagcauccagcucaucaacaaggccgugaacgcccugaucaacgaccagcugaucaugaagaaccaccuccgcgacaucaugugcauccccuacugcaacuacuccaaguacugguaccugaaccacaccagcaccgggcggaccucccugccccgcugcuggcucgucagcaacggcuccuaccugaacgagacgcacuucagcgacgacaucgagcagcaggccgacaacaugaucaccgagaugcugcagaaggaguaccucgaccggcagggcaagaccccgcuggggcugguggaccuguucguguucuccaccagcuucuaccucaucuccaucuuccugcaccuggucaagaucccgacgcaccgccacaucgugggcaagcccugccccaagccccaccggcucaaccacauggggaucugcagcugcggccuguacaagcagccgggggugcccguccgcuggaagcgguga

SEQ ID NO: 4237 - RNA, 1473 nt, Artificial Sequence
  derived and/or modified protein sequence (opt1) from LASV(ONM-299;Clade III)__ANH09734__GPCstabilized
augggccagaucgugaccuucuuccaggaggucccccacgugaucgaggagaucaugaacaucgugcugaucacccucagccugcuggccauccucaaggggcuguacaacuucgccacgugcggccugaucgggcucaucaccuuccuguuccugugcggccgcuccugcagcaugaucuacaagggguccuaccagcucgagacccuggagcugaacauggagacccucaacaugacgaugccgcugagcugcaccaagaacaacucccaccacuacauccgggucggcaacgagaccggccuggagcucacccugacgaacaccagcaucaucgggcacaaguucugcaaccuguccgacgcgcacaagaagaaccucuacgaccacagccugauguccaucaucagcaccuuccaccuguccauccccaacuucaaccaguacgaggccaugagcugcgacuucaacggcgggaagaucuccauccaguacaaccucagccacaccuacgccggcgacgccgccaagcacugcgggacgguggcgaacggcgugcugcagaccuucaugcgcauggccuggggcggguccuacaucgcccuggacagcggcugcgggaacugggacugcaucaugaccuccuaccaguaccucaucauccagaacaccacgugggaggaccacugccaguucagccgccccucccccaucggcuaccugggccugcucagccagcggacccgcgacaucuacaucagccggcgccgccgggggaccuucaccuggacgcucuccgacagcgagggcaaggagacccccgggggcuacugccugacccgguggaugcugaucgaggccgagcucaagugcuucgggaacaccgcggucgccaagugcaacgagaagcacgacgaggaguucugcgacaugcugcgccuguucgacuucaacaagcaggccauccagcggcucaagacgcccgcccagauguccauccagcugaucaacaaggccgugaacgcgcugaucaacgaccagcucaucaugaagaaccaccuccgcgacaucaugugcauccccuacugcaacuacagcaaguacugguaccugaaccacaccuccaccggccggaccagccugcccaagugcuggcugguguccaacgggagcuaccugaacgagacgcacuucuccgacgacaucgagcagcaggccgacaacaugaucaccgagaugcuccagaaggaguacaucgaccgccagggcaagaccccgcuggggcuggucgacguguucguguucagcaccuccuucuaccucaucagcaucuuccugcaccuggucaagaucccgacgcaccggcacaucgugggcaaguccugccccaagccccaccgccugaaccacauggggaucugcagcugcggccucuacaagcagcccggcgugccgguccgguggaagcgcuga

SEQ ID NO: 4238 - RNA, 1473 nt, Artificial Sequence
  derived and/or modified protein sequence (opt1) from LASV(ONM-700;Clade III)__ANH09738__GPCstabilized
augggccagaucgugaccuucuuccaggaggucccccacgugaucgaggagaucaugaacaucgugcugaucacccucagccugcuggccauccucaaggggcuguacaacuucgccacgugcggccugaucgggcucaucaccuuccuguuccugugcggccgcuccugcagcaugaucuacaagggguccuaccagcucgagacccuggagcugaacauggagacccucaacaugacgaugccgcugagcugcaccaagaacaacucccaccacuacauccgggucggcaacgagaccggccuggagcucacccugacgaacaccagcaucaucaaccacaaguucugcaaccuguccgacgcgcacaagcgcaaccucuacgaccacagccugauguccaucaucagcaccuuccaccuguccauccccaacuucaaccaguacgaggccaugagcugcgacuucaacgggggcaagaucuccauccaguacaaccucagccacaccuacgccggggacgccgccaagcacugcggcacgguggcgaacggggugcugcagaccuucaugcggauggccuggggcggcuccuacaucgcccuggacagcgggugcggcaacugggacugcaucaugaccuccuaccaguaccucaucauccagaacaccacgugggaggaccacugccaguucagccggcccucccccaucggguaccugggccugcucagccagcgcacccgggacaucuacaucagccgccggcgccggggcaccuucaccuggacgcucuccgacagcgaggggaaggagaccccgggcggguacugccugacccgcuggaugcugaucgaggccgagcucaagugcuucggcaacaccgcggucgccaagugcaacgagaagcacgacgaggaguucugcgacaugcugcggcuguucgacuucaacaagcaggccauccagcgccucaagacgcccgcccagauguccauccagcugaucaacaaggccgugaacgcgcugaucaacgaccagcucaucaugaagaaccaccuccgggacaucaugugcauccccuacugcaacuacagcaaguacugguaccugaaccacaccuccaccggccgcaccagccugcccaagugcuggcugguguccaacggcagcuaccugaacgagacgcacuucuccgacgacaucgagcagcaggccgacaacaugaucaccgagaugcuccagaaggaguacaucgaccggcaggggaagacgccccugggccuggucgacguguucauguucagcaccuccuucuaccucaucagcaucuuccugcaccuggugaagaucccgacccaccgccacaucgucgggaaguccugccccaagccccaccggcugaaccacaugggcaucugcagcugcgggcucuacaagcagcccggcgugccggugcgcuggaagcgguga

SEQ ID NO: 4239 - RNA, 1473 nt, Artificial Sequence
  derived and/or modified protein sequence (opt1) from LASV(Weller;Clade III)__AAT49010__GPCstabilized
augggccagaucgugaccuucuuccaggaggucccccacgugaucgaggaggugaugaacaucguccugaucgcccucagcgugcuggccauccugaaggggcucuacaacuucgcgaccugcggccugaucgggcuggugacguuccuccugcuguccggccgcagcugcuccaugaucuacaagggggucuacgagcuccagacccuggagcugaacauggagacccucaacaugaccaugccgcugagcugcacgaagaacaccucccaccacuacauccgggugggcaacgacaccggccuggagcucacccugacgaacgagacccugcuccaccacaaguucugcaaccugagcgacgcccacaagcgcaaccuguacgaccacgcccucauguccaucaucagcaccuuccaccuguccauccccaacuucaaccaguacgaggccaugagcugcgacuucaacgggggcaagaucaccgugcaguacaaccugucccacagcuacgccgucgacgcggccaagcacugcgggacgguggccaacggcgugcuccagaccuucaugcggauggccuggggcggguccuacaucgcgcuggacagccgcugcggcaacugggacugcaucaugaccuccuaccaguaccugaucauccagaacaccacgugggaggaccacugccaguucagccggcccucccccaucggguaccucggccugcugagccagcgcacccgggacaucuacaucucccgccggcgccgggggaccuucaccuggacgcugagcgacagcgagggcaacgagaccccgggcggguacugccucacccgcuggaugcugaucgaggccgagcugaagugcuucggcaacaccgccgucgccaagugcaacgagaagcacgacgaggaguucugcgacaugcuccggcuguucgacuucaacaagcaggccauccgccggcugaagacgcccgcgcagauguccauccagcucaucaacaaggccgugaacgcccugaucaacgaccagcugaucaugaagaaccaccuccgcgacaucaugugcauccccuacugcaacuacagcaaguacugguaccugaaccacaccuccaccggcaagaccagccugccccggugcuggcucguguccaacgggagcuaccugaacgagacgcacuucuccgacgacaucgagcagcaggccgacaacaugaucaccgagaugcugcagaaggaguaccucgaccgccagggcaagacgccccugggccuggucgaccuguucguguucagcaccuccuucuaccucaucagcaucuuccugcaccugaucaagaucccgacccaccggcacaucguggggaagcccugccccaagccccaccgccucaaccacaugggcaucugcuccugcgggcuguacaagcagccgggcguccccgugcgguggaagcgcuga

SEQ ID NO: 4240 - RNA, 1476 nt, Artificial Sequence
  derived and/or modified protein sequence (opt1) from LASV(BA366;Clade IV)__ADI39451__GPCstabilized
augggccagaucgugaccuucuuccaggaggucccccacgugaucgaggaggugaugaacaucguccugaucgcccucagcgugcuggccgugcugaaggggcucuacaacgucgcgaccugcggccugaucgggcugaucgccuuccuccugcugugcggccgcuccugcacgaccacccucuacaaggggguguacgagcugcaggcccuggagcucaacauggagacccugaacaugacgaugccgcugagcugcaccaagaacaacucccaccacuacaucauggugggcaacgagaccggccucgagcugacccugacgaacaccagcaucaucaaccacaaguucugcaaccucuccgacgcccacaagaagaaccuguacgaccacgcccugaugagcaucaucuccaccuuccaccucagcauccccaacuucaaccaguacgaggcgauguccugcgacuucaacgggggcaagaucagcguccaguacaaccugucccacaccuacgccguggacgccgccaaccacugcgggacgguggcgaacggcguccugcagaccuucaugcggauggccuggggcgggagcuacaucgcccucgacuccggcugcgggagcugggacugcaucaugaccuccuaccaguaccugaucauccagaacaccacgugggaggaccacugccaguucagccggcccucccccaucggcuaccuggggcuccugagccagcgcacccgggacaucuacaucucccgccggcgccggggcaccuucaccuggacgcugagcgacagcgagggcaaggacacccccgggggcuacugccugacccgcuggaugcucaucgaggccgagcugaagugcuucgggaacaccgccguggcgaagugcaacgagaagcacgacgaggaguucugcgacaugcugcggcuguucgacuucaacaagcaggccauccagcgccugaaggcccccgcccagauguccauccagcugaucaacaaggccgugaacgcgcucaucaacgaccagcugaucaugaagaaccaccuccgggacaucaugugcauccccuacugcaacuacagcaaguacugguaccucaaccacacgaucaccgggcgcaccucccugcccaagugcuggcuggucagcaacggcuccuaccucaacgagacccacuucagcgacgacaucgagcagcaggccgacaacaugaucacggagaugcugcagaaggaguacaucgagcggcagggcaagaccccgcuggggcucguggaccuguucguguucuccaccagcuucuaccugaucuccaucuuccugcaccucaucaagaucccgacccaccgccacaucgucaacaagcccugccccaagccccaccggcugaaccacaugggcgugugcagcugcgggcuguacaagcagccgggcgugcccguccgcuggaagcgguga

SEQ ID NO: 4241 - RNA, 1476 nt, Artificial Sequence
  derived and/or modified protein sequence (opt1) from LASV(G1180-SLE-2010;Clade IV)__AIT17168__GPCstabilized
augggccagaucgugaccuucuuccaggaggucccccacgugaucgaggaggugaugaacaucguccugaucgcccucagcauccuggccgugcugaaggggcucuacaacuucgcgaccugcggccugguggggcugcucaccuuccugcugcucugcggccgcuccugcaccgccagccgguacaagggggucuacgagcugcagacccuggagcucaacauggagacccugaacaugacgaugccgcuguccugcaccaagaacaacagccaccacuacaucauggugggcaacgagaccggccucgagcugacccugacgaacaccuccaucaucaaccacaaguucugcaaccucagcgacgcccacaagaagaaccuguacgaccacgcccugauguccaucaucagcaccuuccaccucuccauccccaacuucaaccaguacgaggccaugagcugcgacuucaacgggggcaagaucuccgugcaguacaaccugagccacuccuacgcgggggacgccgccaaccacugcggcaccgucgccaacggggugcugcagacguucaugcgcauggcguggggcggcagcuacaucgcccucgacuccgggugcggcagcugggacugcaucaugaccuccuaccaguaccugaucauccagaacaccaccugggaggaccacugccaguucagccggcccucccccaucggguaccugggccuccugagccagcgcacgcgggacaucuacaucagccgccggcgccggggcaccuucaccuggacccuguccgacagcgaggggaaggacacgccgggcggguacugccugacccgcuggaugcucaucgaggccgagcugaagugcuucggcaacaccgccguggccaagugcaacgagaagcacgacgaggaguucugcgacaugcugcggcuguucgacuucaacaagcaggcgauccagcgccugaaggcccccgcccagauguccauccagcugaucaacaaggccgucaacgcccucaucaacgaccagcugaucaugaagaaccaccuccgggacaucaugugcauccccuacugcaacuacagcaaguacugguaccucaaccacaccacgaccggcaagaccucccugcccaagugcuggcuggugagcaacggcuccuaccucaacgagacccacuucagcgacgacaucgagcagcaggcggacaacaugaucacggagaugcugcagaaggaguacauggagcgccaggggaagacgccccugggccucguggaccuguucgucuucuccaccagcuucuaccugaucuccaucuuccugcaccucgugaagaucccgacccaccggcacaucgugggcaagagcugccccaagccccaccgccugaaccacauggggaucugcuccugcgggcuguacaagcagcccggcgucccggugaaguggaagcgguga

SEQ ID NO: 4242 - RNA, 1476 nt, Artificial Sequence
  derived and/or modified protein sequence (opt1) from LASV(G1190-SLE-2010;Clade IV)__AIT17172__GPCstabilized
augggccagaucgugaccuucuuccaggaggucccccacgugaucgaggaggugaugaacaucguccugaucgcccucagcauccuggccgugcugaaggggcucuacaacuucgcgaccugcggccugguggggcuggucacguuccuccugcugugcggccgcuccugcaccaccagccucuacaaggggguguacgagcugcagacccuggagcucaacauggagacgcugaacaugaccaugccgcuguccugcaccaagaacaacagccaccacuacaucauggugggcaacgagaccggccucgagcugacgcugaccaacaccuccaucaucaaccacaaguucugcaaccucagcgacgcccacaagaagaaccuguacgaccacgcccugauguccaucaucagcaccuuccaccucuccauccccaacuucaaccaguacgaggccaugagcugcgacuucaacgggggcaagaucuccguccaguacaaccugagccacuccuacgccggggacgcggccaaccacugcggcacgguggccaacggggugcugcagaccuucaugcggauggccuggggcggcagcuacaucgcgcucgacuccgggugcggccggugggacugcaucaugaccagcuaccaguaccugaucauccagaacaccacgugggaggaccacugccaguucucccgccccagccccaucggguaccugggccuccugucccagcggacccgcgacaucuacaucagccggcgccgccggggcaccuucaccuggacgcugagcgacuccgaggggaaggacaccccgggcggguacugccugacccgguggaugcucaucgaggccgagcugaagugcuucggcaacaccgccgucgccaagugcaacgagaagcacgacgaggaguucugcgacaugcugcgccucuucgacuucaacaagcaggccauccagcggcugaaggcgcccgcccagaugagcauccagcugaucaacaaggccgugaacgcccucaucaacgaccagcugaucaugaagaaccaccuccgcgacaucaugugcauccccuacugcaacuacuccaaguacugguaccugaaccacacgaccaccggcaagaccagccugcccaagugcuggcugguguccaacggcagcuaccucaacgagacgcacuucuccgacgacaucgagcagcaggccgacaacaugaucaccgagaugcugcagaaggaguacauggagcggcaggggaagacgccccugggccucgucgaccuguucguguucagcaccuccuucuaccugaucagcaucuuccugcaccucgugaagaucccgacccaccgccacaucgucgggaagcccugcccccggccccaccgccugaaccacaugggcaucugcuccugcgggcuguacaagcagccgggcgugcccgugaaguggaagcgguga

SEQ ID NO: 4243 - RNA, 1476 nt, Artificial Sequence
  derived and/or modified protein sequence (opt1) from LASV(G1200-LIB-2010;Clade IV)__AIT17176__GPCstabilized
augggccagaucgugaccuucuuccaggaggucccccacgugaucgaggaggugaugaacaucguccugaucgcccucagccugcuggccgugcucaaggggcuguacaacguggcgaccugcggccugaucgggcucaucacguuccugcugcucugcggccgcuccugcaccaccaaccuguacaagggggucuacgagcugcaggcccucgagcugaacauggagacccugaacaugacgaugccgcucagcugcaccaagaacaacucccaccacuacaucauggugggcaacgagaccggccuggagcugacccucacgaacaccagcaucaucaaccacaaguucugcaaccuguccgacgcccacaagaagaaccuguacgaccacgcccucaugagcaucaucuccaccuuccaccugagcauccccaacuucaaccaguacgaggccauguccugcgacuucaacgggggccggaucagcgugcaguacaaccugucccacagcuacgcgggggacgccgccucccacugcggcaccaucgccaacgggguccuccagacguucaugcgcauggcguggggcggcagcuacaucgcccuggacuccgggugcggcgggugggacugcaucaugaccagcuaccaguaccugaucauccagaacaccaccugggaggaccacugccaguucucccggcccagccccaucggcuaccucggccugcugucccagcgcacgcgggacaucuacaucagccgccggcgccgggggaccuucaccuggacccugagcgacuccgagggcaaggacacgcccgggggcuacugccucacccgcuggaugcugaucgaggccgagcugaagugcuucgggaacaccgccguggccaagugcaacgagaagcacgacgaggaguucugcgacaugcuccggcuguucgacuucaacaagcaggcgauccagcgccugaaggcccccgcccagaugagcauccagcucaucaacaaggccgugaacgcccugaucaacgaccagcugaucaugaagaaccaccuccgggacaucaugugcaucccguacugcaacuacuccaaguacugguaccugaaccacaccgucacgggcaagaccagccugcccaagugcuggcucguguccaacgggagcuaccugaacgagacccacuucuccgacgacaucgagcagcaggcggacaacaugaucaccgagaugcugcagaaggaguacauggagcgccagggcaagacgccccucgggcugguggaccuguucgucuucagcaccuccuucuaccugaucagcaucuuccuccaccuggugaagaucccgacccaccggcacguggucggcaagcccugccccaagccccaccgccugaaccacauggggaucugcuccugcggccucuacaagcagccgggcgugcccgugcgguggaagcgcuga

SEQ ID NO: 4244 - RNA, 1476 nt, Artificial Sequence
  derived and/or modified protein sequence (opt1) from LASV(G1442-SLE-2011;Clade IV)__AIT17180__GPCstabilized
augggccagaucgugaccuucuuccaggaggucccccacgugaucgaggaggugaugaacaucguccugaucgcccucagcauccuggccgugcugaaggggcucuacaacguggcgaccugcggccugaucgggcuggucacguuccuccugcugugcggccgcuccugcaccaccacccucuacaaggggguguacgagcugcagacgcuggagcucaacauggagacccugaacaugaccaugccgcugagcugcaccaagaacaacucccaccacuacauccgggugggcaacgagacgggccucgagcugacccugaccaacaccagcaucaucaaccacaaguucugcaaccucuccgacgcccacaagaagaaccuguacgaccacgcccugaugagcaucaucuccacguuccaccucagcauccccaacuucaaccaguacgaggccauguccugcgacuucaacgggggcaagaucagcguccaguacaaccugucccacagcuacgccggggacgcggccaaccacugcggcaccguggccaacggggugcugcagaccuucaugcgcauggccuggggcggcuccuacaucgcgcucgacagcgggugcggcaacugggacugcaucaugaccuccuaccaguaccugaucauccagaacacgaccugggacgaccacugccaguucagccgccccucccccaucggguaccugggccuccugagccagcggacccgcgacgucuacaucucccggcgccgccggggcaccuucacguggacccugagcgacagcgaggggaaggacaccccgggcggguacugccugacccgguggaugcucaucgaggccgagcugaagugcuucggcaacacggccguggccaagugcaacgagaagcacgacgaggaguucugcgacaugcugcgccucuucgacuucaacaagcaggccauccagcggcugaaggcgcccgcccagauguccauccagcugaucaacaaggccgugaacgcccucaucaacgaccagcugaucaugaagaaccaccuccgcgacaucaugugcauccccuacugcaacuacagcaaguacugguaccugaacaacaccgccaccggcaagaccucccugcccaagugcuggcugaucagcaacggcuccuaccucaacgagacgcacuucagcgacgacaucgagcaggaggcggacaacaugaucaccgagaugcugcagaaggaguacauggagcggcaggggaagacgccccugggccucgucgaccuguucguguucuccaccagcuucuaccugaucuccaucuuccugcaccucgugaagaucccgacccaccgccacaucgucggcaagagcugccccaagccccaccggcugaaccacauggggaucugcuccugcgggcuguacaagcagcccggcgugccggugcgcuggaagcgguga

SEQ ID NO: 4245 - RNA, 1476 nt, Artificial Sequence
  derived and/or modified protein sequence (opt1) from LASV(G1529-SLE-2011;Clade IV)__AIT17184__GPCstabilized
augggccagaucgugaccuucuuccaggaggucccccacgugaucgaggaggugaugaacaucguccugaucgcccucagcauccuggccgugcugaaggggcucuacaacguggcgaccugcggccugaucgggcuggucaccuuccuccugcugugcggccgcuccugcaccaccacccucuacaaggggguguacgagcugcaggcccuggagcucaacauggagacgcugaacaugaccaugccgcugagcugcaccaagaacaacucccaccacuacauccgggugggcaacgagaccggccucgagcugacgcugaccaacaccagcaucaucgaccacaaguucugcaaccucuccgacgcccacaagaagaaccuguacgaccacgcccugaugagcaucaucuccaccuuccaccucagcauccccaacuucaaccaguacgaggccauguccugcgacuucaacgggggcaagaucagcguccaguacaaccugucccacagcuacgcgggggacgccgccaaccacugcggcacgguggccaacggggugcugcagaccuucaugcgcauggcguggggcggcuccuacaucgcccucgacagcgggugcaacggcugggacugcaucaugaccuccuaccaguaccugaucauccagaacaccacgugggacgaccacugccaguucagccgccccucccccaucggguaccugggccuccugagccagcggacccgcgacaucuacaucucccggcgccgccggggcaccuucaccuggacgcugagcgacagcgaggggaaggacaccccgggcggguacugccugacccgguggaugcucaucgaggccgagcugaagugcuucggcaacaccgccgucgccaagugcaacgagaagcacgacgaggaguucugcgacaugcugcgccucuucgacuucaacaagcaggcgauccggcgccugaaggcccccgcccagauguccauccagcugaucaacaaggccgugaacgcccucaucaacgaccagcugaucaugaagaaccaccuccgggacaucaugugcauccccuacugcaacuacagcaaguacugguaccugaacaacacggcgaccggcaagaccucccugccccgcugcuggcuggugagcaacggcuccuaccucaacgagacccacuucagcgacgacaucgagcagcaggccgacaacaugaucacggagaugcugcagcgggaguacauggagcgccaggggaagacgccccugggccucgucgaccuguucguguucuccaccagcuucuaccugaucuccaucuuccugcaccucgugaagaucccgacccaccggcacaucgucgggaagcccugccccaagccccaccgccugaaccacaugggcaucugcagcugcgggcuguacaagcagccgggcgugcccgugaaguggaagcgguga

SEQ ID NO: 4246 - RNA, 1476 nt, Artificial Sequence
  derived and/or modified protein sequence (opt1) from LASV(G1618-SLE-2011;Clade IV)__AIT17188__GPCstabilized
augggccagaucgugaccuucuuccaggaggucccccacgugaucgaggaggugaugaacaucguccugaucgcccucagcauccuggccgugcugaaggggcucuacaacuucgcgaccugcggcuucguggggcuggucuccuuccugcuccugugcggccgcagcugcacgaccucccuguacaaggggguguacgagcuccagacccuggagcugaacauggagacccucaacaugacgaugccgcugagcugcaccaagaacaacucccaccacuacaucauggugggcaacgagaccggccuggagcucacccugacgaacaccagcaucaucaaccacaaguucugcaaccuguccgacgcccacaagaagaaccucuacgaccacgcccugaugagcaucaucuccaccuuccaccugagcauccccaacuucaaccaguacgaggccauguccugcgacuucaacgggggcaagaucagcguccaguacaaccucucccacagcuacgccguggacgcggccaaccacugcgggaccguggccaacggcguccugcagacguucaugcggauggccuggggcggguccuacaucgcgcuggacagcggcugcggguccugggacugcaucaugaccagcuaccaguaccucaucauccagaacaccaccugggaggaccacugccaguucucccgccccagccccaucggcuaccuggggcugcucagccagcggacgcgcgacaucuacaucucccggcgccgccggggcaccuucaccuggacccucagcgacuccgagggcaaggacacgcccgggggcuacugccugacccgguggaugcugaucgaggccgagcucaagugcuucgggaacaccgccguggccaagugcaacgagaagcacgacgaggaguucugcgacaugcugcgccuguucgacuucaacaagcaggccauccagcggcuccgcgcgcccgcccagaugagcauccagcugaucaacaaggccgugaacgcccugaucaacgaccagcucaucaugaagaaccaccuccgggacaucaugugcauccccuacugcaacuacuccaaguacugguaccugaaccacaccacgaccgggcgcaccagccugcccaagugcuggcuggucuccaacggcagcuaccugaacgagacccacuucuccgacgacaucgagcagcaggccgacaacaugaucacggagaugcuccagaaggaguacauggagcggcagggcaagaccccgcuggggcugguggaccucuucguguucagcaccuccuucuaccugaucagcaucuuccugcaccuggucaagaucccgacccaccgccacaucgugggcaaguccugccccaagccccaccggcucaaccacauggggaucugcagcugcggccuguacgggcagcccggcgugccggucaaguggaagcgcuga

SEQ ID NO: 4247 - RNA, 1476 nt, Artificial Sequence
  derived and/or modified protein sequence (opt1) from LASV(G1646-SLE-2011;Clade IV)__AIT17192__GPCstabilized
augggccagaucgugaccuucuuccaggaggucccccacgugaucgaggaggugaugaacaucguccugaucgcccucagcauccuggccgugcugaaggggcucuacaacuucgcgaccugcggcuucaucgggcugguguccuuccugcuccugugcggccgcagcugcacgaccucccuguacaagggggucuacgagcuccagacccuggagcugaacauggagacccucaacaugacgaugccgcugagcugcaccaagaacaacucccaccacuacaucauggugggcaacgagaccggccuggagcucacccugacgaacaccagcaucaucaaccacaaguucugcaaccuguccgacgcccacaagaagaaccucuacgaccacgcccugaugagcaucaucuccaccuuccaccugagcauccccaacuucaaccaguucgaggccauguccugcgacuucaacgggggcaagaucagcgugcaguacaaccucucccacagcuacgccgucgacgcggccaaccacugcgggaccguggccaacggcgugcugcagacguucaugcggauggccuggggcggguccuacaucgcgcuggacagcggcugcggguccugggacugcaucaugaccagcuaccaguaccucaucauccagaacaccaccugggaggaccacugccaguucucccgccccagccccaucggcuaccuggggcugcucagccagcggacgcgcgacaucuacaucucccggcgccgccggggcaccuucaccuggacccucagcgacuccgagggcaaggacacgcccgggggcuacugccugacccgguggaugcugaucgaggccgagcucaagugcuucgggaacaccgccgucgccaagugcaacgagaagcacgacgaggaguucugcgacaugcugcgccuguucgacuucaacaagcaggccauccagcggcucaaggcgcccgcccagaugagcauccagcugaucaacaaggccgugaacgcccugaucaacgaccagcucaucaugaagaaccaccuccgcgacaucaugugcauccccuacugcaacuacuccaaguacugguaccugaaccacaccacgaccgggcggaccagccugcccaagugcuggcugguguccaacggcagcuaccugaacgagacccacuucuccgacgacaucgagcagcaggccgacaacaugaucacggagaugcuccagaaggaguacauggagcgccagggcaagaccccgcuggggcuggucgaccucuucguguucagcaccuccuucuaccugaucagcaucuuccugcaccuggugaagaucccgacccaccggcacaucgucggcaaguccugccccaagccccaccgccucaaccacauggggaucugcagcugcggccuguacgggcagcccggcgugccggugaaguggaagcgguga

SEQ ID NO: 4248 - RNA, 1476 nt, Artificial Sequence
  derived and/or modified protein sequence (opt1) from LASV(G1647-SLE-2011;Clade IV)__AIT17196__GPCstabilized
augggccagaucgugaccuucuuccaggaggucccccacgugaucgaggaggugaugaacaucguccugaucgcccucagcauccuggccgugcugaaggggcucuacaaccuggcgaccugcggccugguggggcucgucacguuccugcugcucugcggccgcuccugcaccaccagccuguacaaggggguguacgagcugcagacccucgagcugaacauggagacgcugaacaugaccaugccgcucuccugcaccaagaacaacagccaccacuacaucauggugggcaacgagaccggccuggagcugacgcucaccaacaccuccaucaucaaccacaaguucugcaaccugagcgacgcccacaagaagaaccuguacgaccacgcccucauguccaucaucagcaccuuccaccuguccauccccaacuucaaccaguacgaggccaugagcugcgacuucaacgggggcaagaucuccguccaguacaaccugagccacuccuacgccggggacgcggccaaccacugcggcacgguggccaacggggugcuccagaccuucaugcggauggccuggggcggcagcuacaucgcgcuggacuccgggugcggccggugggacugcaucaugaccagcuaccaguaccugaucauccagaacaccacgugggaggaccacugccaguucucccgccccagccccaucggguaccucggccugcugucccagcggacccgcgacaucuacaucagccggcgccgccggggcaccuucaccuggacgcugagcgacuccgaggggaaggacaccccgggcggguacugccucacccgguggaugcugaucgaggccgagcugaagugcuucggcaacaccgccgucgccaagugcaacgagaagcacgacgaggaguucugcgacaugcuccgccuguucgacuucaacaagcaggccauccagcggcugaaggcgcccgcccagaugaacauccagcucaucaacaaggccgugaacgcccugaucaacgaccagcugaucaugaagaaccaccuccgcgacaucaugugcauccccuacugcaacuacagcaaguacugguaccugaaccacacgaccaccggcaagaccucccugccccggugcuggcucgugagcaacggcuccuaccugaacgagacgcacuucagcgacgacaucgagcagcaggccgacaacaugaucaccgagaugcugcagaaggaguacauggagcgccaggggaagacgccccucggccuggucgaccuguucguguucuccaccagcuucuaccugaucuccaucuuccuccaccuggugaagaucccgacccaccggcacaucgucgggaagcccugccccaagccccaccgccugaaccacaugggcaucugcagcugcggguucuacaagcagccgggcgugcccgugaaguggaagcgguga

SEQ ID NO: 4249 - RNA, 1476 nt, Artificial Sequence
  derived and/or modified protein sequence (opt1) from LASV(G1774-SLE-2011;Clade IV)__AIT17204__GPCstabilized
augggccagaucgugaccuucuuccaggaggucccccacgugaucgaggaggugaugaacaucguccugaucgcccucagcauccuggccgugcugaaggggcucuacaaccuggcgaccugcggccugguggggcucgucacguuccugcugcucugcggccgcuccugcaccagcucccuguacaaggggguguacgagcugcagacccucgagcugaacauggagacccugaacaugacgaugccgcucagcugcaccaagaacuccagccaccacuacauccgggugggcaacgagaccggccuggagcugacccucacgaacaccuccaucaucaaccacaaguucugcaaccugagcgacgcccacaagaagaaccuguacgaccacgcccucauguccaucaucagcaccuuccaccuguccauccccaacuucaaccaguacgaggccaugagcugcgacuucaacgggggcaagaucuccguccaguacaaccugagccacuccuacgccggggacgcggccaaccacugcggcaccguggccaacggggugcuccagacguucaugcgcauggccuggggcggcagcuacaucgcgcuggacuccgggugcgaccggugggacugcaucaugaccagcuaccaguaccugaucauccagaacaccaccugggaggaccacugccaguucucccgccccagccccaucggcuaccucgggcugcugagccagcggacgcgcgacaucuacaucucccggcgccgccggggcaccuucaccuggacccugagcgacuccgagggcaaggacacgcccgggggcuacugccucacccgguggaugcugaucgaggccgagcugaagugcuucgggaacaccgccgucgccaagugcaacgagaagcacgacgaggaguucugcgacaugcuccgccuguucgacuucaacaagcaggccauccagcggcugaaggcgcccgcccagaugagcauccagcucaucaacaaggccgugaacgcccugaucaacgaccagcugaucaugaagaaccaccuccgcgacaucaugugcaucccguacugcaacuacuccaaguacugguaccugaaccacaccaucacggggaagaccagccugcccaagugcuggcucguguccaacggcagcuaccugaacaagacccacuucuccgacgacaucgagcagcaggccgacaacaugaucaccgagaugcugcagaaggaguacauggagcggcagggcaagacgccccucgggcuggucgaccuguucguguucagcaccuccuucuaccugaucagcaucuuccuccaccugaucaagaucccgacccaccgccacaucgugggcaagcccugccccaagccccaccggcugaaccacauggggaucugcuccugcggccucuacaagcagccggggguccccgugaaguggaagcgcuga

SEQ ID NO: 4250 - RNA, 1476 nt, Artificial Sequence
  derived and/or modified protein sequence (opt1) from LASV(G1792-SLE-2011;Clade IV)__AIT17208__GPCstabilized
augggccagaucgugaccuucuuccaggaggucccccacgugaucgaggaggugaugaacaucguccugaucgcccucagcauccuggccgugcugaaggggcucuacaacuucgcgaccugcggccugaucgggcuggugacguuccuccugcugugcggccgcuccugcaccaccagccucuacaagggggucuacgagcugcagacccuggagcucaacauggagacgcugaacaugaccaugccgcuguccugcaccaagaacaacagccaccacuacaucauggugggcaacgagaccggccucgagcugacgcugaccaacaccuccaucaucaaccacaaguucugcaaccucagcgacgcccacaagaagaaccuguacgaccacgcccugauguccaucaucagcaccuuccaccucuccauccccaacuucaaccaguacgaggccaugagcugcgacuucaacgggggcaagaucuccgugcaguacaaccugagccacuccuacgccggggacgcggccaaccacugcggcacggucgccaacggggugcugcagaccuucaugcggauggccuggggcggcagcuacaucgcgcucgacuccgggugcggccagugggacugcaucaugaccagcuaccaguaccugaucauccagaacaccacgugggaggaccacugccaguucucccggcccagccccaucggguaccugggccuccugucccagcgcacccgggacaucuacaucagccgccggcgccggggcaccuucaccuggacgcugagcgacuccgaggggaaggacaccccgggcggguacugccugacccgcuggaugcucaucgaggccgagcugaagugcuucggcaacaccgccguggccaagugcaacgagaagcacgacgaggaguucugcgacaugcugcggcuguucgacuucaacaagcaggccauccagcgccugaaggcgcccgcccagaugagcauccagcugaucaacaaggccgucaacgcccucaucaacgaccagcugaucaugaagaaccaccuccgggacaucaugugcauccccuacugcaacuacuccaaguacugguaccucaaccacacgaccaccggcaagaccagccugcccaagugcuggcugguguccaacggcagcuaccucaacgagacgcacuucuccgacgacaucgagcagcaggccgacaacaugaucaccgagaugcugcagaaggaguacauggagcgccaggggaagacgccccugggccucguggaccuguucgucuucagcaccuccuucuaccugaucagcaucuuccugcaccucgugaagaucccgacccaccggcacaucguggggaaguccugccccaagccccaccgccugaaccacaugggcaucugcagcugcgggcuguacaagcagcccggcgucccggugaaguggaagcgguga

SEQ ID NO: 4251 - RNA, 1476 nt, Artificial Sequence
  derived and/or modified protein sequence (opt1) from LASV(G1897-SLE-2011;Clade IV)__AIT17210__GPCstabilized
augggccagaucgugaccuucuuccaggaggucccccacgugaucgaggaggugaugaacaucguccugaucgcccucagcauccuggccgugcugaaggggcucuacaaccuggcgaccugcggccugguggggcucgucacguuccugcugcucugcggccgcuccugcaccaccagccuguacaaggggguguacgagcugcagacccucgagcugaacauggagacgcugaacaugaccaugccgcucuccugcaccaagaacaacagccaccacuacaucauggugggcaacgagaccggccuggagcugacgcucaccaacaccuccaucaucaaccacaaguucugcaaccugagcgacgcccacaagaagaaccuguacgaccacgcccucauguccaucaucagcaccuuccaccuguccauccccaacuucaaccaguacgaggccaugagcugcgacuucaacgggggcaagaucuccguccaguacaaccugagccacuccuacgccggggacgcggccaaccacugcggcacgguggccaacggggugcuccagaccuucaugcggauggccuggggcggcagcuacaucgcgcuggacuccgggugcgaccggugggacugcaucaugaccagcuaccaguaccugaucauccagaacaccacgugggaggaccacugccaguucucccgccccagccccaucggcuaccucgggcugcugucccagcggacccgcgacaucuacaucagccggcgccgccggggcaccuucaccuggacgcugagcgacuccgagggcaaggacacccccgggggcuacugccucacccgguggaugcugaucgaggccgagcugaagugcuucgggaacaccgccgucgccaagugcaacgagaagcacgacgaggaguucugcgacaugcuccgccuguucgacuucaacaagcaggccauccagcggcugaaggcgcccgcccagaugagcauccagcucaucaacaaggccgugaacgcccugaucaacgaccagcugaucaugaagaaccaccuccgcgacaucaugugcauccccuacugcaacuacuccaaguacugguaccugaaccacacgaccaccgggaagaccagccugcccaagugcuggcucguguccaacggcagcuaccugaacgagacgcacuucuccgacgacaucgagcagcaggccgacaacaugaucaccgagaugcugcagaaggaguacauggagcggcagggcaagaccccgcucgggcuggucgaccuguucguguucagcaccuccuucuaccugaucagcaucuuccuccgccuggugaagaucccgacgcaccggcacaucgucggcaagcccugccccaagccccaccgccugaaccacauggggaucugcuccugcggccucuacaagcagccgggggugcccgugaaguggaagcgguga

SEQ ID NO: 4252 - RNA, 1476 nt, Artificial Sequence
  derived and/or modified protein sequence (opt1) from LASV(G1932-SLE-2011;Clade IV)__AIT17212__GPCstabilized
augggccagaucgugaccuucuuccaggaggucccccacgugaucgaggaggugaugaacaucguccugaucgcccucagcauccuggccgugcugaaggggcucuacaaccuggcgaccugcggccugguggggcucgucacguuccugcugcucugcggccgcuccugcaccaccagccuguacaaggggguguacgagcugcagacccucgagcugaacauggagacgcugaacaugaccaugccgcucuccugcaccaagaacaacagccaccacuacaucauggugggcaacgagaccggccuggagcugacgcucaccaacaccuccaucaucaaccacaaguucugcaaccugagcgacgcccaccggaagaaccuguacgaccacgcccucauguccaucaucagcaccuuccaccuguccauccccaacuucaaccaguacgaggccaugagcugcgacuucaacgggggcaagaucuccguccaguacaaccugagccacuccuacgccggggacgcggccaaccacugcggcacgguggccaacggggugcuccagaccuucaugcgcauggccuggggcggcagcuacaucgcgcuggacuccgggugcggcaagugggacugcaucaugaccagcuaccaguaccugaucauccagaacaccacgugggaggaccacugccaguucucccgccccagccccaucggguaccucggccugcugucccagcggacccgcgacaucuacaucagccggcgccgccggggcaccuucaccuggacgcugagcgacuccgaggggaaggacaccccgggcggguacugccucacccgguggaugcugaucgaggccgagcugaagugcuucggcaacaccgccgucgccaagugcaacgagaagcacgacgaggaguucugcgacaugcuccgccuguucgacuucaacaagcaggccauccagcggcugaaggcgcccgcccagaugagcauccagcucaucaacaaggccgugaacgcccugaucaacgaccagcugaucaugaagaaccaccuccgcgacaucaugugcauccccuacugcaacuacuccaaguacugguaccugaaccacacgaccaccggcaagaccagccugccccggugcuggcucguguccaacggcagcuaccugaacgagacgcacuucuccgacgacaucgagcagcaggccgacaacaugaucaccgagaugcugcagaaggaguacauggagcgccaggggaagacgccccucggccuggucgaccuguucguguucagcaccuccuucuaccugaucagcaucuuccuccaccuggugaagaucccgacccaccggcacaucgucgggaagcccugccccaagccccaccgccugaaccacaugggcaucugcuccugcgggcucuacaagcagccgggcgugcccgugaaguggaagcgguga

SEQ ID NO: 4253 - RNA, 1476 nt, Artificial Sequence
  derived and/or modified protein sequence (opt1) from LASV(G1959-SLE-2011;Clade IV)__AIT17216__GPCstabilized
augggccagaucgugaccuucuuccaggaggucccccacgugaucgaggaggugaugaacaucguccugaucgcccucagcauccuggccgugcugaaggggcucuacaacuucgcgaccugcggccugguggggcuggucacguuccuccugcugugcggccgcuccugcaccaccagccucuacaaggggguguacgagcugcagacccuggagcucaacauggagacgcugaacaugaccaugccgcuguccugcaccaagaacaacagccaccacuacaucauggugggcaacgagaccggccucgagcugacgcugaccaacaccuccaucaucaaccacaaguucugcaaccucagcgacgcccacaagaagaaccuguacgaccacgcccugauguccaucaucagcaccuuccaccucuccauccccaacuucaaccaguacgaggccaugagcugcgacuucaacgggggcaagaucuccguccaguacaaccugagccacuccuacgccggggacgcggccaaccacugcggcacgguggccaacggggugcugcagaccuucaugcggauggccuggggcggcagcuacaucgcgcucgacuccgggugcggccgcugggacugcaucaugaccagcuaccaguaccugaucauccagaacaccacgugggaggaccacugccaguucucccggcccagccccaucggguaccugggccuccugucccagcgcacccgggacaucuacaucagccgccggcgccggggcaccuucaccuggacgcugagcgacuccgaggggaaggacaccccgggcggguacugccugacccgcuggaugcucaucgaggccgagcugaagugcuucggcaacaccgccgucgccaagugcaacgagaagcacgacgaggaguucugcgacaugcugcggcuguucgacuucaacaagcaggccauccagcgccugaaggcgcccgcccagaugagcauccagcugaucaacaaggccgugaacgcccucaucaacgaccagcugaucaugaagaaccaccuccgggacaucaugugcauccccuacugcaacuacuccaaguacugguaccucaaccacacgaccaccggcaagaccagccugcccaagugcuggcugguguccaacggcagcuaccucaacgagacgcacuucuccgacgacaucgagcagcaggccgacaacaugaucaccgagaugcugcagaaggaguacauggagcgccaggggaagacgccccugggccucgucgaccuguucguguucagcaccuccuucuaccugaucagcaucuuccugcaccucgugaagaucccgacccaccggcacaucgucgggaagcccugccccaagccccaccgccugaacuacaugggcaucugcuccugcgggcuguacaagcagccgggcgugcccgugcgguggaagcgcuga

SEQ ID NO: 4254 - RNA, 1476 nt, Artificial Sequence
  derived and/or modified protein sequence (opt1) from LASV(G2141-SLE-2011;Clade IV)__AIT17224__GPCstabilized
augggccagaucgugaccuucuuccaggaggucccccacgugaucgaggaggugaugaacaucguccugaucgcccucagcauccuggccgugcugaaggggcucuacaacguggcgaccugcggccugaucgggcuggucacguuccuccugcugugcggccgcuccugcaccaccacccucuacaaggggguguacgagcugcaggcccuggagcucaacauggagacgcugaacaugaccaugccgcugagcugcaccaagaacaacucccaccacuacauccgggugggcaacgacaccggccucgagcugacgcugaccaacaccagcaucauccagcacaaguucugcaaccucuccgacgcccacaagaagaaccuguacgaccacacccugaugagcaucaucuccacguuccaccucagcauccccaacuucaaccaguacgaggccauguccugcgacuucaacgggggcaagaucagcguccaguacaaccugucccacagcuacgccggggacgcggccucccacugcggcaccguggccaacggggugcugcagaccuucaugcgcauggccuggggcggcagcuacaucgcgcucgacuccgggugcggcaacugggacugcaucaugaccagcuaccaguaccugaucauccagaacacgaccugggaggaccacugccaguucucccgccccagccccaucggguaccugggccuccugucccagcggacccgcgacaucuacaucagccggcgccgccggggcaccuucacguggacccugagcgacuccgaggggcgggacaccccgggcggguacugccugacccgcuggaugcucaucgaggccgagcugaagugcuucggcaacacggccgucgccaagugcaacgagaagcacgacgaggaguucugcgacaugcugcggcuguucgacuucaacaagcaggccauccagcgccugaagacccccgcgcagaugagcauccagcugaucaacaaggccgugaacgcccucaucaacgaccagcugaucaugaagaaccaccuccgggacaucaugugcauccccuacugcaacuacuccaaguacugguaccucaacaacaccaucaccggcaagagcucccugcccaagugcuggcuggugagcaacggcuccuaccucaacgagacgcacuucagcgacgacaucgagcaggaggccgacaacaugaucaccgagaugcugcagaaggaguacauggagcgccaggggaagacgccccugggccucgucgaccuguucguguucuccaccagcuucuaccugaucuccaucuuccugcaccucgugaagaucccgacccaccggcacaucgucgggaagcccugccccaagccccaccgccugaaccacaugggcgugugcagcugcgggcuguacaagcagccgggcgugcccguccgguggaagcgcuga

SEQ ID NO: 4255 - RNA, 1476 nt, Artificial Sequence
  derived and/or modified protein sequence (opt1) from LASV(G2147-SLE-2011;Clade IV)__AIT17228__GPCstabilized
augggccagaucgugaccuucuuccaggaggucccccacgugaucgaggaggugaugaacaucguccugaucgcccucagcauccuggccgugcugaaggggcucuacaacuucgcgaccugcggccugguggggcugcucacguuccugcugcucugcggccgcuccugcaccaccagccuguacaagggggucuacgagcugcagacccucgagcugaacauggagacgcugaacaugaccaugccgcucuccugcaccaagaacaacagccaccacuacaucauggugggcaacgagaccggccuggagcugacgcucaccaacaccuccaucaucgaccacaaguucugcaaccugagcgacgcccacaagaagaaccuguacgaccacgcccucauguccaucaucagcaccuuccaccuguccauccccaacuucaaccaguacgaggccaugagcugcgacuucaacgggggcaagaucuccgugcaguacaaccugagccacuccuacgccggggacgcggccaaccacugcggcacggucgccaacggggugcuccagaccuucaugcggauggccuggggcggcagcuacaucgcgcuggacuccgggugcggcgggugggacugcaucaugaccagcuaccaguaccugaucauccagaacaccacgugggaggaccacugccaguucucccggcccagccccaucggcuaccucggccugcugucccagcgcacccgggacaucuacaucagccgccggcgccgggggaccuucaccuggacgcugagcgacuccgagggcaaggacacccccgggggcuacugccucacccgcuggaugcugaucgaggccgagcugaagugcuucgggaacaccgccguggccaagugcaacgagaagcacgacgaggaguucugcgacaugcuccggcuguucgacuucaacaagcaggccauccagcgccugaaggcgcccgcccagaugagcauccagcucaucaacaaggccgucaacgcccugaucaacgaccagcugaucaugaagaaccaccuccgggacaucaugugcauccccuacugcaacuacuccaaguacugguaccugaaccacacgaccaccggcaagaccagccugcccaagugcuggcucguguccaacgggagcuaccugaacgagacgcacuucuccgacgacaucgagcagcaggccgacaacaugaucaccgagaugcugcagaaggaguacauggagcgccagggcaagaccccgcucgggcugguggaccuguucgucuucagcaccuccuucuaccugaucagcaucuuccuccaccuggugaagaucccgacgcaccggcacaucgugggcaaguccugccccaagccccaccgccugaaccacauggggaucugcagcugcggccucuacaagcagcccggcgucccggugaaguggaagcgguga

SEQ ID NO: 4256 - RNA, 1476 nt, Artificial Sequence
  derived and/or modified protein sequence (opt1) from LASV(G2165-SLE-2011;Clade IV)__AIT17232__GPCstabilized
augggccagaucgugaccuucuuccaggaggucccccacgugaucgaggaggugaugaacaucguccugaucgcccucagcauccuggccgugcugaaggggcucuacaacuucgcgaccugcggccugguggggcuggucacguuccuccugcugugcggccgcuccugcaccaccagccucuacaaggggguguacgagcugcagacccuggagcucaacauggagacgcugaacaugaccaugccgcuguccugcaccaagaacaacagccaccacuacauccgggugggcaacgagaccggccucgagcugacgcugaccaacaccuccaucaucaaccacaaguucugcaaccucagcgacgcccacaagaagaaccuguacgaccacgcccugauguccaucaucagcaccuuccaccucuccauccccaacuucaaccaguacgaggccaugagcugcgacuucaacgaggggaagaucuccguccaguacaaccugagccacuccuacgccggcgacgcggccaaccacugcgggacgguggccaacggcgugcugcagaccuucaugcgcauggccuggggcgggagcuacaucgcgcucgacuccggcugcgggaagugggacugcaucaugaccagcuaccaguaccugaucauccagaacaccacgugggaggaccacugccaguucucccgccccagccccaucggcuaccuggggcuccugucccagcggacccgcgacaucuacaucagccggcgccgccggggcaccuucaccuggacgcugagcgacuccgagggcaaggacacccccgggggcuacugccugacccgguggaugcucaucgaggccgagcugaagugcuucgggaacaccgccgucgccaagugcaacgagaagcacgacgaggaguucugcgacaugcugcgccucuucgacuucaacaagcaggccaucgagcggcugaaggcgcccgcccagaugagcauccagcugaucaacaaggccgugaacgcccucaucaacgaccagcugaucaugaagaaccaccuccgcgacaucaugugcauccccuacugcaacuacuccaaguacugguaccugaaccacacgaccaccgggaagaccagccugcccaagugcuggcugguguccaacggcagcuaccucaacgagacgcacuucuccgacgacaucgagcagcaggccgacaacaugaucaccgagaugcugcagaaggaguacauggagcggcagggcaagaccccgcuggggcucgucgaccuguucguguucagcaccuccuucuaccugaucagcaucuuccugcaccucgugaagaucccgacgcaccgccacaucgucggcaaguccugccccaagccccaccggcugaaccacauggggaucugcagcugcggccuguacaagcagcccggggugccggugaaguggaagcgcuga

SEQ ID NO: 4257 - RNA, 1476 nt, Artificial Sequence
  derived and/or modified protein sequence (opt1) from LASV(G2184-SLE-2011;Clade IV)__AIT17236__GPCstabilized
augggccagaucgugaccuucuuccaggaggucccccacgugaucgaggaggugaugaacaucguccugaucgcccucagcauccuggccgugcugaaggggcucuacaacuucgcgaccugcggccugguggggcuggucacguuccuccugcugugcggccgcuccugcaccaccagccucuacaaggggguguacgagcugcagacccuggagcucaacauggagacgcugaacaugaccaugccgcuguccugcaccaagaacaacagccaccacuacaucauggugggcaacgagaccggccucgagcugacgcugaccaacaccuccaucaucaaccacaaguucugcaaccucagcgacgcccacaagaagaaccuguacgaccacgcccugauguccaucaucagcaccuuccaccucuccauccccaacuucaaccaguacgaggccaugagcugcgacuucaacgggggccggaucuccguccaguacaaccugagccacuccuacgccggggaggcggccaaccacugcggcacgguggccaacggggugcugcagaccuucaugcgcauggccuggggcggcagcuacaucgcgcucgacuccgggugcggcaagugggacugcaucaugaccagcuaccaguaccugaucauccagaacaccacgugggaggaccacugccaguucucccgccccagccccaucggguaccugggccuccugucccagcggacccgcgacaucuacaucagccggcgccgccggggcaccuucaccuggacgcugagcgacuccgaggggaaggacaccccgggcggguacugccugacccgguggaugcucaucgaggccgagcugaagugcuucggcaacaccgccgucgccaagugcaacgagaagcacgacgaggaguucugcgacaugcugcgccucuucgacuucaacaagcaggccauccagcggcugaaggcgcccgcccagaugagcauccagcugaucaacaaggccgugaacgcccucaucaacgaccagcugaucaugaagaaccaccuccgcgacaucaugugcauccccuacugcaacuacucccgguacugguaccugaaccacacgaccaccggcaagaccagccugcccaagugcuggcugguguccaacggcagcuaccucaacgagacgcacuucuccgacgacaucgagcagcaggccgacaacaugaucaccgagaugcugcagaaggaguacauggagcgccaggggaagacgccccugggccucgucgaccuguucguguucagcaccuccuucuaccugaucagcaucuuccugcaccucgugaagaucccgacccaccggcacaucgucgggaaguccugccccaagccccaccgccugaaccacaugggcaucugcagcugcgggcuguacaagcagcccggcgugccggugaaguggaagcgguga

SEQ ID NO: 4258 - RNA, 1476 nt, Artificial Sequence
  derived and/or modified protein sequence (opt1) from LASV(G2197-SLE-2011;Clade IV)__AIT17240__GPCstabilized
augggccagaucgugaccuucuuccaggaggucccccacgugaucgaggaggugaugaacaucguccugaucgcccucagcauccuggccgugcugaaggggcucuacaaccuggcgaccugcggccugguggggcucgucacguuccugcugcucugcggccgcuccugcaccaccagccuguacaagggguucuacgagcugcagacccucgagcugaacauggagacgcugaacaugaccaugccgcucuccugcaccaagaacaacagccaccacuacauccgggugggcaacgagaccggccuggagcugacgcucaccaacaccuccaucaucgaccacaaguucugcaaccugagcgacgcccacaagaagaaccuguacgaccacgcccucauguccaucaucagcaccuuccaccuguccauccccaacuucaaccaguacgaggccaugagcugcgacuucaacgggggcaagaucuccgugcaguacaaccugagccacuccuacgccggggacgcggccaaccacugcggcacggucgccaacggggugcuccagaccuucaugcgcauggccuggggcggcagcuacaucgcgcuggacuccgggugcggccgcugggacugcaucaugaccagcuaccaguaccugaucauccagaacaccacgugggaggaccacugccaguucucccggcccagccccaucggguaccucggccugcugucccagaagacccgcgacaucuacaucagccggcgccgccggggcaccuucaccuggacgcugagcgacuccgaggggaaggacaccccgggcggguacugccucacccgguggaugcugaucgaggccgagcugaagugcuucggcaacaccgccguggccaagugcaacgagaagcacgacgaggaguucugcgacaugcuccgccuguucgacuucaacaagcaggccauccagcggcugaaggcgcccgcccagaugagcauccagcucaucaacaaggccgucaacgcccugaucaacgaccagcugaucaugaagaaccaccuccgcgacaucaugugcauccccuacugcaacuacuccaaguacugguaccugaaccacacgaccaccggcaagaccagccugcccaagugcuggcucguguccaacggcagcuaccugaacgagacgcacuucuccgacgacaucgagcagcaggccgacaacaugaucaccgagaugcugcagaaggaguacauggagcggcaggggaagacgccccucggccugguggaccuguucgucuucagcaccuccuucuaccugaucagcaucuuccuccaccuggugaagaucccgacccaccgccacaucguggggaaguccugccccaagccccaccggcugaaccacaugggcaucugcagcugcgggcucuacaagcagcccggcgucccggugaaguggaagcgcuga

SEQ ID NO: 4259 - RNA, 1476 nt, Artificial Sequence
  derived and/or modified protein sequence (opt1) from LASV(G2222-SLE-2011;Clade IV)__AIT17244__GPCstabilized
augggccagaucgugaccuucuuccaggaggucccccacgugaucgaggaggugaugaacaucguccugaucgcccucagcauccuggccgugcugaaggggcucuacaaccuggcgaccugcggccugguggggcucgucaccuuccugcugcucugcggccgcuccugcaccaccaaccuguacaaggggguguacgagcugcagacccucgagcugaacauggagacgcugaacaugaccaugccgcucagcugcaccaagaacuccagccaccacuacauccgggugggcaacgagaccggccuggagcugacgcucaccaacaccuccaucaucgaccacaaguucugcaaccugagcgacgcccacaagaagaaccuguacgaccacgcccucauguccaucaucagcaccuuccaccuguccauccccaacuucaaccaguacgaggccaugagcugcgacuucaacgggggcaagaucuccguccaguacaaccugagccacuccuacgugggggacgccgcggaccacugcggcacgguggccaacgggguccuccagaccuucaugcgcauggccuggggcggcagcuacaucgcccuggacuccgggugcggcaagugggacugcaucaucaccagcuaccaguaccugaucauccagaacaccacgugggaggaccacugccaguucucccgccccagccccaucggguaccucggccugcugucccagcggacccgcgacaucuacaucagccggcgccgccggggcaccuucaccuggacgcugagcgacuccgaggggaaggacaccccgggcggguacugccucacccgguggaugcugaucgaggcggagcugaagugcuucggcaacaccgccguggccaagugcaacgagaagcacgacgaggaguucugcgacaugcuccgccuguucgacuucaacaagcaggccauccagcggcugaaggcccccgcgcagaugagcauccagcucaucaacaaggccgugaacgcccugaucaacgaccagcugaucaugaagaaccaccuccgcgacaucaugugcauccccuacugcaacuacuccaaguacugguaccugaaccacacgaucaccggcaagaccagccugccccggugcuggcucgucuccaacggcagcuaccugaacgagacccgcuucuccgacgacaucgagcagcaggccgacaacaugaucacggagaugcugcagaaggaguacauggagcggcaggggaagacgccccucggccugguggaccuguucguguucagcaccuccuucuaccugaucagcaucuuccuccaccuggucaagaucccgacccaccgccacaucguggggaagcccugccccaagccccaccggcugaaccacaugggcaucugcuccugcgggcucuacaagcagccgggcgugcccgucaaguggaagcgcuga

SEQ ID NO: 4260 - RNA, 1476 nt, Artificial Sequence
  derived and/or modified protein sequence (opt1) from LASV(G2230-SLE-2012;Clade IV)__AIT17246__GPCstabilized
augggccagaucgugaccuucuuccaggaggucccccacgugaucgaggaggugaugaacaucguccugaucgcccucagccugcuggccgugcucaaggggcuguacaacguggcgaccugcggccugaucgggcucaucacguuccugcugcucugcggccgcuccugcaccaccaaccuguacaagggggucuacgagcugcagacccucgagcugaacauggagacgcugaacaugaccaugccgcucagcugcaccaagaacuccagccaccacuacaucauggugggcaacgagaccggccuggagcugacgcucaccaacaccuccaucaucaaccacaaguucugcaaccugagcgacgcccacaagaagaaccuguacgaccacacccucauguccaucaucagcacguuccaccuguccauccccaacuucaaccaguacgaggccaugagcugcgacuucaacgggggcaagaucuccgugcaguacaaccugagccacuccuacgccgucgacgccgcgaaccacugcgggaccguggccaacggcauccuccagaccuucaugcggauggccuggggcgggagcuacaucgcccuggacuccggcugcgggaacugggacugcaucaugaccagcuaccaguaccugaucauccagaacacgaccugggaggaccacugccaguucucccggcccagccccaucggcuaccucgggcugcugucccagcgcacccgggacaucuacaucagccgccggcgccggggcaccuucacguggacccugagcgacuccgagggcaacgacacccccgggggcuacugccucacccgcuggaugcugaucgaggcggagcugaagugcuucgggaacacggccguggccaagugcaacgagaagcacgacgaggaguucugcgacaugcuccggcuguucgacuucaacaagcaggccauccagcgccugaaggcccccgcgcagaugagcauccagcucaucaacaaggccgucaacgcccugaucaacgaccagcugaucaugaagaaccaccuccgggacaucaugugcauccccuacugcaacuacuccaaguacugguaccugaaccacaccaccaccgggaagacgagccugcccaagugcuggcucguguccaacggcagcuaccugaacgagacccacuucuccgacgacaucgagcagcaggccgacaacaugaucaccgagaugcugcagaaggaguacauggagcgccagggcaagaccccgcucgggcugguggaccuguucgucuucagcacguccuucuaccugaucagcaucuuccuccaccuggugaagaucccgacccaccggcacaucgugggcaagcccugccccaagccccaccgccugaaccacauggggaucugcuccugcggccucuacaagcagccggggguccccgugcgguggaagcgcuga

SEQ ID NO: 4261 - RNA, 1476 nt, Artificial Sequence
  derived and/or modified protein sequence (opt1) from LASV(G2259-SLE-2012;Clade IV)__AIT17250__GPCstabilized
augggccagaucgugaccuucuuccaggaggucccccacgugaucgaggaggugaugaacaucguccugaucgcccucagccugcuggccgugcucaaggggcuguacaacguggcgaccugcggccugaucgggcucgucacguuccugcugcucugcggccgcuccugcaccaccaaccuguacaaggggguguacgagcugcagacccucgagcugaacauggagacgcugaacaugaccaugccgcucagcugcaccaagaacaacucccaccacuacaucauggugggcaacgagaccggccuggagcugacgcucaccaacaccagcaucaucaaccacaaguucugcaaccuguccgacgcccacaagaagaaccuguacgaccacacccucaugagcaucaucuccacguuccaccugagcauccccaacuucaaccaguacgaggccauguccugcgacuucaacgggggcaagaucagcguccaguacaaccugucccacagcuacgccguggacgccgcgaaccacugcgggaccguggccaacggcguccuccagaccuucaugcggauggccuggggcggguccuacaucgcccuggacagcggcugcgggaacugggacugcaucaugaccuccuaccaguaccugaucauccagaacacgaccugggaggaccacugccaguucagccggcccucccccaucggcuaccucgggcugcugagccagcgcacccgggacaucuacaucucccgccggcgccggggcaccuucacguggacccugagcgacagcgagggcaacgacacccccgggggcuacugccucacccgcuggaugcugaucgaggcggagcugaagugcuucgggaacacggccguggccaagugcaacgagaagcacgacgaggaguucugcgacaugcuccggcuguucgacuucaacaagcaggccauccagcgccugaaggcccccgcgcagauguccauccagcucaucaacaaggccgugaacgcccugaucaacgaccagcugaucaugaagaaccaccuccgggacaucaugugcauccccuacugcaacuacagcaaguacugguaccugaaccacaccaccaccgggaagacgucccugcccaagugcuggcucgucagcaacggcuccuaccugaacgagacccacuucagcgacgacaucgagcagcaggccgacaacaugaucaccgagaugcugcagaaggaguacauggagcgccagggcaagaccccgcucgggcugguggaccuguucguguucuccacgagcuucuaccugaucuccaucuuccuccaccuggucaagaucccgacccaccggcacaucgugggcaagcccugccccaagccccaccgccugaaccacauggggaucugcagcugcggccucuacaagcagccgggggugcccguccgguggaagcgcuga

SEQ ID NO: 4262 - RNA, 1476 nt, Artificial Sequence
  derived and/or modified protein sequence (opt1) from LASV(G2263-SLE-2012;Clade IV)__AIT17254__GPCstabilized
augggccagaucgugaccuucuuccaggaggucccccacgugaucgaggaggugaugaacaucguccugaucgcccucagcauccuggccgugcugaaggggcucuacaacuucgcgaccugcggcaucguggggcuggucacguuccugcuccugugcggccgcuccugcaccaccagccuguacaaggggguguacgagcuccagacccuggagcugaacauggagacgcucaacaugaccaugccgcuguccugcaccaagaacaacagccaccacuacaucauggugggcaacgagaccggccuggagcucacgcugaccaacaccuccaucaucaaccacaaguucugcaaccugagcgacgcccacaagaagaaccucuacgaccacgcccugauguccaucaucagcaccuuccaccuguccauccccaacuucaaccaguacgaggccaugagcugcgacuucaacgggggcaagaucuccguccaguacaaccucagccacuccuacgccggggacgcggccaaccacugcggcacgguggccaacggggugcugcagaccuucaugcggauggccuggggcggcagcuacaucgcgcuggacuccgggugcgaccggugggacugcaucaugaccagcuaccaguaccucaucauccagaacaccacgugggaggaccacugccaguucucccgccccagccccaucggcuaccuggggcugcucucccagcggacccgcgacaucuacaucagccggcgccgccggggcaccuucaccuggacgcucagcgacuccgagggcaagaacacccccgggggcuacugccugacccgguggaugcugaucgaggccgagcucaagugcuucgggaacaccgccgucgccaagugcaacgagaagcacgacgaggaguucugcgacaugcugcgccuguucgacuucaacaagcaggccauccagcggcucaaggcgcccgcccagaugagcaucucccugaucaacaaggccgugaacgcccugaucaacgaccagcucaucaugaagaaccaccuccgcgacaucaugugcauccccuacugcaacuacagcaaguacugguaccugaaccacacgaccaccgggaagaccucccugccccggugcuggcuggugagcaacggcuccuaccugaacgagacgcacuucagcgacgacaucgagcagcaggccgacaacaugaucaccgagaugcuccagaaggaguacauggaccgccagggcaagaccccgcuggggcuggucgaccucuucguguucuccaccagcuucuaccugaucuccaucuuccugcaccuggugaagaucccgacgcaccggcacaucgucggcaagaccugccccaagccccaccgccucaaccacauggggaucugcagcugcggccuguacaagcagcccggggugccggugaaguggaagcgguga

SEQ ID NO: 4263 - RNA, 1476 nt, Artificial Sequence
  derived and/or modified protein sequence (opt1) from LASV(G2280-SLE-2012;Clade IV)__AIT17258__GPCstabilized
augggccagaucgugaccuucuuccaggaggucccccacgugaucgaggaggugaugaacaucguccugaucgcccucagcauccuggccgugcugaaggggcucuacaacaucgcgaccugcggccugguggggcuggucaccuuccuccugcugugcggccgcuccugcaccaccagccucuacaaggggguguacgagcugcagacccuggagcucaacauggagacgcugaacaugaccaugccgcuguccugcaccaagaacaacagccaccacuacaucauggugggcaacgagaccggccucgagcugacgcugaccaacaccuccaucaucaaccacaaguucugcaaccucagcgacgcccacaagaagaaccuguacgaccacgcccugauguccaucgucagcaccuuccaccucuccauccccaacuucaaccaguacgaggccaugagcugcgacuucaacgggggcaagaucuccgugcaguacaaccugagccacuccuacgccguggacgcggccaaccacugcgggacggucgccaacggcgugcugcagaccuucaugcggauggccuggggcgggagcuacaucgcgcucgacuccggcugcgggggcugggacugcaucaugaccagcuaccaguaccugaucauccagaacgugaccugggaggaccacugccaguucucccggcccagccccaucggguaccugggccuccugucccagcgcacgcgggacgucuacaucagccgccggcgccggggcaccuucaccuggacccugagcgacuccgaggggaacgacacgccgggcggguacugccugacccgcuggaugcucaucgaggccgagcugaagugcuucggcaacaccgccguggccaagugcaacgagaagcacgacgaggaguucugcgacaugcugcggcuguucgacuucaacaagcaggccauccagcgccugaaggcgcccgcccagaugagcauccagcugaucaacaaggccgugaacgcccucaucaacgaccagcugaucaugaagaaccaccuccgggacaucaugugcauccccuacugcaacuacuccaaguacugguaccucaaccacaccacgaccggcaagaccagccugcccaagugcuggcuggucuccaacggcagcuaccucaacgagacccacuucuccgacgacaucgagcagcaggccgacaacaugaucacggagaugcugcagaaggaguacauggagcgccaggggaagacgccccugggccucguggaccuguucguguucagcaccuccuucuaccugaucagcaucuuccugcaccucgucaagaucccgacccaccggcacaucguggggaagcccugccccaagccccaccgccugaaccacaugggcaucugcuccugcgggcuguacaagcagccgggcgugcccgucaaguggaagcgguga

SEQ ID NO: 4264 - RNA, 1476 nt, Artificial Sequence
  derived and/or modified protein sequence (opt1) from LASV(G2295-SLE-2012;Clade IV)__AIT17262__GPCstabilized
augggccagaucgugaccuucuuccaggaggucccccacgugaucgaggaggugaugaacaucguccugaucgcccucagcauccuggccgugcugaaggggcucuacaaccuggcgaccugcggccugguggggcucgucacguuccugcugcucugcggccgcuccugcaccaccagccuguacaaggggguguacgagcugcagacccucgagcugaacauggagacgcugaacaugaccaugccgcucuccugcaccaagaacaacagccaccacuacaucauggugggcaacgagaccggccuggagcugacgcucaccaacaccuccaucaucaaccacaaguucugcaaccugagcgacgcccacaagaagaaccuguacgaccacgcccucauguccaucaucagcaccuuccaccuguccauccccaacuucaaccaguacgaggccaugagcugcgacuucaacgggggcaagaucuccguccaguacaaccugagccacuccuacgccggggacgcggccacgcacugcggcaccguggccaacggggugcuccagaccuucaugcggauggccuggggcggcagcuacaucgcgcuggacuccgggugcggcaagugggacugcaucaugaccagcuaccaguaccugaucauccagaacacgaccugggaggaccacugccaguucucccggcccagccccaucggguaccucggccugcugucccagcgcacccgggacaucuacaucagccgccggcgccggggcaccuucacguggacccugagcgacuccgaggggaaggacaccccgggcggguacugccucacccgcuggaugcugaucgaggccgagcugaagugcuucggcaacacggccgucgccaagugcaacgagaagcacgacgaggaguucugcgacaugcuccggcuguucgacuucaacaagcaggccauccagcgccugaagacccccgcgcagaugagcauccagcucaucaacaaggccgugaacgcccugaucaacgaccagcugaucaugaagaaccaccuccgggacaucaugugcauccccuacugcaacuacuccaaguacugguaccugaaccacaccaccacgggcaagaccagccugccccgcugcuggcucguguccaacggcagcuaccugaacgagacccacuucuccgacgacaucgagcagcaggccgacaacaugaucaccgagaugcugcagaaggaguacauggagcggcaggggaagacgccccucggccuggucgaccuguucguguucagcaccuccuucuaccugaucagcaucuuccuccaccuggugaagaucccgacccaccgccacaucgucgggaagcccugccccaagccccaccggcugaaccacaugggcaucugcuccugcgggcucuacaagcagccgggcgugcccgugaaguggaagcgcuga

SEQ ID NO: 4265 - RNA, 1476 nt, Artificial Sequence
  derived and/or modified protein sequence (opt1) from LASV(G2315-SLE-2012;Clade IV)__AIT17266__GPCstabilized
augggccagaucgugaccuucuuccaggaggucccccacgugaucgaggaggugaugaacaucguccugaucgcccucagcauccuggccgugcugaaggggcucuacaaccuggcgaccugcggccugguggggcucgucacguuccugcugcucugcggccgcuccugcaccaccagccuguacaaggggguguacgagcugcagacccucgagcugaacauggagacgcugaacaugaccaugccgcucuccugcaccaagaacaacagccaccacuacaucauggugggcaacgagaccggccuggagcugacgcucaccaacaccucccugaucaaccacaaguucugcaaccugagcgacgcccacaagaagaaccucuacgaccacgcccugauguccaucaucagcaccuuccaccuguccauccccaacuucaaccaguacgaggccaugagcugcgacuucaacgggggcaagaucuccguccaguacaaccucagccacuccuacgccguggacgcggccaaccacugcgggacgguggccaacggcguccugcagaccuucaugcggauggccuggggcgggagcuacaucgcgcuggacuccggcugcgggggcugggacugcaucaugaccagcuaccaguaccucaucauccagaacaccacgugggaggaccacugccaguucucccggcccagccccaucggguaccugggccugcucucccagcgcacccgggacaucuacaucagccgccggcgccggggcaccuucaccuggacgcucagcgacuccgaggggaaggacaccccgggcggguacugccugacccgcuggaugcugaucgaggccgagcucaagugcuucggcaacaccgccguggccaagugcaacgagaagcacgacgaggaguucugcgacaugcugcggcuguucgacuucaacaagcaggccauccagcgccucaaggcgcccgcccagaugagcauccagcugaucaacaaggccgugaacgcccugaucaacgaccagcucaucaugaagaaccaccuccgggacaucaugugcauccccuacugcaacuacuccaaguacugguaccugaaccacacgaccaccggccgcaccagccugccccggugcuggcuggucuccaacggcagcuaccugaacgagacgcacuucuccgacgacaucgagcagcaggccgacaacaugaucaccgagaugcuccagaaggaguacauggagcgccaggggaagacgccccugggccugguggaccuguucguguucagcaccuccuucuaccucaucagcaucuuccugcaccuggucaagaucccgacccaccggcacaucguggggaaguccugccccaagccccaccgccucaaccacaugggcaucugcagcugcgggcuguacaagcagcccggcgugccggucaaguggaagcgguga

SEQ ID NO: 4266 - RNA, 1476 nt, Artificial Sequence
  derived and/or modified protein sequence (opt1) from LASV(G2318-SLE-2012;Clade IV)__AIT17270__GPCstabilized
augggccagaucgugaccuucuuccaggaggucccccacgugaucgaggaggugaugaacaucguccugaucgcccucagcgugcuggccgugcugaaggggcucuacaacuucgcgaccugcggccuggucgggcuggugaccuuccuccugcugugcggccgcuccugcagcaccuccguguacaagggggucuacgagcuccagacccuggagcugaacauggagacccucaacaugacgaugccgcugagcugcaccaagaacaacucccaccacuacaucauggugggcaacgagaccggccuggagcucacccugacgaacaccagcaucaucaaccacaaguucugcaaccuguccgacgcccacaagaagaaccucuacgaccacgcccugaugagcaucaucuccaccuuccaccugagcauccccaacuucaaccaguacgaggccauguccugcgacuucaacgggggcaagaucagcgugcaguacaaccucucccacagcuacgccgucgacgcggccaaccacugcgggaccguggccaacggcgugcugcagacguucaugcggauggccuggggcggguccuacaucgcgcuggacagcggcugcgggggcugggacugcaucaugaccaacuaccaguaccucaucauccagaacaccaccugggaggaccacugccaguucucccgccccagccccaucggguaccugggccugcucucccagcggacgcgcgacaucuacaucagccggcgccgccggggcaccuucaccuggacccucagcgacuccgaggggaaggacacgccgggcggguacugccugacccgguggaugcugaucgaggccgagcucaagugcuucggcaacaccgccgucgccaagugcaacgagaagcacgacgaggaguucugcgacaugcugcgccuguucgacuucaacaagcaggccauccagcggcucaaggcgcccgcccagaugagcauccagcugaucaacaaggccgugaacgcccugaucaacgaccagcucaucaugaagaaccaccuccgcgacaucaugugcauccccuacugcaacuacuccaaguacugguaccugaaccacaccacgaccggccggaccagccugcccaagugcuggcugguguccaacggcagcuaccugaacgagacccacuucuccgacgacaucgagcagcaggccgacaacaugaucacggagaugcuccagcgcgaguacauggagcggcaggggaagacgccccugggccuggucgaccucuucguguucagcaccuccuucuaccugaucagcaucuuccugcaccuggugaagaucccgacccaccgccacaucgucgggaaguccugccccaagccccaccggcucaaccacaugggcaucugcagcugcgggcuguacaagcagcccggcgugccggugaaguggaagcgcuga

SEQ ID NO: 4267 - RNA, 1476 nt, Artificial Sequence
  derived and/or modified protein sequence (opt1) from LASV(G2363-SLE-2012;Clade IV)__AIT17274__GPCstabilized
augggccagaucgugaccuucuuccaggaggucccccacgugaucgaggaggugaugaacaucguccugaucgcccucagcauccuggccgugcugaaggggcucuacaacguggcgaccugcggccugacggggcuggucgccuuccuccugcugugcggccgcuccugcaccaccacccucuacaaggggguguacgagcugcaggcccuggagcucaacauggagacgcugaacaugaccaugccgcugagcugcaccaagaacaacucccaccacuacauccgggugggcaacgagaccggccucgagcugacgcugaccaacaccagcaucaucgagcaccgcuucugcaaccucuccgacgcccacaagaagaaccuguacgaccacgcccugaugagcaucaucuccaccuuccaccucagcauccccaacuucaaccaguacgaggcgauguccugcgacuucaacgggggcaagaucagcguccaguacaaccugucccacagcuacgccguggacgccgccaaccacugcgggacgguggcgaacggcguccugcagaccuucaugcggauggccuggggcggguccuacaucgcccucgacagcggcugcaacgggugggacugcaucaugaccuccuaccaguaccugaucauccagaacaccacgugggaggaccacugccaguucagccggcccucccccaucggcuaccuggggcuccugagccagcgcacccgggacaucuacaucucccgccggcgccggggcaccuucaccuggacgcugagcgacagcgagggcaaggacacccccgggggcuacugccugacccgcuggaugcucaucgaggccgagcugaagugcuucgggaacaccgccguggcgaagugcaacgagaagcacgacgaggaguucugcgacaugcugcggcuguucgacuucaacaagcaggccauccagcgccugaaggcccccgcccagauguccauccagcugaucaacaaggccgugaacgcgcucaucaacgaccagcugaucaugaagaaccaccuccgggacaucaugugcauccccuacugcaacuacagcaaguacugguaccucaacaacacggccaccgggaagaccucccugccccgcugcuggcuggucagcaacggcuccuaccucaacgagacccacuucagcgacgacaucgagcagcaggccgacaacaugaucacggagaugcugcagaaggaguacauggagcggcagggcaagaccccgcuggggcucguggaccuguucguguucuccaccagcuucuaccugaucuccaucuuccugcaccucgucaagaucccgacccaccgccacaucgugggcaagcccugccccaagccccaccggcugaaccacauggggaucugcagcugcggccuguacaagcagccgggggcccccgugcgcuggaagcgguga

SEQ ID NO: 4268 - RNA, 1476 nt, Artificial Sequence
  derived and/or modified protein sequence (opt1) from LASV(G2384-SLE-2012;Clade IV)__AIT17276__GPCstabilized
augggccagaucgugaccuucuuccaggaggucccccacgugaucgaggaggugaugaacaucguccugaucgcccucagcauccuggccgugcugaaggggcucuacaacuucgcgaccugcggccugguggggcuggucacguuccuccugcugugcggccgcuccugcaccaccagccucuacaaggggguguacgagcugcagacccuggagcucaacauggagacgcugaacaugaccaugccgcuguccugcaccaagaacaacagccaccacuacaucauggugggcaacgagaccggccucgagcugacgcugaccaacaccuccaucaucaaccacaaguucugcaaccucagcgacgcccacaagaagaaccuguacgaccacgcccugauguccaucaucagcaccuuccaccucuccauccccaacuucaaccaguacgaggccaugagcugcgacuucaacgggggcaagaucuccguccaguacaaccugagccacuccuacgccggggacgcggccaaccacugcggcacgguggccaacggggugcugcagaccuucaugcggauggccuggggcggcagcuacaucgcgcucgacuccgggugcggcaagugggacugcaucaugaccagcuaccaguaccugaucauccagaacaccacgugggaggaccacugccaguucucccgccccagccccaucggguaccugggccuccugucccagcggacccgcgacaucuacaucagccggcgccgccggggcaccuucaccuggacgcugagcgacuccgaggggaaggacaccccgggcggguacugccugacccgguggaugcucaucgaggccgagcugaagugcuucggcaacaccgccgucgccaagugcaacgagaagcacgacgaggaguucugcgacaugcugcgccucuucgacuucaacaagcaggccauccagcggcugaaggcgcccgcccagaugagcauccagcugaucaacaaggccgugaacgcccucaucaacgaccagcugaucaugaagaaccaccuccgcgacaucaugugcauccccuacugcaacuacuccaaguacugguaccugaaccacacgaccaccggcaagaccagccugcccaagugcuggcugguguccaacggcagcuaccucaacgagacgcacuucuccgacgacaucgagcagcaggccgacaacaugaucaccgagaugcugcagaaggaguacauggagcggcaggggaagacgccccugggccucgucgaccuguucguguucagcaccuccuucuaccugaucagcaucuuccugcaccucgugaagaucccgacccaccgccacaucgucgggaaguccugccccaagccccaccggcugaaccacaugggcaucugcagcugcgggcuguacaagcagcccggcgugccggugcgcuggaagcgguga

SEQ ID NO: 4269 - RNA, 1473 nt, Artificial Sequence
  derived and/or modified protein sequence (opt1) from LASV(G2392-SLE-2012;Clade IV)__AIT17280__GPCstabilized
augggccagaucgugaccuucuuccaggaggucccccacgugaucgaggaggugaugaacaucguccugaucgcccucagcauccuggccgugcugaaggggcucuacaacuucgcgaccugcggccugguggggcuggucacguuccuccugcugugcggccgcuccugcaccaccagccucuacaaggggguguacgagcugcagacccuggagcucaacauggagacgcugaacaugaccaugccgcuguccugcaccaagaacaacagccaccacuacauccgggugggcaacgagaccggccucgagcugacgcugaccaacaccuccaucaucgaccacaaguucugcaaccucagcgacgcccacaagaagaaccuguacgaccacgcccugauguccaucaucagcaccuuccaccucuccauccccaacuucaaccaguacgaggccaugagcugcgacuucaacgggggcaagaucuccguccaguacaaccugagccacuccuacgccggggacgcggccaaccacugcggcacgguggccaacggggugcugcagaccuucaugcgcauggccuggggcggcagcuacaucgcgcucgacuccgggugcgagugggacugcaucaugaccagcuaccaguaccugaucauccagaacaccacgugggacaaccacugccaguucucccggcccagccccaucggcuaccuggggcuccugucccagcgcacccgggacaucuacaucagccgccggcgccggggcaccuucaccuggacgcugagcgacuccgagggcaaggacacccccgggggcuacugccugacccgcuggaugcucaucgaggccgagcugaagugcuucgggaacaccgccgucgccaagugcaacgagaagcacgacgaggaguucugcgacaugcugcggcuguucgacuucaacaagcaggccauccagcgccugaaggugcccgcgcagaugagcauccagcugaucaacaaggccgugaacgcccucaucaacgaccagcugaucaugaagaaccaccuccgggacaucaugugcauccccuacugcaacuacuccaaguacugguaccucaaccacacgaccaccgggaagaccagccugcccaagugcuggcuggucuccaacggcagcuaccucaacgagacgcacuucuccgacgacaucgagcagcaggccgacaacaugaucaccgagaugcugcagaaggaguacauggagcgccagggcaagaccccgcuggggcucguggaccuguucguguucagcaccuccuucuaccugaucagcaucuuccugcaccucgucaagaucccgacgcaccggcacaucgugggcaaguccugccccaagccccaccgccugaaccacauggggaucugcagcugcggcuucuacaagcagcccggggugccggucaaguggaagcgguga

SEQ ID NO: 4270 - RNA, 1476 nt, Artificial Sequence
  derived and/or modified protein sequence (opt1) from LASV(G2405-SLE-2012;Clade IV)__AIT17284__GPCstabilized
augggccagaucgugaccuucuuccaggaggucccccacgugaucgaggaggugaugaacaucguccugaucgcccucagcgugcuggccgugcugaaggggcucuacaacuucgcgaccugcggcaucgucgggcuggugacguuccugcuccugugcggccgcuccugcaccaccagccuguacaaggggguguacgagcuccagacccuggagcugaacauggagacgcucaacaugaccaugccgcuguccugcaccaagaacaacagccaccacuacaucauggucggcaacgacaccggccuggagcucacgcugaccaacaccuccaucaucaaccacaaguucugcaaccugagcgacgcccacaagaagaaccucuacgaccacgcccugauguccaucaucagcaccuuccaccuguccauccccaacuucaaccaguacgaggccaugagcugcgacuucaacgggggcaagaucuccgugcaguacaaccucagccacuccuacgccggggacgcggccgaccacugcggcacgguggccaacgggguccugcagaccuucaugcggauggccuggggcggcagcuacaucgcgcuggacuccgggugcggccggugggacugcaucaugaccagcuaccaguaccucaucauccagaacaccacgugggaggaccacugccaguucucccgccccagccccaucggguaccugggccugcucucccagcggacccgcgacaucuacaucagccggcgccgccggggcaccuucaccuggacgcucagcgacuccgaggggaaggacaccccgggcggguacugccugacccgguggaugcugaucgaggccgagcucaagugcuucggcaacaccgccguggccaagugcaacgagaagcacgacgaggaguucugcgacaugcugcgccuguucgacuucaacaagcaggccauccagcggcucaaggcgcccgcccagaugagcauccagcugaucaacaaggccgugaacgcccugaucaacgaccagcucaucaugaagaaccaccuccgcgacaucaugugcauccccuacugcaacuacuccaaguacugguaccugaaccacacgaccaccggcaagaccagccugcccaagugcuggcuggucuccaacggcagcuaccugaacgagacgcacuucuccgacgacaucgagcagcaggccgacaacaugaucaccgagaugcuccagaaggaguacauggagcggcaggggaagacgccccugggccugguggaccucuucguguucagcaccuccuucuaccugaucagcaucuuccugcaccuggucaagaucccgacccaccgccacaucguggggaagcccugccccaagccccaccggcucaaccacaugggcaucugcuccugcgggcuguacaagcagccgggcgugcccgucaaguggaagcgcuga

SEQ ID NO: 4271 - RNA, 1476 nt, Artificial Sequence
  derived and/or modified protein sequence (opt1) from LASV(G2427-SLE-2012;Clade IV)__AIT17288__GPCstabilized
augggccagaucgugaccuucuuccaggaggucccccacgugaucgaggaggugaugaacaucguccugaucgcccucagcauccuggccgugcugaaggggcucuacaacuucgcgaccugcggccugguggggcuggucaccuuccuccugcugugcggccgcuccugcaccaccagccucuacaaggggguguacgagcugcagacccuggagcucaacauggagacgcugaacaugaccaugccgcuguccugcaccaagaacaacagccaccacuacaucauggugggcaacgagaccggccucgagcugacgcugaccaacaccuccaucaucaaccacaaguucugcaaccucagcgacgcccacaagaagaaccuguacgaccacgcccugauguccaucaucagcaccuuccaccucuccauccccaacuucaaccaguacgaggccaugagcugcgacuucaacgggggcaagaucuccguccaguacaaccugagccacuccuacgccguggacgcggccaaccacugcgggacgguggccaacggcguccugcagaccuucaugcggauggccuggggcgggggcuacaucgcgcucgacagcgggugcggcaacugggacugcaucaugaccuccuaccaguaccugaucauccagaacaccacgugggaggaccacugccaguucagccggcccucccccaucggguaccugggccuccugagccagcgcacccgggacaucuacaucucccgccggcgccggggcaccuucaccuggacgcugagcgacagcgaggggaaggacaccccgggcggguacugccugacccgcuggaugcucaucgaggccgagcugaagugcuucggcaacaccgccguggccaagugcaacgagaagcacgacgaggaguucugcgacaugcugcggcuguucgacuucaacaagcaggccauccagcgccugaaggcgcccgcccagauguccauccagcugaucaacaaggccgugaacgcccucaucaacgaccagcugaucaugaagaaccaccuccgggacaucaugugcauccccuacugcaacuacagcaaguacugguaccucaaccacacggucaccggcaagaccucccugcccaagugcuggcuggugagcaacggcuccuaccucaacgagacccacuucagcgacgacaucgagcagcaggccgacaacaugaucacggagaugcugcagaaggaguacauggagcgccaggggaagacgccccugggccucguggaccuguucgucuucuccaccagcuucuaccugaucuccaucuuccugcaccucgugaagaucccgacccaccggcacaucgugggcaagagcugccccaagccccaccgccugaaccacauggggaucugcuccugcgggcuguacaagcagcccggcgucccggugcgguggaagcgcuga

SEQ ID NO: 4272 - RNA, 1476 nt, Artificial Sequence
  derived and/or modified protein sequence (opt1) from LASV(G2431-SLE-2012;Clade IV)__AIT17292__GPCstabilized
augggccagaucgugaccuucuuccaggaggucccccacgugaucgaggaggugaugaacaucguccugaucgcccucagcaucauggccgugcugaaggggcuguacaacaucgcgaccugcggccucguggggcuggucacguuccugcuccugugcggccgcuccugcaccaccacccuguacaaggggguguacgagcuccagacgcuggagcugaacauggagacccucaacaugaccaugccgcugagcugcaccaagaacaacucccaccacuacaucauggugggcaacgagacgggccuggagcucacccugaccaacaccagcaucaucaaccacaaguucugcaaccuguccgacgcccacaagaagaaccucuacgaccacgcccugaugagcaucaucuccacguuccaccugagcauccccaacuucaaccaguacgaggccauguccugcgacuucaacgggggcaagaucagcguccaguacaaccucucccacagcuacgccggggacgcggccaaccacugcggcaccguggccaacggggugcugcagaccuucaugcggauggccuggggcggcuccuacaucgcgcuggacagcgggugcggcgggugggacugcaucaugaccuccuaccaguaccucaucauccagaacacgaccugggaggaccacugccaguucacccgccccagccccaucggcuaccugggccugcucucccagcggacccgcgacaucuacaucagccggcgccgccgggggacguucaccuggacccucuccgacagcgagggcaacgacacccccgggggcuacugccugacgcgguggaugcugaucgaggccgagcucaagugcuucgggaacaccgccgucgccaagugcaacgagaagcacgacgaggaguucugcgacaugcugcgccuguucgacuucaacaagcaggccauccagcggcuccgcgcgcccgcccagaugagcauccagcugaucaacaaggccgugaacgcccugaucaacgaccagcucaucaugaagaaccaccuccgggacaucaugugcaucccguacugcaacuacuccaaguacugguaccugaaccacaccaccacgggccgcaccagccugccccggugcuggcugguguccaacgggagcuaccugaacgagacccacuucuccgacgacaucgagcagcaggccgacaacaugaucaccgagaugcuccagaaggaguacauggagcgccagggcaagacgccccuggggcuggucgaccucuucguguucagcaccuccuucuaccugaucagcaucuuccugcaccugaucaagaucccgacccaccggcacaucgugggcaagcccugccccaagccccaccgccucaaccacaugggggucugcuccugcggccuguacaagcagccgggcgugcccgugcgguggaagcgcuga

SEQ ID NO: 4273 - RNA, 1476 nt, Artificial Sequence
  derived and/or modified protein sequence (opt1) from LASV(G2511-SLE-2012;Clade IV)__AIT17294__GPCstabilized
augggccagaucgugaccuucuuccaggaggucccccacgugaucgaggaggugaugaacaucguccugaucgcccucagcauccuggccgugcugaaggggcucuacaaccuggcgaccugcggccugguggggcucgucacguuccugcugcucugcggccgcuccugcaccaccagccuguacaaggggguguacgagcugcagacccucgagcugaacauggagacgcugaacaugaccaugccgcucuccugcaccaagaacaacagccaccacuacaucauggugggcaacgagaccggccuggagcugacgcucaccaacaccuccaucaucgaccacaaguucugcaaccugagcgacgcccacaagaagaaccuguacgaccacgcccucauguccaucaucagcaccuuccaccuguccauccccaacuucaaccaguacgaggccaugagcugcgacuucaacgggggcaagaucuccguccaguacaaccugagccacuccuacgccggggacgcggccaaccacugcggcacgguggccaacggggugcuccagaccuucaugcggauggccuggggcggcagcuacaucgcgcuggacuccgggugcggcgggugggacugcaucaugaccagcuaccaguaccugaucauccagaacaccacgugggaggaccacugccaguucucccggcccagccccgucggcuaccucggccugcugucccagcgcacccgggacaucuacaucagccgccggcgccgggggaccuucaccuggacgcugagcgacuccgagggcaaggacacccccgggggcuacugccucacccgcuggaugcugaucgaggccgagcugaagugcuucgggaacaccgccguggccaagugcaacgagaagcacgacgaggaguucugcgacaugcuccggcuguucgacuucaacaagcaggccauccagcgccugaagacgcccgcgcagaugagcauccagcucaucaacaaggccgugaacgcccugaucaacgaccagcugaucaugaagaaccaccuccgggacaucaugugcauccccuacugcaacuacuccaaguacugguaccugaaccacaccaccaccggcaagacgagccugccccgcugcuggcucgucuccaacgggagcuaccugaacgagacccacuucuccgacgacaucgagcagcaggccgacaacaugaucaccgagaugcugcagaaggaguacauggagcggcagggcaagaccccgcucgggcugguggaccuguucguguucagcacguccuucuaccugaucagcaucuuccuccaccuggucaagaucccgacccaccgccacaucgugggcaagcccugccccaagccccaccggcugaaccacauggggaucugcuccugcggccucuacaagcagccgggcgugcccgucaaguggaagcgcuga

SEQ ID NO: 4274 - RNA, 1476 nt, Artificial Sequence
  derived and/or modified protein sequence (opt1) from LASV(G2554-SLE-2012;Clade IV)__AIT17298__GPCstabilized
augggccagaucgugaccuucuuccaggaggucccccacgugaucgaggaggugaugaacaucguccugaucgcccucagcauccuggccgugcugaaggggcucuacaacaucgcgaccugcggccugcuggggcucgugugcuuccugcugcucugcggccgcuccugcaccaccagccuguacaagggggucuacgagcugcagacccucgagcugaacauggagacccugaacaugacgaugccgcucuccugcaccaagaacaacagccaccacuacaucauggugggcaacgagaccggccuggagcugacccucacgaacaccuccaucaucaaccacaaguucugcaaccugagcgacgcccacaagaagaaccuguacgaccacgcccucauguccaucaucagcaccuuccaccuguccauccccaacuucaaccaguacgaggccaugagcugcgacuucaacgggggcaagaucuccgugcaguacaaccugagccacuccuacgccgucgacgcggccagccacugcgggaccaucgccaacggcgugcuccagacguucaugcggauggccuggggcggguccuacaucgcgcuggacagcggcugcgggggcugggacugcaucaugaccuccuaccaguaccugaucauccagaacaccaccugggaggaccacugccaguucagccgccccucccccaucggguaccucggccugcugagccagcggacgcgcgacaucuacaucagccggcgccgccggggcaccuucaccuggacccuguccgacagcgaggggaaggacacgccgggcggguacugccucacccgguggaugcugaucgaggccgagcugaagugcuucggcaacaccgccguggccaagugcaacgagaagcacgacgaggaguucugcgacaugcuccgccuguucgacuucaacaagcaggccauccagcggcugaaggcgcccgcccagauguccauccagcucaucaacaaggccgucaacgcccugaucaacgaccagcugaucaugaagaaccaccuccgcgacaucaugugcauccccuacugcaacuacagcaaguacugguaccugaaccacaccacgaccggcaagaccucccugcccaagugcuggcucgugagcaacggcuccuaccugaacgagacccacuucagcgacgacaucgagcagcaggccgacaacaugaucacggagaugcugcagaaggaguacauggagcggcaggggaagacgccccucggccugguggaccuguucgucuucuccaccagcuucuaccugaucuccaucuuccuccaccuggugaagaucccgacccaccgccacguggucgggaagcccugccccaagccccaccggcugaaccacaugggcaucugcagcugcgggcucuacggccagccgggcgugcccgugaaguggaagcgcuga

SEQ ID NO: 4275 - RNA, 1476 nt, Artificial Sequence
  derived and/or modified protein sequence (opt1) from LASV(G2557-SLE-2012;Clade IV)__AIT17302__GPCstabilized
augggccagaucgugaccuucuuccaggaggucccccacgugaucgaggaggugaugaacaucguccugaucgcccucagccugcuggccgugcucaaggggcuguacaacguggcgaccugcggccugaucgggcucgucacguuccugcugcucugcggccgcuccugcaccaccaaccuguacaaggggguguacgagcugcagacccucgagcugaacauggagacgcugaacaugaccaugccgcucagcugcaccaagaacaacucccaccacuacaucauggugggcaacgagaccggccuggagcugacgcucaccaacaccagcaucaucucccacaaguucugcaaccugagcgacgcccacaagaagaaccuguacgaccacacccucauguccaucaucagcacguuccaccuguccauccccaacuucaaccaguacgaggccaugagcugcgacuucaacgggggcaagaucuccguccaguacaaccugagccacuccuacgccguggacgccgcgaaccacugcgggaccguggccaacggcguccuccagaccuucaugcggauggccuggggcgggagcuacaucgcccuggacuccggcugcgggaacugggacugcaucaugaccagcuaccaguaccugaucauccagaacacgaccugggaggaccacugccaguucucccggcccagccccaucggcuaccucgggcugcugucccagcgcacccgggacaucuacaucagccgccggcgccggggcaccuucacguggacccugagcgacuccgagggcaacgacacccccgggggcuacugccucacccgcuggaugcugaucgaggcggagcugaagugcuucgggaacacggccguggccaagugcaacgagaagcacgacgaggaguucugcgacaugcuccggcuguucgacuucaacaagcaggccauccagcgccugaaggcccccgcgcagaugagcauccagcucaucaacaaggccgugaacgcccugaucaacgaccagcugaucaugaagaaccaccuccgggacaucaugugcauccccuacugcaacuacuccaaguacugguaccugaaccacaccaccaccgggaagacgagccugcccaagugcuggcucgucuccaacggcagcuaccugaacgagacccacuucuccgacgacaucgagcagcaggccgacaacaugaucaccgagaugcugcagaaggaguacauggagcgccagggcaagaccccgcucgggcugguggaccuguucguguucagcacguccuucuaccugaucagcaucuuccuccaccuggucaagaucccgacccaccggcacaucgugggcaagcccugccccaagccccaccgccugaaccacauggggaucugcuccugcggccucuacaagcagccgggggugcccguccgguggaagcgcuga

SEQ ID NO: 4276 - RNA, 1476 nt, Artificial Sequence
  derived and/or modified protein sequence (opt1) from LASV(G2587-SLE-2012;Clade IV)__AIT17310__GPCstabilized
augggccagaucgugaccuucuuccaggaggucccccacgugaucgaggaggugaugaacaucguccugaucgcccucagcauccuggccgugcugaaggggcucuacaaccuggcgaccugcggccugguggggcucgucacguuccugcugcucugcggccgcuccugcaccaccagccuguacaaggggguguacgagcugcagacccucgagcugaacauggagacgcugaacaugaccaugccgcucuccugcaccaagaacaacagccaccacuacaucauggugggcaacgagaccggccuggagcugacgcucaccaacaccuccaucaucaaccacaaguucugcaaccugagcgacgcccacaagaagaaccuguacgaccacgcccucauguccaucaucagcaccuuccaccuguccauccccaacuucaaccaguacgaggccaugagcugcgacuucaacgggggcaagaucuccguccaguacaaccugagccacuccuacgccggggacgcggccacgcacugcggcaccguggccaacggggugcuccagaccuucaugcggauggccuggggcggcagcuacaucgcgcuggacuccgggugcggcaagugggacugcaucaugaccagcuaccaguaccugaucauccagaacacgaccugggaggaccacugccaguucucccggcccagccccaucggguaccucggccugcugucccagcgcacccgggacaucuacaucagccgccggcgccggggcaccuucacguggacccugagcgacuccgaggggaaggacaccccgggcggguacugccucacccgcuggaugcugaucgaggccgagcugaagugcuucggcaacacggccgucgccaagugcaacgagaagcacgacgaggaguucugcgacaugcuccggcuguucgacuucaacaagcaggccauccagcgccugaagacccccgcgcagaugagcauccagcucaucaacaaggccgugaacgcccugaucaacgaccagcugaucaugaagaaccaccuccgggacaucaugugcauccccuacugcaacuacuccaaguacugguaccugaaccacaccaccacgggcaagaccagccugccccgcugcuggcucguguccaacggcagcuaccugaacgagacccacuucuccgacgacaucgagcagcaggccgacaacaugaucaccgagaugcugcagaaggaguacauggagcggcaggggaagacgccccucggccuggucgaccuguucguguucagcaccuccuucuaccugaucagcaucuuccuccaccuggugaagaucccgacccaccgccacaucgucgggaagcccugccccaagccccaccggcugaacuacaugggcaucugcuccugcgggcucuacaagcagccgggcgugcccgugaaguggaagcgcuga

SEQ ID NO: 4277 - RNA, 1476 nt, Artificial Sequence
  derived and/or modified protein sequence (opt1) from LASV(G2612-SLE-2012;Clade IV)__AIT17314__GPCstabilized
augggccagaucgugaccuucuuccaggaggucccccacgugaucgaggaggugaugaacaucguccugaucacccucagcauccuggccgugcugaaggggcucuacaacguggccacgugcggccuggucgggcuggugaccuuccuccugcugugcggccgcuccugcaccaccagccucuacaaggggguguacgagcugcagacgcuggagcucaacauggagacccugaacaugaccaugccgcuguccugcaccaagaacaacagccaccacuacaucauggucggcaacgagacgggccucgagcugacccugaccaacaccuccaucaucaaccacaaguucugcaaccucagcgacgcgcacaagaaggaccuguacgaccacgcccugauguccaucaucagcacguuccaccucuccauccccaacuucaaccaguacgaggccaugagcugcgacuucaacgggggcaagaucuccgugcaguacaaccugagccacuccuacgccguggacgccgcgaaccacugcgggaccgucgccaacggcgugcugcagaccuucaugcggauggccuggggcgggagcuacaucgcccucgacuccggcugcgggggcugggacugcaucaugaccagcuaccaguaccugaucauccagaacacgaccugggaggaccacugccaguucucccggcccagccccaucggguaccugggccuccugucccagcgcacccgggacaucuacaucagccgccggcgccggggcaccuucacguggacccugagcgacuccgaggggaacgacaccccgggcggguacugccugacccgcuggaugcucaucgaggcggagcugaagugcuucggcaacacggccguggccaagugcaacgagaagcacgacgaggaguucugcgacaugcugcggcuguucgacuucaacaagcaggccauccagcgccugaaggcccccgcgcagaugagcauccagcugaucaacaaggccgucaacgcccucaucaacgaccagcugaucaugaagaaccaccuccgggacaucaugugcauccccuacugcaacuacuccaaguacugguaccucaaccacaccaccaccggcaagacgagccugcccaagugcuggcugguguccaacggcagcuaccucaacgagacccacuucuccgacgacaucgagcagcaggccgacaacaugaucaccgagaugcugcagaaggaguacauggagcgccaggggaagacgccccugggccucguggaccuguucgucuucagcaccuccuucuaccugaucagcaucuuccugcaccucgugaagaucccgacccaccggcacaucguggggaagcccugccccaagccccaccgccugaaccacaugggcaucugcuccugcgggcuguacaagcagccgggcguccccgugaaguggaagcgguga

SEQ ID NO: 4278 - RNA, 1476 nt, Artificial Sequence
  derived and/or modified protein sequence (opt1) from LASV(G2615-SLE-2012;Clade IV)__AIT17318__GPCstabilized
augggccagaucgugaccuucuuccaggaggucccccacgugaucgaggaggugaugaacaucguccugaucgcccucagccugcuggccgugcucaaggggcuguacaacguggcgaccugcggccugaucgggcucgucacguuccugcugcucugcggccgcuccugcaccaccaaccuguacaaggggguguacgagcugcagacccucgagcugaacauggagacgcugaacaugaccaugccgcucagcugcaccaagaacaacucccaccacuacaucauggugggcaacgagaccggccuggagcugacgcucaccaacaccagcaucaucaaccacaaguucugcaaccuguccgacgcccacaagaagaaccuguacgaccacgcccucaugagcaucaucuccaccuuccaccugagcauccccaacuucaaccaguacgaggccauguccugcgacuucaacgggggcaagaucagcguccaguacaaccugucccacagcuacgccguggacgcggccaaccacugcgggacgguggccaacggcguccuccagaccuucaugcggauggccuggggcggguccuacaucgcgcuggacagcggcugcgggaacugggacugcaucaugaccuccuaccaguaccugaucauccagaacaucaccugggaggaccacugccaguucagccggcccucccccaucggcuaccucgggcugcugagccagcgcacgcgggacaucuacaucucccgccggcgccggggcaccuucaccuggacccugagcgacagcgagggcaacgacacgcccgggggcuacugccucacccgcuggaugcugaucgaggccgagcugaagugcuucgggaacaccgccguggccaagugcaacgagaagcacgacgaggaguucugcgacaugcuccggcuguucgacuucaacaagcaggccauccagcgccugaaggcgcccgcccagauguccauccagcucaucaacaaggccgugaacgcccugaucaacgaccagcugaucaugaagaaccaccuccgggacaucaugugcauccccuacugcaacuacagcaaguacugguaccugaaccacaccacgaccgggaagaccucccugcccaagugcuggcucgucagcaacggcuccuaccugaacgagacccacuucagcgacgacaucgagcagcaggccgacaacaugaucacggagaugcugcagaaggaguacauggagcgccagggcaagaccccgcucgggcugguggaccuguucguguucuccaccagcuucuaccugaucuccaucuuccuccaccuggucaagaucccgacccaccggcacaucgugggcaagcccugccccaagccccaccgccugaaccacauggggaucugcagcugcggccucuacaagcagccgggggugcccguccgguggaagcgcuga

SEQ ID NO: 4279 - RNA, 1476 nt, Artificial Sequence
  derived and/or modified protein sequence (opt1) from LASV(G2723-SLE-2012;Clade IV)__AIT17322__GPCstabilized
augggccagaucgugaccuucuuccaggaggucccccacgugaucgaggaggugaugaacaucguccugaucgcccucagccugcuggccgugcucaaggggcuguacaacguggcgaccugcggccugaucgggcucgucacguuccugcugcucugcggccgcuccugcaccaccaaccuguacaagggggccuacgagcugcagacccucgagcugaacauggagacgcugaacaugaccaugccgcucagcugcaccaagaacaacucccaccacuacaucauggugggcaacgagaccggccuggagcugacgcucaccaacaccagcaucaucaaccacaaguucugcaaccuguccgacgcccacaagaagaaccuguacgaccacacccucaugagcaucaucuccacguuccaccugagcauccccaacuucaaccaguacgaggccauguccugcgacuucaacgggggcaagaucagcgugcaguacaaccugucccacagcuacgccgucgacgcggccaaccacugcgggaccguggccaacggcgugcuccagaccuucaugcggauggccuggggcggguccuacaucgcgcuggacagcggcugcgggaacugggacugcaucaugaccuccuaccaguaccugaucauccagaacacgaccugggaggaccacugccaguucagccggcccucccccaucggcuaccucgggcugcugagccagcgcacccgggacaucuacaucucccgccggcgccggggcaccuucacguggacccugagcgacagcgagggcaacgacacccccgggggcuacugccucacccgcuggaugcugaucgaggccgagcugaagugcuucgggaacacggccgucgccaagugcaacgagaagcacgacgaggaguucugcgacaugcuccggcuguucgacuucaacaagcaggccauccagcgccugaaggcgcccgcccagauguccauccagcucaucaacaaggccgugaacgcccugaucaacgaccagcugaucaugaagaaccaccuccgggacaucaugugcauccccuacugcaacuacagcaaguacugguaccugaaccacaccaccaccgggaagacgucccugcccaagugcuggcucgugagcaacggcuccuaccugaacgagacccacuucagcgacgacaucgagcagcaggccgacaacaugaucaccgagaugcugcagaaggaguacauggagcgccagggcaagaccccgcucgggcuggucgaccuguucguguucuccacgagcuucuaccugaucuccaucuuccuccaccuggugaagaucccgacccaccggcacaucgucggcaagcccugccccaagccccaccgccugaaccacauggggaucugcagcugcggccucuacaagcagccgggggugcccgugcgguggaagcgcuga

SEQ ID NO: 4280 - RNA, 1476 nt, Artificial Sequence
  derived and/or modified protein sequence (opt1) from LASV(G2868-SLE-2012;Clade IV)__AIT17328__GPCstabilized
augggccagaucgugaccuucuuccaggaggucccccacgugaucgaggaggugaugaacaucguccugaucacccucagcauccuggccgugcugaaggggcucuacaacaucgccacgugcggccugguggggcuggucaccuuccuccugcugugcggcaaguccugcaccaccagccucuacaaggggguguacgagcugcagacgcuggagcucaacauggagacccugaacaugaccaugccgcuguccugcaccaagaacaacagccaccacuacauccgcgugggcaacgagacgggccucgagcugacccugaccaacaccuccaucaucaaccacaaguucugcaaccucagcgacgcgcacaagaagaaccuguacgaccacgcccugauguccaucaucagcacguuccaccucuccauccccaacuucaaccaguacgaggccaugagcugcgacuucaacgggggcaagaucuccguccaguacaaccugagccacuccuacgccguggacgccgcgaaccacugcgggaccguggccaacggcguccugcagaccuucaugcggauggccuggggcgggagcuacaucgcccucgacuccggcugcgggaacugggacugcaucaugaccagcuaccaguaccugaucauccagaacacgaccugggaggaccacugccaguucucccgccccagccccaucggcuaccuggggcuccugucccagcggacccgcgacaucuacaucagccggcgccgccggggcaccuucacguggacccugagcgacuccgagggcaacgacgcgcccgggggcuacugccugacccgguggaugcucaucgaggccgagcugaagugcuucgggaacaccgccguggccaagugcaacgagaagcacgacgaggaguucugcgacaugcugcgccucuucgacuucaacaagcaggccauccagcggcugaaggcgcccgcccagaugagcauccagcugaucaacaaggccgugaacgcccucaucaacgaccagcugaucaugaagaaccaccuccgcgacaucaugugcauccccuacugcaacuacuccaaguacugguaccugaaccacacgaccaccgggaagaccagccugcccaagugcuggcuggucuccaacggcagcuaccucaacgagacgcacuucuccgacgacaucgagcagcaggccgacaacaugaucaccgagaugcugcagaaggaguacauggagcggcagggcaagaccccgcuggggcucguggaccuguucguguucagcaccuccuucuaccugaucagcaucuuccugcaccucgucaagaucccgacgcaccgccacguggugggcaaguccugccccaagccccaccggcugaaccacauggggaucugcagcugcggccuguacaagcagcccggggucccggugaaguggaagcgcuga

SEQ ID NO: 4281 - RNA, 1476 nt, Artificial Sequence
  derived and/or modified protein sequence (opt1) from LASV(G2903-SLE-2012;Clade IV)__AIT17332__GPCstabilized
augggccagaucgugaccuucuuccaggaggucccccacgugaucgaggaggugaugaacaucguccugaucgcccucagcauccuggccgugcugaaggggcucuacaaccuggcgaccugcggccugguggggcucgucacguuccugcugcucugcggccgcuccugcaccaccagccuguacaaggggguguacgagcugcagacccucgagcugaacauggagacgcugaacaugaccaugccgcucuccugcaccaagaacaacagccaccacuacauccgggugggcaacgagaccggccuggagcugacgcucaccaacaccuccaucaucaaccacaaguucugcaaccugagcgacgcccacaagaagaaccuguacgaccacgcccucauguccaucaucagcaccuuccaccuguccauccccaacuucaaccaguacgaggccaugagcugcgacuucaacgggggcaagaucuccguccaguacaaccugagccacuccuacgccguggacgcggccaaccacugcgggacgguggccaacggcguccuccagaccuucaugcgcauggccuggggcgggagcuacaucgcgcuggacuccggcugcgggcggugggacugcaucaugaccagcuaccaguaccugaucauccagaacaccacgugggaggaccacugccucuucucccgccccagccccaucggcuaccuggggcugcucucccagcggacccgcgacaucuacaucagccggcgccgccggggcaccuucaccuggacgcucagcgacuccgagggccgggacacccccgggggcuacugccugacccgcuggaugcugaucgaggccgagcucaagugcuucgggaacaccgccguggccaagugcaacgagaagcacgacgaggaguucugcgacaugcugcggcuguucgacuucaacaagcaggccauccagcgccucaaggcgcccgcccagaugagcauccagcugaucaacaaggccgugaacgcccugaucaacgaccagcucaucaugaagaaccaccuccgggacaucaugugcauccccuacugcaacuacuccaaguacugguaccugaaccacacgaccaccgggcgcaccagccugccccggugcuggcuggucuccaacggcagcuaccugaacgagacgcacuucuccgacgacaucgagcagcaggccgacaacaugaucaccgagaugcuccagaaggaguacauggagcgccagggcaagaccccgcuggggcugguggaccuguucguguucagcaccuccuucuaccucaucagcaucuuccugcaccuggucaagaucccgacgcaccggcacaucgugggcaaguccugccccaagccccaccgccucaaccacauggggaucugcagcugcggccuguacaagcagcccggggugccggucaaguggaagcgguga

SEQ ID NO: 4282 - RNA, 1476 nt, Artificial Sequence
  derived and/or modified protein sequence (opt1) from LASV(G2944-SLE-2012;Clade IV)__AIT17340__GPCstabilized
augggccagaucgugaccuucuuccaggaggucccccacgugaucgaggaggugaugaacaucguccugaucgcccucagcauccuggccgugcugaaggggcucuacaacuucgcgaccugcggccugguggggcuggucaccuuccuccugcugugcggccgcuccugcaccaccagccucuacaaggggguguacgagcugcagacccuggagcucaacauggagacgcugaacaugaccaugccgcuguccugcaccaagaacaacagccaccacuacaucauggugggcaacgagaccggccucgagcugacgcugaccaacaucuccaucaucaaccacaaguucugcaaccucagcgacgcccacaagaagaaccuguacgaccacgcccugauguccaucaucagcaccuuccaccucuccauccccaacuucaaccaguacgaggccaugagcugcgacuucaacgggggcaagaucuccguccaguacaaccugagccacuccuacgccggggacgcggccaaccacugcggcaccguggccaacggggugcugcagacguucaugcggauggccuggggcggcagcuacaucgcgcucgacuccgggugcggcgagugggacugcaucaugaccagcuaccaguaccugaucauccagaacaccaccugggaggaccacugccaguucucccggcccagccccaucggguaccugggccuccugucccagcgcacgcgggacaucuacaucagccgccggcgccggggcaccuucaccuggacccugagcgacuccgaggggaaggacacgccgggcggguacugccugacccgcuggaugcucaucgaggccgagcugaagugcuucggcaacaccgccgucgccaagugcaacgagaagcacgacgaggaguucugcgacaugcugcggcuguucgacuucaacaagcaggccauccagcgccugaaggcgcccgcccagaugagcauccagcugaucaacaaggccgugaacgcccucaucaacgaccagcugaucaugaagaaccaccuccgggacaucaugugcauccccuacugcaacuacuccaaguacugguaccucaaccacaccacgaccggcaagaccagccugcccaagugcuggcugguguccaacggcagcuaccucaacgagacccacuucuccgacgacaucgagcagcaggccgacaacaugaucacggagaugcugcagaaggaguacauggagcgccaggggaagacgccccugggccucgucgaccuguucguguucagcaccuccuucuaccugaucagcaucuuccugcaccucgugaagaucccgacccaccggcacaucgucgggaagcccugcccccgcccccaccggcugaaccacaugggcaucugcuccugcgggcuguacaagcagccgggcgugcccgugaaguggaagcgcuga

SEQ ID NO: 4283 - RNA, 1476 nt, Artificial Sequence
  derived and/or modified protein sequence (opt1) from LASV(G3010-SLE-2013;Clade IV)__AIT17344__GPCstabilized
augggccagaucgugaccuucuuccaggaggucccccacgugaucgaggaggugaugaacaucguccugaucgcccucagcauccuggccgugcugaaggggcucuacaacuucgcgaccugcggccugguggggcuggucacguuccuccugcugugcggccgcuccugcaccaccagccucuacaaggggguguacgagcugcagacccuggagcucaacauggagacgcugaacaugaccaugccgcuguccugcaccaagaacaacagccaccacuacaucauggugggcaacgagaccggccucgagcugacgcugaccaacaccuccaucaucaaccacaaguucugcaaccucagcgacgcccacaagaagaaccuguacaaccacgcccugauguccaucaucagcaccuuccaccucuccauccccaacuucaaccaguacgaggccaugagcugcgacuucaacgggggcaagaucuccguccaguacaaccugagccacuccuacgccggggacgcggccagccacugcggcacgguggccaacggggugcugcagaccuucaugcggauggccuggggcggcuccuacaucgcgcucgacagcgggugcggcaagugggacugcaucaugaccuccuaccaguaccugaucauccagaacaccacgugggaggaccacugccaguucagccgccccucccccaucggguaccugggccuccugagccagcggacccgcgacaucuacaucagccggcgccgccggggcaccuucaccuggacgcuguccgacagcgaggggaaggacaccccgggcggguacugccugacccgguggaugcucaucgaggccgagcugaagugcuucggcaacaccgccgucgccaagugcaacgagaagcacgacgaggaguucugcgacaugcugcgccucuucgacuucaacaagcaggccauccagcggcugaagacgcccgcgcagauguccauccagcugaucaacaaggccgugaacgcccucaucaacgaccagcugaucaugaagaaccaccuccgcgacaucaugugcauccccuacugcaacuacagcaaguacugguaccugaaccacaccaccaccggcaagacgucccugcccaagugcuggcuggugagcaacggcuccuaccucaacgagacccacuucagcgacgacaucgagcagcaggccgacaacaugaucaccgagaugcugcagaaggaguacauggagcggcaggggaagacgccccugggccucgucgaccuguucguguucuccaccagcuucuaccugaucuccaucuuccugcaccucgugaagaucccgacccaccgccacaucgucggcaagagcugccccaagccccaccggcugaaccacauggggaucugcuccugcgggcuguacaagcagcccggcgugccggugcgcuggaagcgguga

SEQ ID NO: 4284 - RNA, 1476 nt, Artificial Sequence
  derived and/or modified protein sequence (opt1) from LASV(G3016-SLE-2013;Clade IV)__AIT17348__GPCstabilized
augggccagaucgugaccuucuuccaggaggucccccacgugaucgaggaggugaugaacaucguccugaucgcccucagcauccuggccgugcugaaggggcucuacaacaucgcgaccugcggccugaucgggcuggugacguuccuccugcugugcggccgcuccugcaccaccagccucuacaagggggucuacgagcugcagacccuggagcucaacauggagacgcugaacaugaccaugccgcuguccugcaccaagaacaacagccaccacuacaucauggugggcaacgagaccggccucgagcugacgcugaccaacaccuccaucaucaaccacaaguucugcaaccucagcgacgcccacaagaagaaccuguacgaccacgcccugauguccaucaucagcaccuuccaccucuccauccccaacuucaaccaguacgaggccaugagcugcgacuucaacgggggcaagaucuccgugcaguacaaccugagccacuccuacgccggggacgcggccaaccacugcggcacggucgccaacggggugcugcagaccuucaugcggauggccuggggcggcagcuacaucgcgcucgacuccgggugcggccggugggacugcaucaugaccagcuaccaguaccugaucauccagaacaccacgugggaggaccacugccaguucucccgccccagccccaucggguaccugggccuccugucccagcggacccgcgacaucuacaucagccggcgccgccggggcaccuucaccuggacgcugagcgacuccgaggggaacgacaccccgggcggguacugccugacccgguggaugcucaucgaggccgagcugaagugcuucggcaacaccgccguggccaagugcaacgagaagcacgacgaggaguucugcgacaugcugcgccucuucgacuucaacaagcaggccauccagcggcugaaggcgcccgcccagaugagcauccagcugaucaacaaggccgucaacgcccucaucaacgaccagcugaucaugaagaaccaccuccgcgacaucaugugcauccccuacugcaacuacuccaaguacugguaccugaaccacacgaccaccggcaagaccagccugcccaagugcuggcugguguccaacggcagcuaccucaacgagacgcacuucuccgacgacaucgagcagcaggccgacaacaugaucaccgagaugcugcagaaggaguacauggagcggcaggggaagacgccccugggccucguggaccuguucgucuucagcaccuccuucuaccugaucagcaucuuccugcaccucgugaagaucccgacccaccgccacaucguggggaagcccugccccaagccccaccggcugaaccacaugggcaucugcuccugcgggcuguacaagcagccgggcguccccgugaaguggaagcgcuga

SEQ ID NO: 4285 - RNA, 1476 nt, Artificial Sequence
  derived and/or modified protein sequence (opt1) from LASV(G3034-SLE-2013;Clade IV)__AIT17350__GPCstabilized
augggccagaucgugaccuucuuccaggaggucccccacgugaucgaggaggugaugaacaucguccugaucgcccucagcauccuggccgugcugaaggggcucuacaacguggcgaccugcggccugaucgggcuggucacguuccuccugcugugcggccgcuccugcaccaccacccucuacaaggggguguacgagcugcaggcccuggagcucaacauggagacgcugaacaugaccaugccgcugagcugcaccaagaacaacucccaccacuacaucauggugggcaacgagaccggccucgagcugacgcugaccaacaccagcaucaucgaccacaaguucugcaaccucuccgacgcccacaagaagaaccuguacgaccacgcccugaugagcaucaucuccaccuuccaccucagcauccccaacuucaaccaguacgaggccauguccugcgacuucaacgggggcaagaucagcguccaguacaaccugucccacagcuacgcgggggacgccgccaagcacugcggcacgguggccaacggggugcugcagaccuucaugcggauggcguggggcggcuccuacaucgcccucgacagcgggugcaacggcugggacugcgucaugaccuccuaccaguaccugaucauccagaacaccacgugggaggaccacugccaguucagccggcccucccccaucggguaccugggccuccugagccagcgcacccgggacaucuacaucucccgccggcgccggggcaccuucaccuggacgcugagcgacagcgaggggaaggacaccccgggcggguacugccugacccgcuggaugcucaucgaggccgagcugaagugcuucggcaacaccgccguggccaagugcaacgagaagcacgacgaggaguucugcgacaugcugcggcuguucgacuucaacaagcaggcgauccagcgccugaagacgcccgcccagauguccauccagcugaucaacaaggccgugaacgcccucaucaacgaccagcugaucaugaagaaccaccuccgggacaucaugugcauccccuacugcaacuacagcaaguacugguaccucaaccacaccgucaccggcaagaccucccugccccgcugcuggcuggugagcaacggcuccuaccucaacgagacgcacuucagcgacgacaucgagcagcaggccgacaacaugaucaccgagaugcugcagaaggaguacaucgagcggcaggggaagacgccccugggccucguggaccuguucgucuucuccaccagcuucuaccugaucuccaucuuccugcaccucgugaagaucccgacccaccgccacaucaucgggaagcccugccccaagccccaccggcugaaccacaugggcaucugcagcugcgggcuguacaagcagccgggcgugcccguccgcuggaagcgguga

SEQ ID NO: 4286 - RNA, 1476 nt, Artificial Sequence
  derived and/or modified protein sequence (opt1) from LASV(G3101-SLE-2013;Clade IV)__AIT17354__GPCstabilized
augggccagaucgugaccuucuuccaggaggucccccacgugaucgaggaggugaugaacaucguccugaucgcccucagcauccuggccgugcugaaggggcucuacaacuucgcgaccugcggccugguggggcuggucacguuccuccugcugugcggccgcuccugcaccaccagccucuacaaggggguguacgagcugcagacccuggagcucaacauggagacgcugaacaugaccaugccgcuguccugcaccaagaacaacagccaccacuacaucauggugggcaacgagaccggccucgagcugacgcugaccaacaucuccaucaucaaccacaaguucugcaaccucagcgacgcccacaagaagaaccuguacgaccacgcccugauguccaucaucagcaccuuccaccucuccauccccaacuucaaccaguacgaggccaugagcugcgacuucaacgggggcaagaucuccguccaguacaaccugagccacuccuacgccggggacgcggccaaccacugcggcaccguggccaacggggugcugcagacguucaugcggauggccuggggcggcagcuacaucgcgcucgacuccgggugcggcgggugggacugcaucaugaccagcuaccaguaccugaucauccagaacaccaccugggaggaccacugccaguucucccgccccagccccaucggcuaccugggccuccugucccagcggacgcgcgacaucuacaucagccggcgccgccgggggaccuucaccuggacccugagcgacuccgagggcaaggacacgcccgggggcuacugccugacccgguggaugcucaucgaggccgagcugaagugcuucgggaacaccgccgucgccaagugcaacgagaagcacgacgaggaguucugcgacaugcugcgccucuucgacuucaacaagcaggccauccagcggcugaaggcgcccgcccagaugagcauccagcugaucaacaaggccgugaacgcccucaucaacgaccagcugaucaugaagaaccaccuccgcgacaucaugugcauccccuacugcaacuacuccaaguacugguaccugaaccacaccacgaccggcaagaccagccugcccaagugcuggcugguguccaacgggagcuaccucaacgagacccacuucuccgacgacaucgagcagcaggccgacaacaugaucacggagaugcugcagaaggaguacauggagcggcagggcaagaccccgcuggggcucgucgaccuguucguguucagcaccuccuucuaccugaucagcaucuuccugcaccucgugaagaucccgacccaccgccacaucgucggcaagcccugcccccggccccaccgccugaaccacauggggaucugcuccugcggccuguacaagcagccgggcgugcccgugaaguggaagcgguga

SEQ ID NO: 4287 - RNA, 1476 nt, Artificial Sequence
  derived and/or modified protein sequence (opt1) from LASV(G3110-SLE-2013;Clade IV)__AIT17360__GPCstabilized
augggccagaucgugaccuucuuccaggaggucccccacgugaucgaggaggugaugaacaucguccugaucgcccucagcauccuggccgugcugaaggggcucuacaacuucgcgaccugcggccugguggggcuggucacguuccuccugcugugcggccgcuccugcaccaccagccucuacaaggggguguacgagcugcagacccuggagcucaacauggagacgcugaacaugaccaugccgcuguccugcaccaagaacaacagccaccacuacauccgggugggcaacgagaccggccucgagcugacgcugaccaacaccuccaucaucaaccaccgcuucugcaaccucagcgacgcccacaagaagaaccuguacgaccacgcccugauguccaucaucagcaccuuccaccucuccauccccaacuucaaccaguacgaggccaugagcugcgacuucaacgggggcaagaucuccguccaguacaaccugagccacuccuacgccggggacgcggccaaccacugcggcacgguggccaacggggugcugcagaccuucaugcggauggccuggggcggcagcuacaucgcgcucgacuccgggugcggcaagugggacugcaucaugaccagcuaccaguaccugaucauccagaacaccacgugggacgaccacugccaguucucccgccccagccccaucggguaccugggccuccugucccagcggacccgcgacaucuacaucagccggcgccgccggggcaccuucaccuggacgcugagcgacuccgaggggaaggacaccccgggcggguacugccugacccgguggaugcucaucgaggccgagcugaagugcuucggcaacaccgccgucgccaagugcaacgagaagcacgacgaggaguucugcgacaugcugcgccucuucgacuucaacaagcaggccauccggcgccugaaggcgcccgcccagaugagcauccagcugaucaacaaggccgugaacgcccucaucaacgaccagcugaucaugaagaaccaccuccgggacaucaugugcauccccuacugcaacuacuccaaguacugguaccugaaccacacgaccaccggcaagaccagccugccccgcugcuggcugguguccaacggcagcuaccucaacgagacgcacuucuccgacgacaucgagcagcaggccgacaacaugaucaccgagaugcugcagaaggaguacauggagcggcaggggaagacgccccugggccucgucgaccuguucguguucagcaccuccuucuaccugaucagcaucuuccugcaccucgugaagaucccgacccaccgccacaucgucgggaaguccugccccaagccccaccggcugaaccacaugggcaucugcagcugcggguucuacaagcagcccggcgugccggugaaguggaagcgcuga

SEQ ID NO: 4288 - RNA, 1476 nt, Artificial Sequence
  derived and/or modified protein sequence (opt1) from LASV(G3148-SLE-2013;Clade IV)__AIT17364__GPCstabilized
augggccagaucgugaccuucuuccaggaggucccccacgugaucgaggaggugaugaacaucguccugaucgcccucagcauccuggccgugcugaaggggcucuacaacuucgcgaccugcggccugguggggcuggucacguuccuccugcugugcggccgcuccugcaccaccagccucuacaaggggguguacgagcugcagacccuggagcucaacauggagacgcugaacaugaccaugccgcuguccugcaccaagaacaacagccaccacuacaucauggugggcaacgagaccggccucgagcugacgcugaccaacaccuccaucaucaaccacaaguucugcaaccucagcgacgcccacaagaagaaccuguacgaccacgcccugauguccaucaucagcaccuuccaccucuccauccccaacuucaaccaguacgaggccaugagcugcgacuucaacgggggcaagaucuccguccaguacaaccugagccacuccuacgccggggacgcggccaaccacugcggcacgguggccaacggggugcugcagaccuucaugcggauggccuggggcggcagcuacaucgcgcucgacuccgggugcgaccggugggacugcaucaugaccagcuaccaguaccugaucauccagaacaccacgugggaggaccacugccaguucucccgccccagccccaucggcuaccuggggcuccugucccagcggacccgcgacaucuacaucagccggcgccgccggggcaccuucaccuggacgcugagcgacuccgagggcaaggacacccccgggggcuacugccugacccgguggaugcucaucgaggccgagcugaagugcuucgggaacaccgccgucgccaagugcaacgagaagcacgacgaggaguucugcgacaugcugcgccucuucgacuucaacaagcaggccauccagcggcugaaggcgcccgcccagaugagcauccagcugaucaacaaggccgugaacgcccucaucaacgaccagcugaucaugaagaaccaccuccgcgacaucaugugcauccccuacugcaacuacuccaaguacugguaccugaaccacacgaccaccgggaagaccagccugcccaagugcuggcugguguccaacggcagcuaccucaacgagacgcacuucuccgacgacaucgagcagcaggccgacaacaugaucaccgagaugcugcagaaggaguacaucgagcggcagggcaagaccccgcuggggcucgucgaccuguucguguucagcaccuccuucuaccugaucagcaucuuccugcaccucgugaagaucccgacgcaccgccacaucgucggcaagcccugccccaagccccaccggcugaaccacauggggaucugcuccugcggccuguacaagcagccgggggugagcgugaaguggaagcgcuga

SEQ ID NO: 4289 - RNA, 1476 nt, Artificial Sequence
  derived and/or modified protein sequence (opt1) from LASV(G3151-SLE-2013;Clade IV)__AIT17368__GPCstabilized
augggccagaucgugaccuucuuccaggaggucccccacgugaucgaggaggugaugaacaucguccugaucgcccucagcauccuggccgugcugaaggggcucuacaacuucgcgaccugcggccugguggggcuggucacguuccuccugcugugcggccgcuccugcaccaccagccucuacaaggggguguacgagcugcagacccuggagcucaacauggagacgcugaacaugaccaugccgcuguccugcaccaagaacaacagccaccacuacaucauggugggcaacgagaccggccucgagcugacgcugaccaacaccuccaucaucaaccacaaguucugcaaccucagcgacgcccacaagaagaaccuguacgaccacgcccugauguccaucaucagcaccuuccaccucuccauccccaacuucaaccaguucgaggccaugagcugcgacuucaacgggggcaagaucuccguccaguacaaccugagccacuccuacgccggggacgcggccaaccacugcggcacgguggccaacggggugcugcagaccuucaugcggauggccuggggcggcagcuacaucgcgcucgacuccgggugcagcaagugggacugcaucaugaccuccuaccaguaccugaucauccagaacaccacgugggacgaccacugccaguucagccgccccucccccaucggcuaccuggggcuccugagccagcggacccgcgacaucuacaucagccggcgccgccggggcaccuucaccuggacgcuguccgacagcgagggcaaggacacccccgggggcuacugccugacccgguggaugcucaucgaggccgagcugaagugcuucgggaacaccgccgucgccaagugcaacgagaagcacgacgaggaguucugcgacaugcugcgccucuucgacuucaacaagcaggccauccagcggcugaaggcgcccgcccagauguccauccagcugaucaacaaggccgugaacgcccucaucaacgaccagcugaucaugaagaaccaccuccgcgacaucaugugcauccccuacugcaacuacagcaaguacugguaccugaaccacacgaccaccgggaagaccucccugcccaagugcuggcuggugagcaacggcuccuaccucaacgagacgcacuucagcgacgacaucgagcagcaggccgacaacaugaucaccgagaugcugcagaaggaguacauggagcggcagggcaagaccccgcuggggcucgucgaccuguucguguucuccaccagcuucuaccugaucuccaucuuccugcaccucgugaagaucccgacgcaccgccacaucgucggcaagagcugccccaagccccaccggcugaacuacauggggaucugcuccugcggcuucuacaagcagcccggggugccggugaaguggaagcgcuga

SEQ ID NO: 4290 - RNA, 1476 nt, Artificial Sequence
  derived and/or modified protein sequence (opt1) from LASV(G3157-SLE-2013;Clade IV)__AIT17370__GPCstabilized
augggccagaucgugaccuucuuccaggaggucccccacgugaucgaggaggugaugaacaucguccugaucgcccucagcauccuggccgugcugaaggggcucuacaacuucgcgaccugcggccugguggggcuggucacguuccuccugcugugcggccgcuccugcaccaccagccucuacaaggggguguacgagcugcagacccuggagcucaacauggagacgcugaacaugaccaugccgcuguccugcaccaagaacaacagccaccacuacaucauggugggcaacgagaccggccucgagcugacgcugaccaacaccuccaucaucaaccacaaguucugcaaccucagcgacgcccacaagaagaaccuguacgaccacgcccugauguccaucaucagcaccuuccaccucuccauccccaacuucaaccaguacgaggccaugagcugcgacuucaacgggggcaagaucuccguccaguacaaccugagccacuccuacgccggggacgcggccaaccacugcggcacgguggccaacggggugcugcagaccuucaugcggauggccuggggcggcagcuacaucgcgcucgacuccgggugcgaccggugggacugcaucaugaccagcuaccaguaccugaucauccagaacaccacgugggaggaccacugccaguucucccgccccagccccaucggcuaccuggggcuccugucccagcggacccgcgacaucuacaucagccggcgccgccggggcaccuucaccuggacgcugagcgacuccgagggcaaggacacccccgggggcuacugccugacccgguggaugcucaucgaggccgagcugaagugcuucgggaacaccgccgucgccaagugcaacgagaagcacgacgaggaguucugcgacaugcugcgccucuucgacuucaacaagcaggccauccagcggcugaaggcgcccgcccagaugagcauccagcugaucaacaaggccgugaacgcccucaucaacgaccagcugaucaugaagaaccaccuccgcgacaucaugugcauccccuacugcaacuacuccaaguacugguaccugaaccacacgaccaccgggaagaccagccugcccaagugcuggcugguguccaacggcagcuaccucaacgagacgcacuucuccgacgacaucgagcagcaggccgacaacaugaucaccgagaugcugcagaaggaguacauggagcggcagggcaagaccccgcuggggcucgucgaccuguucguguucagcaccuccuucuaccugaucagcaucuuccugcaccucgugaagaucccgacgcaccgccacaucgucggcaagcccugccccaagccccaccggcugaaccacauggggaucugcuccugcggccuguacaagcagccgggggugagcgugaaguggaagcgcuga

SEQ ID NO: 4291 - RNA, 1476 nt, Artificial Sequence
  derived and/or modified protein sequence (opt1) from LASV(G3206-SLE-2013;Clade IV)__AIT17378__GPCstabilized
augggccagaucgugaccuucuuccaggaggucccccacgugaucgaggaggugaugaacaucguccugaucgcccucagcauccuggccgugcugaaggggcucuacaaccuggcgaccugcggccugguggggcucgucacguuccugcugcucugcggccgcuccugcaccaccagccuguacaaggggguguacgagcugcagacccucgagcugaacauggagacgcugaacaugaccaugccgcucuccugcaccaagaacaacagccaccacuacaucauggugggcaacgagaccggccuggagcugacgcucaccaacaccuccaucaucaaccacaaguucugcaaccugagcgacgcccacaagaagaaccuguacgaccacacccucauguccaucaucagcacguuccaccuguccauccccaacuucaaccaguacgaggccaugagcugcgacuucaacgggggcaagaucuccguccaguacaaccugagccacuccuacgccguggacgccgcgaaccacugcgggaccguggccaacggcguccuccagaccuucaugcggauggccuggggcgggagcuacaucgcccuggacuccggcugcagcgggugggacugcaucaugaccuccuaccaguaccuggugauccagaacacgaccugggaggaccacugccaguucagccggcccucccccaucggcuaccucgggcugcugagccagcgcacccgggacaucuacaucagccgccggcgccggggcaccuucacguggacccuguccgacagcgagggcaagaacacccccgggggcuacugccucacccgcuggaugcugaucgaggcggagcugaagugcuucgggaacacggccguggccaagugcaacgagaagcacgacgaggaguucugcgacaugcuccggcuguucgacuucaacaagcaggccauccagcgccugaaggcccccgcgcagauguccauccagcucaucaacaaggccgucaacgcccugaucaacgaccagcugaucaugaagaaccaccuccgggacaucaugugcauccccuacugcaacuacagcaaguacugguaccugaaccacaccaccaccgggcgcacgucccugccccggugcuggcucgugagcaacggcuccuaccugaacgagacccacuucagcgacgacaucgagcagcaggccgacaacaugaucaccgagaugcugcagaaggaguacauggagcgccagggcaagaccccgcucgggcugguggaccuguucgucuucuccacgagcuucuaccugaucuccaucuuccuccaccuggugaagaucccgacccaccggcacaucgugggcaagagcugccccaagccccaccgccugaaccacauggggaucugcuccugcggcuucuacaagcagcccggggucccggugaaguggaagcgguga

SEQ ID NO: 4292 - RNA, 1476 nt, Artificial Sequence
  derived and/or modified protein sequence (opt1) from LASV(G3234-SLE-2013;Clade IV)__AIT17388__GPCstabilized
augggccagaucgugaccuucuuccaggaggucccccacgugaucgaggaggugaugaacaucguccugaucgcccucagcauccuggccgugcugaaggggcucuacaacguggcgaccugcggccugaucgggcuggucacguuccuccugcugugcggccgcuccugcaccaccacccucuacaaggggguguacgagcugcaggcccuggagcucaacauggagacgcugaacaugaccaugccgcugagcugcaccaagaacaacucccaccacuacauccgggugggcaacgagaccggccucgagcugacgcugaccaacaccagcaucaucaaccacaaguucugcaaccucuccgacgcccacaagaagaaccuguacgaccacgcccugaugagcaucaucuccaccuuccaccucagcauccccaacuucaaccaguacgaggccauguccugcgacuucaacgggggcaucaucagcguccaguacaaccugucccacagcuacgcgggggacgccgccaaccacugcggcacgguggccaacggggugcugcagaccuucaugcgcauggcguggggcggcuccuacaucgcccucgacagcgggugcaacggcugggacugcaucaugaccuccuaccaguaccugaucauccagaacaccacgugggacgaccacugccaguucagccgccccucccccaucggguaccugggccuccugagccagcggacccgcgacaucuacaucucccggcgccgccggggcaccuucaccuggacgcugagcgacagcgaggggaaggacaccccgggcggguacugccugacccgguggaugcucaucgaggccgagcugaagugcuucggcaacaccgccgucgccaagugcaacgagaagcacgacgaggaguucugcgacaugcugcgccucuucgacuucaacaagcaggcgauccagcggcugaagacgcccgcccagaugaacauccagcugaucaacaaggccgugaacgcccucaucaacgaccagcugaucaugaagaaccaccuccgcgacaucaugugcauccccuacugcaacuacuccaaguacugguaccugaacaacaccgccaccggcaagaccagccugccccggugcuggcugguguccaacggcagcuaccucaacgagacgcacuucuccgacgacaucgagcagcaggcggacaacaugaucaccgagaugcugcagaaggaguacauggagcgccaggggaagacgccccugggccucgucgaccuguucguguucagcaccuccuucuaccugaucagcaucuuccugcaccucgugaagaucccgacccaccggcacaucgucgggaagcccugccccaagccccaccgccugaaccacaucggcaucugcuccugcgggcuguacaagcagccgggcgugcccgugaaguggaagcgguga

SEQ ID NO: 4293 - RNA, 1476 nt, Artificial Sequence
  derived and/or modified protein sequence (opt1) from LASV(G502-SLE-2009;Clade IV)__AIT17126__GPCstabilized
augggccagaucgugaccuucuuccaggaggucccccacgugaucgaggaggugaugaacaucguccugaucgcccucagcauccuggccgugcugaaggggcucuacaacuucgcgaccugcggccugguggggcugcucacguuccugcugcucugcggccgcuccugcaccaccgggcuguacaagggcgucuacgagcugcagacccucgagcugaacauggagacgcugaacaugaccaugccgcucagcugcaccaagaacaacucccaccacuacaucauggugggcaacgagaccgggcuggagcugacgcucaccaacaccagcaucaucaaccacaaguucugcaaccuguccgacgcccacaagaagaaccuguacgaccacgcccucaugagcaucaucuccaccuuccaccugagcauccccaacuucaaccaguacgaggccauguccugcgacuucaacggcgggaagaucagcgugcaguacaaccugucccacagcuacgccggcgacgcggccgaccacugcgggacggucgccaacggcgugcuccagaccuucaugcggauggccuggggcggguccuacaucgcgcuggacagcggcugcgggcggugggacugcaucaugaccuccuaccaguaccugaucauccagaacaccacgugggaggaccacugccaguucagccgccccucccccaucggcuaccucggccugcugagccagcggacccgcgacaucuacaucucccggcgccgccgggggaccuucaccuggacgcugagcgacagcgagggcaaggacacccccgggggcuacugccucacccgguggaugcugaucgaggccgagcugaagugcuucgggaacaccgccguggccaagugcaacgagaagcacgacgaggaguucugcgacaugcuccgccuguucgacuucaacaagcaggccauccagcggcugaaggcgcccgcccagauguccauccagcucaucaacaaggccgucaacgcccugaucaacgaccagcuggugaugaagaaccaccuccgcgacaucaugugcauccccuacugcaacuacagccgguacugguaccugaaccacacgaccaccggccgcaccucccugcccaagugcuggcucgugagcaacggguccuaccugaacgagacgcacuucagcgacgacaucgagcagcaggccgacaacaugaucaccgagaugcugcagaaggaguacauggagcggcagggcaagaccccgcucgggcuggucgaccuguucguguucuccaccagcuucuaccugaucuccaucuuccuccaccuggugaagaucccgacgcaccgccacaucgucggcaagagcugccccaagccccaccggcugaaccacauggggaucugcuccugcggccucuacaagcagcccggcgugccggugaaguggaagcgcuga

SEQ ID NO: 4294 - RNA, 1476 nt, Artificial Sequence
  derived and/or modified protein sequence (opt1) from LASV(G503-SLE-2009;Clade IV)__AIT17130__GPCstabilized
augggccagaucgugaccuucuuccaggaggucccccacgugaucgaggaggugaugaacaucguccugaucgcccucagcauccuggccgugcugaaggggcucuacaacuucgcgaccugcggcuucguggggcuggucacguuccugcuccugugcggccgcuccugcaccaccagccuguacaaggggguguacgagcuccagacccuggagcugaacauggagacgcucaacaugaccaugccgcuguccugcaccaagaacaacagccaccacuacauccgggugggcaacgacaccggccuggagcucacgcugaccaacaccuccaucaucaaccacaaguucugcaaccugagcgacgcccacaagaagaaccucuacgaccacgcccugauguccaucaucagcaccuuccaccuguccauccccaacuucaaccaguacgaggccaugagcugcgacuucaacgggggcaagaucuccguccaguacaaccucagccacuccuacgccguggacgcggccagccacugcgggacgaucgccaacggcgugcugcagaccuucaugcgcauggccuggggcggguccuacaucgcgcuggacagcggcugcgaccgcugggacugcaucaugaccuccuaccaguaccucaucauccagaacaccacgugggaggaccacugccaguucagccggcccucccccaucggguaccugggccugcucagccagcgcacccgggacaucuacaucagccgccggcgccgggggaccuucaccuggacgcucuccgacagcgagggcaaggacaccccgggcggguacugccugacccgcuggaugcugaucgaggccgagcucaagugcuucggcaacaccgccgucgccaagugcaacgagaagcacgacgaggaguucugcgacaugcugcggcuguucgacuucaacaagcaggccauccagcgccucaaggcgcccgcccagauguccauccagcugaucaacaaggccgugaacgcccugaucaacgaccagcucaucaugaagaaccaccuccgggacaucaugugcauccccuacugcaacuacagcaaguacugguaccugaaccacacgaccaccggcaagaccucccugcccaagugcuggcuggugagcaacggguccuaccugaacgagacgcacuucagcgacgacaucgagcagcaggccgacaacaugaucaccgagaugcuccagaaggaguacauggagcgccagggcaagacgccccugggccuggucgaccucuucguguucuccaccagcuucuaccugaucuccaucuuccugcaccuggugaagaucccgacccaccggcacaucgucggcaagagcugccccaagccccaccgccucaaccacauggggaucugcuccugcgggcuguacaagcagcccggcgugccggugaaguggaagcgguga

SEQ ID NO: 4295 - RNA, 1476 nt, Artificial Sequence
  derived and/or modified protein sequence (opt1) from LASV(G610-SLE-2009;Clade IV)__AIT17134__GPCstabilized
augggccagaucgugaccuucuuccaggaggucccccacgugaucgaggaggugaugaacaucguccugaucgcccucagcauccuggccgugcugaaggggcucuacaacuucgcgaccugcggccugguggggcuggucacguuccuccugcugugcggccgcuccugcaccaccagccucuacaaggggguguacgagcugcagacccuggagcucaacauggagacgcugaacaugaccaugccgcuguccugcaccaagaacaacagccaccacuacaucauggugggcaacgagaccggccucgagcugacgcugaccaacaccuccaucaucaaccacaaguucugcaaccucagcgacgcccacaagaagaaccuguacgaccacgcccugauguccaucaucagcaccuuccaccucuccauccccaacuucaaccaguacgaggccaugagcugcgacuucaacgggggcaagaucuccguccaguacaaccugagccacuccuacgccggggacgcggccaaccacugcggcacgguggccaacggggugcugcagaccuucaugcggauggccuggggcggcagcuacaucgcgcucgacuccgggugcggccggugggacugcaucaugaccagcuaccaguaccugaucauccagaacaccacgugggaggaccacugccaguucucccgccccagccccaucggguaccugggccuccugucccagcggacccgcgacaucuacaucagccggcgccgccggggcaccuucaccuggacgcugagcgacuccgaggggaaggacaccccgggcggguacugccugacccgguggaugcucaucgaggccgagcugaagugcuucggcaacaccgccgucgccaagugcaacgagaagcacgacgaggaguucugcgacaugcugcgccucuucgacuucaacaagcaggccauccagcggcugaaggcgcccgcccagaugagcauccagcugaucaacaaggccgugaacgcccucaucaacgaccagcugaucaugaagaaccaccuccgcgacaucaugugcauccccuacugcaacuacuccaaguacugguaccugaaccacacgaccaccggcaagaccagccugcccaagugcuggcugguguccaacggcagcuaccucaacgagacgcacuucuccgacgacaucgagcagcaggccgacaacaugaucaccgagaugcugcagaaggaguacauggagcggcaggggaagacgccccugggccucgucgaccuguucguguucagcaccuccuucuaccugaucagcaucuuccugcaccucgugaagaucccgacccaccgccacaucgucgggaaguccugccccaagccccaccggcugaaccacaugggcaucugcagcugcgggcuguacaagcagcccggcgugccggugaaguggaagcgcuga

SEQ ID NO: 4296 - RNA, 1476 nt, Artificial Sequence
  derived and/or modified protein sequence (opt1) from LASV(G636-SLE-2009;Clade IV)__AIT17138__GPCstabilized
augggccagaucgugaccuucuuccaggaggucccccacgugaucgaggaggugaugaacaucguccugaucgcccucagcauccuggccgugcugaaggggcucuacaaccuggcgaccugcggccugguggggcucgucacguuccugcugcucugcggccgcuccugcaccaccagccuguacaaggggguguacgagcugcagacccucgagcugaacauggagacgcugaacaugaccaugccgcucuccugcaccaagaacaacagccaccacuacaucauggugggcaacgagaccggccuggagcugacgcucaccaacaccucccugaucaaccacaaguucugcaaccugagcgacgcccacaagaagaaccucuacgaccacgcccugauguccaucaucagcaccuuccaccuguccauccccaacuucaaccaguacgaggccaugagcugcgacuucaacgggggcaagaucuccguccaguacaaccucagccacuccuacgccguggacgcggccagccacugcgggacgguggccaacggcguccugcagaccuucaugcggauggccuggggcggguccuacaucgcgcuggacagcggcugcgggggcugggacugcaucaugaccuccuaccaguaccucaucauccagaacaccacgugggaggaccacugccaguucagccggcccucccccaucggguaccugggccugcucagccagcgcacccgggacaucuacaucagccgccggcgccggggcaccuucaccuggacgcucuccgacagcgaggggaaggacaccccgggcggguacugccugacccgcuggaugcugaucgaggccgagcucaagugcuucggcaacaccgccguggccaagugcaacgagaagcacgacgaggaguucugcgacaugcugcggcuguucgacuucaacaagcaggccauccagcgccucaaggcgcccgcccagauguccauccagcugaucaacaaggccgugaacgcccugaucaacgaccagcucaucaugaagaaccaccuccgggacaucaugugcauccccuacugcaacuacagcaaguacugguaccugaaccacacgaccaccggccgcaccucccugccccggugcuggcuggucagcaacggcuccuaccugaacgagacgcacuucagcgacgacaucgagcagcaggccgacaacaugaucaccgagaugcuccagaaggaguacauggagcgccaggggaagacgccccugggccugguggaccuguucguguucuccaccagcuucuaccucaucuccaucuuccugcaccuggucaagaucccgacccaccggcacaucgugggcaagagcugccccaagccccaccgccucaaccacauggggaucugcuccugcgggcuguacaagcagcccggcgugccggucaaguggaagcgguga

SEQ ID NO: 4297 - RNA, 1476 nt, Artificial Sequence
  derived and/or modified protein sequence (opt1) from LASV(G692-SLE-2009;Clade IV)__AIT17146__GPCstabilized
augggccagaucgugaccuucuuccaggaggucccccacgugaucgaggaggugaugaacaucguccugaucgcccucagcauccuggccgugcugaaggggcucuacaaccuggcgaccugcggccugguggggcucgucacguuccugcugcucugcggccgcuccugcaccaccagccuguacaaggggguguacgagcugcagacccucgagcugaacauggagacgcugaacaugaccaugccgcucuccugcaccaagaacaacagccaccacuacaucauggugggcaacgagaccggccuggagcugacgcucaccaacaccuccaucaucaaccacaaguucugcaaccugagcgacgcccacaagaagaaccuguacgaccacgcccucauguccaucaucagcaccuuccaccuguccauccccaacuucaaccaguacgaggccaugagcugcgacuucaacgggggcaagaucuccguccaguacaaccugagccacuccuacgccggggacgcggccaaccacugcggcacgguggccaacggggugcuccagaccuucaugcggauggccuggggcggcagcuacaucgcgcuggacuccgggugcggccggugggacugcaucaugaccagcuaccaguaccugaucauccagaacaccacgugggaggaccacugcuccuucagccgccccucccccaucggguaccucggccugcugagccagcggacccgcgacaucuacaucagccggcgccgccggggcaccuucaccuggacgcuguccgacagcgaggggaaggacaccccgggcggguacugccucacccgguggaugcugaucgaggccgagcugaagugcuucggcaacaccgccgucgccaagugcaacgagaagcacgacgaggaguucugcgacaugcuccgccuguucgacuucaacaagcaggccauccagcggcugaaggcgcccgcccagauguccauccagcucaucaacaaggccgugaacgcccugaucaacgaccagcugaucaugaagaaccaccuccgcgacaucaugugcauccccuacugcaacuacagcaaguacugguaccugaaccacacgaccaccggcaagaccucccugcccaagugcuggcucgugagcaacggcuccuaccugaacgagacgcacuucagcgacgacaucgagcagcaggccgacaacaugaucaccgagaugcugcagaaggaguacauggagcggcaggggaagacgccccucggccuggucgaccuguucguguucuccaccagcuucuaccugaucuccaucuuccuccaccuggugaagaucccgacccaccgccacaucgucggcaagagcugccccaagccccaccggcugaaccacauggggaucugcuccugcggguucuacaagcagcccggcgugccggugaaguggaagcgcuga

SEQ ID NO: 4298 - RNA, 1476 nt, Artificial Sequence
  derived and/or modified protein sequence (opt1) from LASV(G733-SLE-2010;Clade IV)__AIT17154__GPCstabilized
augggccagaucgugaccuucuuccaggaggucccccacgugaucgaggaggugaugaacaucguccugaucgcccucagcauccuggccgugcugaaggggcucuacaacuucgcgaccugcggcaucguggggcuggucuccuuccugcuccugugcggccgcagcugcacgaccucccuguacaaggggguguacgagcuccagacccuggagcugaacauggagacccucaacaugacgaugccgcugagcugcaccaagaacaacucccaccacuacaucauggugggcaacgagaccggccuggagcucacccugacgaacaccagcaucaucaaccacaaguucugcaaccuguccgacgcccacaagaagaaccucuacgaccacgcccugaugagcaucaucuccaccuuccaccugagcauccccaacuucaaccaguacgaggccauguccugcgacuucaacgggggcaagaucagcguccaguacaaccucucccacagcuacgccggggacgcggccaaccacugcggcaccaucgccaacggggugcugcagacguucaugcggauggccuggggcggcuccuacaucgcgcuggacagcgggugcgaccggugggacugcaucaugaccuccuaccaguaccucaucauccagaacaccaccugggaggaccacugccaguucagccgccccucccccaucggcuaccuggggcugcucagccagcggacgcgcgacaucuacaucagccggcgccgccggggcaccuucaccuggacccucuccgacagcgagggcaaggacacgcccgggggcuacugccugacccgguggaugcugaucgaggccgagcucaagugcuucgggaacaccgccguggccaagugcaacgagaagcacgacgaggaguucugcgacaugcugcgccuguucgacuucaacaagcaggccauccagcggcucaaggcgcccgcccagauguccauccagcugaucaacaaggccgucaacgcccugaucaacgaccagcucaucaugaagaaccaccuccgcgacaucaugugcauccccuacugcaacuacagcaaguacugguaccugaaccacaccacgaccgggaagaccucccugcccaagugcuggcuggugagcaacggcuccuaccugaacgagacccacuucagcgacgacaucgagcagcaggccgacaacaugaucacggagaugcuccagaaggaguacauggagcggcagggcaagaccccgcuggggcugguggaccucuucgucuucuccaccagcuucuaccugaucuccaucuuccugcaccuggugaagaucccgacccaccgccacguggucggcaagagcugccccaagccccaccggcucaaccacauggggaucugcuccugcggccuguacgggcagcccggcgugccggugaaguggaagcgcuga

SEQ ID NO: 4299 - RNA, 1476 nt, Artificial Sequence
  derived and/or modified protein sequence (opt1) from LASV(G771-SLE-2010;Clade IV)__AIT17158__GPCstabilized
augggccagaucgugaccuucuuccaggaggucccccacgugaucgaggaggugaugaacaucguccugaucgcccucagcauccuggccgugcugaaggggcucuacaacuucgcgaccugcggccugguggggcuggucacguuccuccugcugugcggccgcuccugcaccaccagccucuacaaggggguguacgagcugcagacccuggagcucaacauggagacgcugaacaugaccaugccgcuguccugcaccaagaacaacagccaccacuacaucauggugggcaacgagaccggccucgagcugacgcugaccaacaccuccaucaucaaccacaaguucugcaaccucagcgacgcccacaagaagaaccuguacgaccacgcccugauguccaucaucagcaccuuccaccucuccauccccaacuucaaccaguacgaggccaugagcugcgacuucaacgggggcaagaucuccguccaguacaaccugagccacuccuacgccggggacgcggccaaccacugcggcacgguggccaacggggugcugcagaccuucaugcggauggccuggggcggcagcuacaucgcgcucgacuccgggugcgaccggugggacugcaucaugaccagcuaccaguaccugaucauccagaacaccacgugggaggaccacugccaguucucccgccccagccccaucggcuaccuggggcuccugucccagcggacccgcgacaucuacaucagccggcgccgccggggcaccuucaccuggacgcugagcgacuccgagggcaaggacacccccgggggcuacugccugacccgguggaugcucaucgaggccgagcugaagugcuucgggaacaccgccgucgccaagugcaacgagaagcacgacgaggaguucugcgacaugcugcgccucuucgacuucaacaagcaggccauccagcggcugaaggcgcccgcccagaugagcauccagcugaucaacaaggccgugaacgcccucaucaacgaccagcugaucaugaagaaccaccuccgcgacaucaugugcauccccuacugcaacuacuccaaguacugguaccugaaccacacgaccaccgggaagaccagccugcccaagugcuggcugguguccaacggcagcuaccucaacgagacgcacuucuccgacgacaucgagcagcaggccgacaacaugaucaccgagaugcugcagaaggaguacauggagcggcagggcaagaccccgcuggggcucgucgaccuguucguguucagcaccuccuucuaccugaucagcaucuuccugcaccucgugaagaucccgacgcaccgccacaucgucggcaaguccugccccaagccccaccggcugaaccacauggggaucugcagcugcggccuguacaagcagcccggggugccggugaaguggaagcgcuga

SEQ ID NO: 4300 - RNA, 1476 nt, Artificial Sequence
  derived and/or modified protein sequence (opt1) from LASV(G808-SLE-2010;Clade IV)__AIT17164__GPCstabilized
augggccagaucgugaccuucuuccaggaggucccccacgugaucgaggaggugaugaacaucguccugaucgcccucagcauccuggccgugcugaaggggcucuacaacuucgcgaccugcggccugguggggcuggucacguuccuccugcugugcggccgcuccugcaccagcucccucuacaaggggguguacgagcugcagacccuggagcucaacauggagacccugaacaugacgaugccgcugagcugcaccaagaacaacucccaccacuacauccgggugggcaacgagaccggccucgagcugacccugacgaacaccagcaucaucgaccacaaguucugcaaccucuccgacgcccacaagaagaaccuguacgaccacgcccugaugagcaucaucuccaccuuccaccucagcauccccaacuucaaccaguacgaggccauguccugcgacuucaacgggggcaagaucagcguccaguacaaccugucccacagcuacgccggggacgcggccaagcacugcggcaccguggccaacggggugcugcagacguucaugcgcauggccuggggcggcuccuacaucgcgcucgacagcgggugcggcaacugggacugcaucaugaccuccuaccaguaccugaucauccagaacaccaccugggaggaccacugccaguucagccggcccucccccaucggguaccugggccuccugagccagcgcacgcgggacaucuacaucagccgccggcgccggggcaccuucaccuggacccuguccgacagcgaggggaacgacgccccgggcggguacugccugacgcgcuggaugcucauccaggccgagcugaagugcuucggcaacaccgccgucgccaagugcaacgagaagcacgacgaggaguucugcgacaugcugcggcuguucgacuucaacaagcaggcgauccagcgccugaaggcccccgcccagauguccauccagcugaucaacaaggccgugaacgcccucaucaacgaccagcugaucaugaagaaccaccuccgggacaucaugugcauccccuacugcaacuacagcaaguacugguaccucaaccacaccaccacgggccgcaccucccugccccggugcuggcuggugagcaacggcuccuaccucaacgagacccacuucagcgacgacaucgagcagcaggcggacaacaugaucaccgagaugcugcagaaggaguacauggagcgccaggggaagacgccccugggccucgucgaccuguucguguucuccaccagcuucuaccugaucuccaucuuccugcaccucgugaagaucccgacccaccggcacaucgucggcaagagcugccccaagccccaccgccugaaccacauggggaucugcuccugcgggcuguucaagcagcccggcgugccggugaaguggaagcgguga

SEQ ID NO: 4301 - RNA, 1476 nt, Artificial Sequence
  derived and/or modified protein sequence (opt1) from LASV(Guinea Faranah;Clade IV)__AMZ00381__GPCstabilized
augggccagaucgugaccuucuuccaggaggucccccacgugaucgaggaggugaugaacaucguccugaucgcccucagcauccuggccgugcugaaggggcucuacaacguggcgaccugcggccugaucgggcugaucgccuuccuccugcugugcggccgcuccugcacgagcacccucuacaagggggucuacgagcugcaggcccuggagcucaacauggagacccugaacaugaccaugccgcuguccugcacgaagaacaacagccaccacuacaucauggugggcaacgagaccggccucgagcugacccugaccaacacguccaucaucaaccacaaguucugcaaccucagcgacgcccacaagaagaaccuguacaaccacgcccugauguccaucaucagcaccuuccaccucuccauccccaacuucaaccaguacgaggcgaugagcugcgacuucaacgggggcaagaucuccgugcaguacaaccugagccacuccuacgccgucgacgccgccaaccacugcgggaccguggcgaacggcauccugcagaccuucaugcggauggccuggggcgggagcuacaucgcccucgacuccggcugcgggggcugggacugcaucaugagcuccuaccaguaccuggugauccagaacacgaccugggaggaccacugccaguucagccgccccucccccaucggguaccugggccuccugagccagcggacccgcgacaucuacaucagccggcgccgccggggcaccuucacguggacccuguccgacagcgaggggaaggacaccccgggcggguacugccugacccgguggaugcucaucgaggccgagcugaagugcuucggcaacacggccgucgcgaagugcaacgagaagcacgacgaggaguucugcgacaugcugcgccucuucgacuucaacaagcaggccauccagcggcugaaggcccccgcccagauguccauccagcugaucaacaaggccgugaacgcgcucaucaacgaccagcugaucaugaagaaccaccuccgcgacaucaugugcauccccuacugcaacuacagcaaguacugguaccugaaccacaccaucaccggccggaccucccugcccaagugcuggcuggugagcaacggcuccuaccucaacgagacgcacuucagcgacgacaucgagcagcaggccgacaacaugaucaccgagaugcugcagaaggaguaccuggagcgccaggggaagacgccccucggccuggucgaccuguucguguucuccaccagcuucuaccugaucuccaucuuccuccaccugaucaagaucccgacccaccggcacaucgugggcaagagcugccccaagccccaccgccugaaccacaugggggucugcuccugcgggcucuacaagcagcccggcgugccggugcgguggaagcgcuga

SEQ ID NO: 4302 - RNA, 1476 nt, Artificial Sequence
  derived and/or modified protein sequence (opt1) from LASV(GUINEA Z-185a;Clade IV)__AMZ00377__GPCstabilized
augggccagaucgugaccuucuuccaggaggucccccacgugaucgaggaggugaugaacaucguccugaucgcccucagcauccuggccgugcugaaggggcucuacaacguggcgaccugcggccugaucgggcuggucacguuccucuuccugugcggccgcuccugcagcaccucccuguacaaggggguguacgagcuccagacccuggagcugaacauggagacccucaacaugacgaugccgcugagcugcaccaagaacaacucccaccacuacaucauggugggcaacgagaccggccuggagcucacccugacgaacaccagcaucaucaaccacaaguucugcaaccuguccgacgcccacaagaagaaccucuacgaccacacccugaugagcaucaucuccaccuuccaccugagcauccccaacuucaaccaguacgaggccauguccugcgacuucaacgggggcaagaucagcguccaguacaaccucucccacagcuacgccguggacgccgcgaaccacugcgggacgguggccaacggcguccugcagaccuucaugcggauggccuggggcggguccuacaucgcccuggacagcggcugcgggaacugggacugcaucaugaccuccuaccaguaccucgugauccagaacaccacgugggaggaccacugccaguucagccggcccucccccaucggcuaccuggggcugcucagccagcgcacccgggacaucuacaucagccgccggcgccggggcaccuucaccuggacgcucuccgacagcgagggcaaggacacccccgggggcuacugccugacccgcuggaugcugaucgaggcggagcucaagugcuucgggaacaccgccguggccaagugcaacgagaagcacgacgaggaguucugcgacaugcugcggcuguucgacuucaacaagcaggccauccagcgccucaaggcccccgcgcagauguccauccagcugaucaacaaggccgucaacgcccugaucaacgaccagcucaucaugaagaaccaccuccgggacaucaugugcauccccuacugcaacuacagcaaguacugguaccugaaccacacggugaccgggaagaccucccugcccaagugcuggcuggugagcaacggcuccuaccugaacgagacccacuucagcgacgacaucgagcagcaggccgacaaccucaucacggagaugcugcagaaggaguacauggagcgccagggcaagaccccgcuggggcucgucgaccuguucguguucuccaccagcuucuaccugaucuccaucuuccugcaccucgugaagaucccgacccaccggcacaucgucggcaagcccugccccaagccccaccgccugaaccacauggggaucugcagcugcggcguguacaagcagccgggggugcccguccgguggaagcgcuga

SEQ ID NO: 4303 - RNA, 1476 nt, Artificial Sequence
  derived and/or modified protein sequence (opt1) from MOPV/LASV reassortant(IGS-1;Clade IV)__AFY05576__GPCstabilized
augggccagaucgugaccuucuuccaggaggucccccacgugaucgaggaggugaugaacaucguccugaucgcccucagcgugcuggccgugcugaaggggcucuacaacuucgcgaccugcggccuggucgggcuggugacguuccuccugcugugcggccgcuccugcaccaccagccucuacaaggggguguacgagcugcagacccuggagcucaacauggagacgcugaacaugaccaugccgcuguccugcaccaagaacaacagccaccacuacaucauggucggcaacgagaccggccucgagcugacgcugaccaacaccuccaucaucaaccacaaguucugcaaccucagcgacgcccacaagaagaaccuguacgaccacgcccugauguccaucaucagcaccuuccaccucuccauccccaacuucaaccaguacgaggccaugagcugcgacuucaacgggggcaagaucuccgugcaguacaaccugagccacuccuacgccggggacgcggccaaccacugcggcacgguggccaacgggguccugcagaccuucaugcggauggccuggggcggcagcuacaucgcgcucgacuccgggugcggcaacugggacugcaucaugaccagcuaccaguaccugaucauccagaacaccacgugggaggaccacugccaguucucccggcccagccccaucggguaccugggccuccugucccagcgcacccgggacaucuacaucagccgccggcgccggggcaccuucaccuggacgcugagcgacuccgagggggaggacaccccgggcggguacugccugacccgcuggaugcucaucgaggccgagcugaagugcuucggcaacaccgccguggccaagugcaacgagaagcacgacgaggaguucugcgacaugcugcggcuguucgacuucaacaagcaggccauccagcgccugaaggcgcccgcccagaugagcauccagcugaucaacaaggccgugaacgcccucaucaacgaccagcugaucaugaagaaccaccuccgggacaucaugugcauccccuacugcaacuacuccaaguacugguaccucaaccacacgaccaccggccgcaccagccugcccaagugcuggcuggucuccaacggcagcuaccucaacgagacgcacuucuccgacgacaucgagcagcaggccgacaacaugaucaccgagaugcugcagaaggaguacauggagcggcaggggaagacgccccugggccucguggaccuguucguguucagcaccuccuucuaccugaucagcaucuuccugcaccucgucaagaucccgacccaccgccacaucguggggaaguccugccccaagccccaccggcugaaccacaugggcaucugcagcugcgggcuguacaagcagcccggcgugccggucaaguggaagcgcuga

SEQ ID NO: 4304 - RNA, 1476 nt, Artificial Sequence
  derived and/or modified protein sequence (opt1) from MOPV/LASV reassortant(IGS-11;Clade IV)__AFY05588__GPCstabilized
augggccagaucgugaccuucuuccaggaggucccccacgugaucgaggaggugaugaacaucguccugaucgcccucagcgugcuggccgugcugaaggggcucuacaacuucgcgaccugcggccuggucgggcuggugacguuccuccugcugugcggccgcuccugcaccaccagccucuacaaggggguguacgagcugcagacccuggagcucaacauggagacgcugaacaugaccaugccgcuguccugcaccaagaacaacagccaccacuacaucauggucggcaacgagaccggccucgagcugacgcugaccaacaccuccaucaucaaccacaaguucugcaaccucagcgacgcccacaagaagaaccuguacgaccacgcccugauguccaucaucagcaccuuccaccucuccauccccaacuucaaccaguacgaggccaugagcugcgacuucaacgggggcaagaucuccgugcaguacaaccugagccacuccuacgccggggacgcggccaaccacugcggcacgguggccaacgggguccugcagaccuucaugcggauggccuggggcggcagcuacaucgcgcucgacuccgggugcggcaacugggacugcaucaugaccagcuaccaguaccugaucauccagaacaccacgugggaggaccacugccaguucucccggcccagccccaucggguaccugggccuccugucccagcgcacccgggaccuguacaucagccgccggcgccggggcaccuucaccuggacgcugagcgacuccgagggggaggacaccccgggcggguacugccucacccgcuggaugcugaucgaggccgagcugaagugcuucggcaacaccgccguggccaagugcaacgagaagcacgacgaggaguucugcgacaugcuccggcuguucgacuucaacaagcaggccauccagcgccugaaggcgcccgcccagaugagcauccagcucaucaacaaggccgugaacgcccugaucaacgaccagcugaucaugaagaaccaccuccgggacaucaugugcauccccuacugcaacuacuccaaguacugguaccugaaccacacgaccaccggccgcaccagccugcccaagugcuggcucgucuccaacggcagcuaccugaacgagacgcacuucuccgacgacaucgagcagcaggccgacaacaugaucaccgagaugcugcagaaggaguacauggagcggcaggggaagacgccccucggccugguggaccuguucguguucagcaccuccuucuaccugaucagcaucuuccuccaccuggucaagaucccgacccaccgccacaucguggggaaguccugccccaagccccaccggcugaaccacaugggcaucugcagcugcgggcucuacaagcagcccggcgugccggucaaguggaagcgcuga

SEQ ID NO: 4305 - RNA, 1476 nt, Artificial Sequence
  derived and/or modified protein sequence (opt1) from MOPV/LASV reassortant(IGS-12;Clade IV)__AFY05590__GPCstabilized
augggccagaucgugaccuucuuccaggaggucccccacgugaucgaggaggugaugaacaucguccugaucgcccucagcgugcuggccgugcugaaggggcucuacaacuucgcgaccugcggccuggucgggcuggugacguuccuccugcugugcggccgcuccugcaccaccagccucuacaaggggguguacgagcugcagacccuggagcucaacauggagacgcugaacaugaccaugccgcuguccugcaccaagaacaacagccaccacuacaucauggucggcaacgagaccggccucgagcugacgcugaccaacaccuccaucaucaaccacaaguucugcaaccucagcgacgcccacaagaagaaccuguacgaccacgcccugauguccaucaucagcaccuuccaccucuccauccccaacuucaaccaguacgaggccaugagcugcgacuucaacgggggcaagaucuccgugcaguacaaccugagccacuccuacgccggggacgcggccaaccacugcggcacgguggccaacgggguccugcagaccuucaugcggauggccuggggcggcagcuacaucgcgcucgacuccgggugcggcaacugggacugcaucaugaccagcuaccaguaccugaucauccagaacaccacgugggaggaccacugccaguucucccggcccagccccaucggguaccugggccuccugucccagcgcacccgggacauguacaucagccgccggcgccggggcaccuucaccuggacgcugagcgacuccgagggggaggacaccccgggcggguacugccugacccgcuggaugcucaucgaggccgagcugaagugcuucggcaacaccgccguggccaagugcaacgagaagcacgacgaggaguucugcgacaugcugcggcuguucgacuucaacaagcaggccauccagcgccugaaggcgcccgcccagaugagcauccagcugaucaacaaggccgugaacgcccucaucaacgaccagcugaucaugaagaaccaccuccgggacaucaugugcauccccuacugcaacuacuccaaguacugguaccucaaccacacgaccaccggccgcaccagccugcccaagugcuggcuggucuccaacggcagcuaccucaacgagacgcacuucuccgacgacaucgagcagcaggccgacaacaugaucaccgagaugcugcagaaggaguacauggagcggcaggggaagacgccccugggccucguggaccuguucguguucagcaccuccuucuaccugaucagcaucuuccugcaccucgucaagaucccgacccaccgccacaucguggggaaguccugccccaagccccaccggcugaaccacaugggcaucugcagcugcgggcuguacaagcagcccggcgugccggucaaguggaagcgcuga

SEQ ID NO: 4306 - RNA, 1476 nt, Artificial Sequence
  derived and/or modified protein sequence (opt1) from LASV(LM032-SLE-2010;Clade IV)__AIT17802__GPCstabilized
augggccagaucgugaccuucuuccaggaggucccccacgugaucgaggaggugaugaacaucguccugaucgcccucagcauccuggccgugcugaaggggcucuacaaccuggcgaccugcggccugguggggcucgucacguuccugcugcucugcggccgcuccugcaccaccagccuguacaaggggguguacgagcugcagacccucgagcugaacauggagacgcugaacaugaccaugccgcucuccugcaccaagaacaacagccaccacuacaucauggugggcaacgagaccggccuggagcugacgcucaccaacaccuccaucaucaaccacaaguucugcaaccugagcgacgcccacaagaagaaccuguacaaccacgcccucauguccaucaucagcaccuuccaccuguccauccccaacuucaaccaguacgaggccaugagcugcgacuucaacgggggcaagaucuccguccaguacaaccugagccacuccuacgccggggacgcggccaaccacugcggcacgguggccaacggggugcuccagaccuucaugcggauggccuggggcggcagcuacaucgcgcuggacuccgggugcgaccggugggacugcaucaugaccagcuaccaguaccugaucauccagaacaccacgugggaggaccacugccaguucucccgccccagccccaucggcuaccucgggcugcugucccagcggacccgcgacaucuacaucagccggcgccgccggggcaccuucaccuggacgcugagcgacuccgagggcaaggacacccccgggggcuacugccucacccgguggaugcugaucgaggccgagcugaagugcuucgggaacaccgccgucgccaagugcaacgagaagcacgacgaggaguucugcgacaugcuccgccuguucgacuucaacaagcaggccauccagcggcugaaggcgcccgcccagaugagcauccagcucaucaacaaggccgugaacgcccugaucaacgaccagcugaucaugaagaaccaccuccgcgacaucaugugcauccccuacugcaacuacuccaaguacugguaccugaaccacacgaccaccgggaagaccagccugcccaagugcuggcucguguccaacggcagcuaccugaacgagacgcacuucuccgacgacaucgagcagcaggccgacaacaugaucaccgagaugcugcagaaggaguacauggagcggcucggcaagaccccgcuggggcuggucgaccuguucguguucagcaccuccuucuaccucaucagcaucuuccugcaccuggugaagaucccgacgcaccgccacaucgucggccgguccugccccaagccccaccgccucaaccacauggggaucugcagcugcggccuguacaagcagcccggggugccggugaaguggaagcgguga

SEQ ID NO: 4307 - RNA, 1476 nt, Artificial Sequence
  derived and/or modified protein sequence (opt1) from LASV(LM222-SLE-2010;Clade IV)__AIT17806__GPCstabilized
augggccagaucgugaccuucuuccaggaggucccccacgugaucgaggaggugaugaacaucguccugaucgcccucagcauccuggccgugcugaaggggcucuacaacuucgcgaccugcggccugaucgggcuggugacguuccuccugcugugcggccgcuccugcaccaccagccucuacaagggggucuacgagcugcagacccuggagcucaacauggagacgcugaacaugaccaugccgcuguccugcaccaagaacaacagccaccacuacaucauggugggcaacgagaccggccucgagcugacgcugaccaacaccuccaucaucaaccacaaguucugcaaccucagcgacgcccacaagaagaaccuguacgaccacgcccugauguccaucaucagcaccuuccaccucuccauccccaacuucaaccaguacgaggccaugagcugcgacuucaacgggggcaagaucuccgugcaguacaaccugagccacuccuacgccggggacgcggccaaccacugcggcacggucgccaacggggugcugcagaccuucaugcggauggccuggggcggcagcuacaucgcgcucgacuccgggugcggcaagugggacugcaucaugaccagcuaccaguaccugaucauccagaacaccacgugggaggaccacugccaguucucccggcccagccccaucggguaccugggccuccugucccagcgcacccgggacaucuacaucagccgccggcgccggggcaccuucaccuggacgcugagcgacuccgaggggaaggacaccccgggcggguacugccugacccgcuggaugcucaucgaggccgagcugaagugcuucggcaacaccgccguggccaagugcaacgagaagcacgacgaggaguucugcgacaugcugcggcuguucgacuucaacaagcaggccauccagcgccugaaggcgcccgcccagaugagcauccagcugaucaacaaggccgucaacgcccucaucaacgaccagcugaucaugaagaaccaccuccgggacaucaugugcauccccuacugcaacuacuccaaguacugguaccucaaccacacgaccaccggcaagaccagccugcccaagugcuggcugguguccaacggcagcuaccucaacgagacgcacuucuccgacgacaucgagcagcaggccgacaacaugaucaccgagaugcugcagaaggaguacauggagcgccaggggaagacgccccugggccucguggaccuguucgucuucagcaccuccuucuaccugaucagcaucuuccugcaccucgugaagaucccgacccaccggcacaucguggggaaguccugccccaagccccaccgccugaaccacaugggcaucugcagcugcgggcuguacaagcagcccggcgucccggugaaguggaagcgguga

SEQ ID NO: 4308 - RNA, 1476 nt, Artificial Sequence
  derived and/or modified protein sequence (opt1) from LASV(LM395-SLE-2009;Clade IV)__AIT17810__GPCstabilized
augggccagaucgugaccuucuuccaggaggucccccacgugaucgaggaggugaugaacaucguccugaucgcccucagcauccuggccgugcugaaggggcucuacaaccuggcgaccugcggccugguggggcucgucacguuccugcugcucugcggccgcuccugcaccaccagccuguacaaggggguguacgagcugcagacccucgagcugaacauggagacgcugaacaugaccaugccgcucuccugcaccaaggacaacagccaccacuacauccgggugggcaacgagaccggccuggagcugacgcucaccaacaccuccauccugaaccacaaguucugcaaccugagcgacgcccacaagaagaaccucuacgaccacgcccugauguccaucaucagcaccuuccaccuguccauccccaacuucaaccaguacgaggccaugagcugcgacuucaacgggggccgcaucuccguccaguacaaccucagccacuccuacgccggggacgcggccaaccacugcggcacgguggccaacggggugcugcagaccuucaugcggauggccuggggcggcagcuacaucgcgcuggacuccgggugcggccggugggacugcaucaugaccagcuaccaguaccucaucauccagaacaccacgugggaggaccacugccaguucucccgccccagccccaucggguaccugggccugcucucccagcggacccgcgacaucuacaucagccggcgccgccggggcaccuucaccuggacgcucagcgacuccgaggggaaggacaccccgggcggguacugccugacccgguggaugcugaucgaggccgagcucaagugcuucggcaacaccgccgucgccaagugcaacgagaagcacgacgaggaguucugcgacaugcugcgccuguucgacuucaacaagcaggccauccagcggcucaaggcgcccgcccagaugagcauccagcugaucaacaaggccgugaacgcccugaucaacgaccagcucaucaugaagaaccaccuccgcgacaucaugugcauccccuacugcaacuacuccaaguacugguaccugaaccacacgaccaccggcaagaccagccugccccggugcuggcugguguccaacggcagcuaccugaacgagacgcacuucuccgacgacaucgagcagcaggccgacaacaugaucaccgagaugcuccagaaggaguacauggagcgccaggggaagacgccccugggccuggucgaccuguucguguucagcaccuccuucuaccucaucagcaucuuccugcaccuggugaagaucccgacccaccggcacgucguggggaagcccugccccaagccccaccgccucaaccacaugggcaucugcuccugcgggcuguacaagcagccgggcgugcccgucaaguggaagcgguga

SEQ ID NO: 4309 - RNA, 1476 nt, Artificial Sequence
  derived and/or modified protein sequence (opt1) from LASV(LM765-SLE-2012;Clade IV)__AIT17814__GPCstabilized
augggccagaucgugaccuucuuccaggaggucccccacgugaucgaggaggugaugaacaucguccugaucgcccucagcauccuggccgugcugaaggggcucuacaacuucgcgaccugcggccugguggggcuggucacguuccuccugcugugcggccgcuccugcaccaccagccucuacaaggggguguacgagcugcagacccuggagcucaacauggagacgcugaacaugaccaugccgcuguccugcaccaagaacaacagccaccacuacaucauggugggcaacgagaccggccucgagcugacgcugaccaacaccuccaucaucgaccacaaguucugcaaccucagcgacgcccaccggaagaaccuguacgaccacgcccugauguccaucaucagcaccuuccaccucuccauccccaacuucaaccaguacgaggccaugagcugcgacuucaacgggggcaagaucuccguccaguacaaccugagccacuccuacgccaaggacgcggccgaccacugcgggacgguggccaacggcgugcugcagaccuucaugcgcauggccuggggcgggagcuacaucgcgcucgacuccggcugcgggcgcugggacugcaucaugaccagcuaccaguaccugaucauccagaacaccacgugggaggaccacugccaguucucccggcccagccccaucggcuaccuggggcuccugucccagcgcacccgggacaucuacaucagccgccggcgccggggcaccuucaccuggacgcugagcgacuccgagggcaaggacacccccgggggcuacugccugacccgcuggaugcucaucgaggccgagcugaagugcuucgggaacaccgccgucgccaagugcaacgagaagcacgacgaggaguucugcgacaugcugcggcuguucgacuucaacaagcaggccauccagcgccugaaggcgcccgcccagaugagcauccagcugaucaacaaggccgugaacgcccucaucaacgaccagcugaucaugaagaaccaccuccgggacaucaugugcauccccuacugcaacuacuccaaguacugguaccucaaccacacgaccaccgggaagaccagccugcccaagugcuggcugguguccaacggcagcuaccucaacgagacgcacuucuccgacgacaucgagcagcaggccgacaacaugaucaccgagaugcugcagaaggaguacauggagcgccagggcaagaccccgcuggggcucgucgaccuguucguguucagcaccuccuucuaccugaucagcaucuuccugcaccucgugaagaucccgacgcaccggcacaucgucggcaagcccugccccaagccccaccgccugaaccacauggggaucugcuccugcggccuguacaagcagccgggggugcccgugaaguggaagcgguga

SEQ ID NO: 4310 - RNA, 1476 nt, Artificial Sequence
  derived and/or modified protein sequence (opt1) from LASV(LM774-SLE-2012;Clade IV)__AIT17820__GPCstabilized
augggccagaucgugaccuucuuccaggaggucccccacgugaucgaggaggugaugaacaucguccugaucgcccucagcauccuggccgugcugaaggggcucuacaacuucgcgaccugcggccugguggggcuggucacguuccuccugcugugcggccgcuccugcaccaccagccucuacaaggggguguacgagcugcagacccuggagcucaacauggagacgcugaacaugaccaugccgcuguccugcaccaagaacaacagccaccacuacaucauggugggcaacgagaccggccucgagcugacgcugaccaacaccuccaucaucaaccacaaguucugcaaccucagcgacgcccacaagaagaaccuguacgaccacgcccugauguccaucaucagcaccuuccaccucuccauccccaacuucaaccaguacgaggccaugagcugcgacuucaacgggggcaagaucuccguccaguacaaccugagccacuccuacgccgaggacgcggccaaccacugcgggacgguggccaacggcgugcugcagaccuucaugcggauggccuggggcgggagcuacaucgcgcucgacuccggcugcgggaacugggacugcaucaugaccagcuaccaguaccugaucauccagaacaccacgugggaggaccacugccaguucucccggcccagccccaucggcuaccuggggcuccugucccagcgcacccgggacaucuacaucagccgccggcgccggggcaccuucaccuggacgcugagcgacuccgagggcaaggacacccccgggggcuacugccugacccgcuggaugcucaucgaggccgagcugaagugcuucgggaacaccgccgucgccaagugcaacgagaagcacgacgaggaguucugcgacaugcugcggcuguucgacuucaacaagcaggccauccagcgccugaaggcgcccgcccagaugagcauccagcugaucaacaaggccgugaacgcccucaucaacgaccagcugaucaugaagaaccaccuccgggacaucaugugcauccccuacugcaacuacuccaaguacugguaccucaaccacacgaccaccgggaagaccagccugcccaagugcuggcugguguccaacggcagcuaccucaacgagacgcacuucuccgacgacaucgagcagcaggccgacaacaugaucaccgagaugcugcagaaggaguacauggagcgccagggcaagaccccgcuggggcucgucgaccuguucguguucagcaccuccuucuaccugaucagcaucuuccugcaccucgugaagaucccgacgcaccggcacaucgucggcaaguccugccccaagccccaccgccugaaccacauggggaucugcagcugcggccuguacaagcagcccggggugccggugaaguggaagcgguga

SEQ ID NO: 4311 - RNA, 1476 nt, Artificial Sequence
  derived and/or modified protein sequence (opt1) from LASV(LM776-SLE-2012;Clade IV)__AIT17824__GPCstabilized
augggccagaucgugaccuucuuccaggaggucccccacgugaucgaggaggugaugaacaucguccugaucgcccucagcauccuggccgugcugaaggggcucuacaacuucgcgaccugcggccugguggggcuggucacguuccuccugcugugcggccgcuccugcaccaccagcguguacaaggggguguacgagcuccagacccuggagcugaacauggagacgcucaacaugaccaugccgcuguccugcaccaagaacaacagccaccacuacaucauggucggcaacgagaccggccuggagcucacgcugaccaacaccuccaucaucaaccacaaguucugcaaccugagcgacgcccacaagaagaaccucuacgaccacgcccugauguccaucaucagcaccuuccaccuguccauccccaacuucaaccaguacgaggccaugagcugcgacuucaacgggggcaagaucuccgugcaguacaaccucagccacuccuacgccggggacgcggccaaccacugcggcacgguggccaacgggguccugcagaccuucaugcggauggccuggggcggcagcuacaucgcgcuggacuccgggugcggcaagugggacugcaucaugaccagcuaccaguaccucaucauccagaacaccacgugggaggaccacugccaguucucccgccccagccccaucggguaccugggccugcucucccagcggacccgcgacaucuacaucagccggcgccgccggggcaccuucaccuggacgcucagcgacuccgaggggaaggacaccccgggcggguacugccugacccgguggaugcugaucgaggccgagcucaagugcuucggcaacaccgccguggccaagugcaacgagaagcacgacgaggaguucugcgacaugcugcgccuguucgacuucaacaagcaggccauccagcggcucaaggcgcccgcccagaugagcauccagcugaucaacaaggccgugaacgcccugaucaacgaccagcucaucaugaagaaccaccuccgcgacaucaugugcauccccuacugcaacuacuccaaguacugguaccugaaccacacgaccaccggcaagaccagccugcccaagugcuggcuggucuccaacggcagcuaccugaacgagacgcacuucuccgacgacaucgagcagcaggccgacaacaugaucaccgagaugcuccagaaggaguacauggagcggcaggggaagacgccccugggccugguggaccucuucguguucagcaccuccuucuaccugaucagcaucuuccugcaccuggucaagaucccgacccaccgccacaucguggggaaguccugccccaagccccaccggcucaaccacaugggcaucugcagcugcgggcuguacaagcagcccggcgugccgguccgcuggaagcgguga

SEQ ID NO: 4312 - RNA, 1476 nt, Artificial Sequence
  derived and/or modified protein sequence (opt1) from LASV(LM778-SLE-2012;Clade IV)__AIT17828__GPCstabilized
augggccagaucgugaccuucuuccaggaggucccccacgugaucgaggaggugaugaacaucguccugaucgcccucagcauccuggccgugcugaaggggcucuacaacuucgcgaccugcggccugguggggcuggucacguuccuccugcugugcggccgcuccugcaccaccagccucuacaagggggacuacgagcugcagacccuggagcucaacauggagacgcugaacaugaccaugccgcuguccugcaccaagaacaacagccaccacuacaucauggugggcaacgagaccggccucgagcugacgcugaccaacaccuccaucaucaaccacaaguucugcaaccucagcgacgcccacaagaagaaccuguacgaccacgcccugauguccaucaucagcaccuuccaccucuccauccccaacuucaaccaguacgaggccaugagcugcgacuucaacgggggcaagaucuccgugcaguacaaccugagccacuccuacgccggggacgcggccaaccacugcggcacggucgccaacggggugcugcagaccuucaugcggauggccuggggcggcagcuacaucgcgcucgacuccgggugcggcaacugggacugcaucaugaccagcuaccaguaccugaucauccagaacaccacgugggaggaccacugccaguucucccggcccagccccaucggguaccugggccuccugucccagcgcacccgggacaucuacaucagccgccggcgccggggcaccuucaccuggacgcugagcgacuccgaggggaaggacaccccgggcggguacugccugacccgcuggaugcucaucgaggccgagcugaagugcuucggcaacaccgccguggccaagugcaacgagaagcacgacgaggaguucugcgacaugcugcggcuguucgacuucaacaagcaggccauccagcgccugaaggcgcccgcccagaugagcauccagcugaucaacaaggccgucaacgcccucaucaacgaccagcugaucaugaagaaccaccuccgggacaucaugugcauccccuacugcaacuacuccaaguacugguaccucaaccacacgaccaccggcaagaccagccugcccaagugcuggcugguguccaacggcagcuaccucaacgagacgcacuucuccgacgacaucgagcagcaggccgacaacaugaucaccgagaugcugcagaaggaguacauggagcgccaggggaagacgccccugggccucguggaccuguucgucuucagcaccuccuucuaccugaucagcaucuuccugcaccucgugaagaucccgacccaccggcacaucguggggaaguccugccccaagccccaccgccugaaccacaugggcaucugcagcugcgggcuguacaagcagcccggcgucccggugaaguggaagcgguga

SEQ ID NO: 4313 - RNA, 1476 nt, Artificial Sequence
  derived and/or modified protein sequence (opt1) from LASV(Mad39;Clade IV)__ANH09722__GPCstabilized
augggccagaucgugaccuucuuccaggaggucccccacgugaucgaggaggugaugaacaucguccugaucgcccucagcauccuggccgugcugaaggggcucuacaacguggcgaccugcggccugaucgggcuggucacguuccuccugcugugcggccgcuccugcaccaccacccucuacaaggggguguacgagcugcaggcccuggagcucaacauggagacgcugaacaugaccaugccgcugagcugcaccaagaacaacucccaccacuacauccgggugggcaacgagaccggccucgagcugacgcugaccaacaccagccucaucaaccacaaguucugcaaccuguccgacgcccacaagaagaaccuguacgaccacgcccucaugagcaucaucuccaccuuccaccugagcauccccaacuucaaccaguacgaggccauguccugcgacuucaacgacgggaagaucagcguccaguacaaccugucccacacguacgcgggcgacaccgccaaccacugcgggaccguggccaacggcgugcuccagaccuucaugcgcauggccuggggcgggagcuacaucgcgcuggacuccggcugcgggggcugggacugcaucaugacgagcuaccaguaccugaucauccagaacaccaccugggaggaccacugccaguucucccggcccagccccaucggguaccucggccugcugucccagcggacccgcgacaucuacaucagccggcgccgccggggcacguucaccuggacccuguccgacagcgaggggaaggacaccccgggcggguacugccucacgcgguggaugcugaucgaggccgagcugaagugcuucggcaacaccgccgucgccaagugcaacgagaagcacgacgaggaguucugcgacaugcuccgccuguucgacuucaacaagcaggccauccagcggcugaaggcgcccgcccagaugagcauccagcucaucaacaaggccgugaacgcccugaucaacgaccagcugaucaugaagaaccaccuccgcgacaucaugugcauccccuacugcaacuacuccaaguacugguaccugaaccacaccgugaccggcaagacgagccugcccaagugcuggcucgucuccaacggcagcuaccugaacgagacccacuucuccgacgacaucgagcagcaggccgacaacaugaucaccgagaugcugcagaaggaguacauggagcggcaggggaagacgccccucggccugguggaccuguucguguucagcaccuccuucuaccugaucagcaucuuccuccaccuggucaagaucccgacccaccgccacgugguggggaagcccugccccaagccccaccggcugaaccacaugggcaucugcuccugcggguucuacaagcagccgggcguccccgugcgcuggaagcgguga

SEQ ID NO: 4314 - RNA, 1476 nt, Artificial Sequence
  derived and/or modified protein sequence (opt1) from LASV(Mad41;Clade IV)__ANH09724__GPCstabilized
augggccagaucgugaccuucuuccaggaggucccccacgugaucgaggaggugaugaacaucguccugaucgcccucagcauccuggccgugcugaaggggcucuacaacguggcgaccugcggccugaucgggcuggucacguuccuccugcugugcggccgcuccugcaccaccacccucuacaaggggguguacgagcugcaggcccuggagcucaacauggagacgcugaacaugaccaugccgcugagcugcaccaagaacgacucccaccacuacaucauggugggcaacgagaccggccucgagcugacgcugaccaacaccagcaucaucucccacaaguucugcaaccucagcgacgcccacaagcagaaccuguacgaccacgcccugauguccaucaucagcaccuuccaccucuccauccccaacuucaaccaguacgaggccaugagcugcgacuucaacgggggcaagaucuccguccaguacaaccugagccacacguacgcgggggacgccgccaaccacugcggcaccguggccaacggggugcugcagaccuucaugcggauggcguggggcggcuccuacaucgcccucgacagcgggugcggcgggugggacugcaucaugaccuccuaccaguaccugaucauccagaacacgaccugggaggaccacugccaguucagccggcccucccccaucggcuaccugggccuccugagccagcgcacccgggacaucuacaucucccgccggcgccgggggaccuucacguggacccugagcgacagcgagggcaaggacacccccgggggcuacugccugacccgcuggaugcucaucgaggccgagcugaagugcuucgggaacacggccgucgccaagugcaacgagaagcacgacgaggaguucugcgacaugcugcggcuguucgacuucaacaagcaggcgauccagcgccugaaggcccccgcccagauguccauccagcugaucaacaaggccgugaacgcccucaucaacgaccagcugaucaugaagaaccaccuccgggacaucaugugcauccccuacugcaacuacagcaaguacugguaccucaaccacaccgugaccggcaagaccucccugcccaagugcuggcuggucagcaacggguccuaccucaacgagacgcacuucagcgacgacaucgagcagcaggcggacaacaugaucaccgagaugcugcagaaggaguacauggagcgccagggcaagaccccgcuggggcucguggaccuguucguguucuccaccagcuucuaccugaucuccaucuuccugcaccucgucaagaucccgacgcaccggcacguggugggcaagcccugccccaagccccaccgccugaaccacauggggaucugcagcugcggcuucuacggccagccggggguccccgugcgguggaagcgcuga

SEQ ID NO: 4315 - RNA, 1476 nt, Artificial Sequence
  derived and/or modified protein sequence (opt1) from LASV(Mad63;Clade IV)__ANH09728__GPCstabilized
augggccagaucgugaccuucuuccaggaggucccccacgugaucgaggaggugaugaacaucguccugaucgcccucagcgugcuggccgugcugaaggggcucuacaacgucgcgaccugcggccugaucgggcuggugacguuccuccugcugugcggccgcuccugcaccaccacccucuacaaggggguguacgagcugcaggcccuggagcucaacaugggcacgcugaacaugaccaugccgcugagcugcaccaagaacaacucccaccacuacaucauggucggcaacgagaccgggcucgagcugacgcugaccaacaccagcaucaucaaccacaaguucugcaaccucuccgacgcccacaagaaggaccuguacgaccacgcccugaugagcaucaucuccaccuuccaccucagcgugcccaacuucaaccaguacgaggccauguccugcgacuucaacggcgggaagaucagcgugcaguacaaccugucccacgcguacgccggcgacacggccaaccacugcgggaccgucgccaacggcgugcugcagaccuucaugcggauggcguggggcgggagcuacaucgcccucgacuccggcugcgggggcugggacugcaucaugaccagcuaccaguaccugaucauccagaacacgaccugggaggaccacugccaguucucccggcccagccccaucggcuaccuggggcuccugucccagcgcacccgggacaucuacaucagccgccggcgccggggcaccuucacguggacccuguccgacagcgagggggaguacaccccgggcggguacugccugacccgcuggaugcucaucgaggccgagcugaagugcuucggcaacacggccguggccaagugcaacgagaagcacgacgaggaguucugcgacaugcugcggcuguucgacuucaacaagcaggcgauccagcgccugaaggcccccgcccagaugagcauccagcugaucaacaaggccgucaacgcccucaucaacgaccagcugaucaugaagaaccaccuccgggacaucaugugcauccccuacugcaacuacuccaaguacugguaccucaaccacaccgugaccgggaagaccagccugcccaagugcuggcugguguccaacggcagcuaccucaacgagacgcacuucuccgacgacaucgagcagcaggcggacaacaugaucaccgagaugcugcagaaggaguacauggagcgccaggggaagacgccccugggccucgucgaccuguucguguucagcaccuccuucuaccugaucagcaucuuccugcaccucgugaagaucccgacccaccggcacgucguggggaagcccugccccaagccccaccgccugaaccacaugggcaucugcuccugcggcuucuacaagcagccgggggugcccguccgguggaagcgcuga

SEQ ID NO: 4316 - RNA, 1476 nt, Artificial Sequence
  derived and/or modified protein sequence (opt1) from LASV(Mad69;Clade IV)__ANH09730__GPCstabilized
augggccagaucgugaccuucuuccaggaggucccccacgugaucgaggaggugaugaacaucguccugaucgcccucagcgugcuggccgugcugaaggggcucuacaacgucgcgaccugcggccugaucgggcuggugacguuccuccugcugugcggccgcuccugcaccaccacccucuacaaggggguguacgagcugcaggcccuggagcucaacauggagacgcugaacaugaccaugccgcugagcugcaccaagaacaacucccaccacuacaucauggucggcaacgagaccggccucgagcugacgcugaccaacaccagcaucaucaaccacaaguucugcaaccucuccgacgcccacaagaagaaccuguacgaccacgcccugaugagcaucaucuccaccuuccaccucagcauccccaacuucaaccaguacgaggccauguccugcgacuucaaccaggggaagaucagcgugcaguacaaccugucccacgcguacgccggcgacgccgccaaccacugcgggacgguggcgaacggcguccugcagaccuucaugcggauggccuggggcgggagcuacaucgcccucgacuccggcugcgggggcugggacugcaucaugaccagcuaccaguaccugaucauccagaacaccacgugggagaaccacugccaguucucccggcccagccccaucggguaccugggccuccugucccagcgcacccgggacaucuacaucagccgccggcgccggggcaccuucaccuggacgcuguccgacagcgaggggaagggcacccccgggggcuacugccugacccgcuggaugcucaucgaggccgagcugaagugcuucgggaacaccgccguggcgaagugcaacgagaagcacgacgaggaguucugcgacaugcugcggcuguucgacuucaacaagcaggccauccagcgcuucaaggcccccgcccagaugagcauccagcugaucaacaaggccgugaacgcgcugaucaacgaccagcucaucaugaagaaccaccuccgggacaucaugugcauccccuacugcaacuacuccaaguacugguaccugaaccacacggucaccggcaagaccagccuccccaagugcuggcugguguccaacgggagcuaccugaacgagacccacuucuccgacgacaucgagcagcaggccgacaacaugaucacggagaugcuccagaaggaguacauggagcgccagggccggaccccgcuggggcugguggaccucuucgucuucagcaccuccuucuaccugaucagcaucuuccugcaccuggugaagaucccgacccaccgccacguggucggcaagcccugccccaagccccaccggcucaaccacauggggaucugcuccugcggcuucuacaagcagccgggcgugcccgugcgcuggaagcgguga

SEQ ID NO: 4317 - RNA, 1476 nt, Artificial Sequence
  derived and/or modified protein sequence (opt1) from LASV(Mad83;Clade IV)__ANH09732__GPCstabilized
augggccagaucgugaccuucuuccaggaggucccccacgugaucgaggaggugaugaacaucguccugaucgcccucagcauccuggccgugcugaaggggguguacaacgucgcgaccugcggccucaucgggcuggugacguuccugcuccuguccggccgcagcugcaccaccaccaucuacaaggggguguacgagcugcaggcccucgagcugaacauggagacgcugaacaugaccaugccgcucuccugcaccaagaacaacagccaccacuacaucauggucggcaacgagaccggccuggagcugacgcucaccaacaccuccaucaucaaccacaaguucugcaaccugagcgacgcccacaagaagaaccuguacgaccacgcccucauguccaucaucagcaccuuccaccuguccauccccaacuucaaccaguacgaggccaugagcugcgacuucaacgggggcaagaucuccgugcaguacaaccugagccacacguacgcgggggacgccgccaaccacugcggcaccguggccaacgggguccuccagaccuucaugcggauggcguggggcggcuccuacaucgcccuggacagcgggugcggcgggugggacugcaucaugaccuccuaccaguaccugaucauccagaacacgaccugggagaaccacugccaguucagccgccccucccccaucggcuaccucggccugcugagccagcggacccgcgacaucuacaucucccggcgccgccgggggaccuucacguggacccugagcgacagcgagggcaaggacacccccgggggcuacugccucacccgguggaugcugaucgaggccgagcugaagugcuucgggaacacggccguggccaagugcaacgagaagcacgacgaggaguucugcgacaugcuccgccuguucgacuucaacaagcaggcgauccagcggcugaaggcccccgcccagauguccauccagcucaucaacaaggccgugaacgcccugaucaacgaccagcugaucaugaagaaccaccuccgcgacaucaugugcauccccuacugcaacuacagcaaguacugguaccugaaccacaccgucaccggcaagaccucccugcccaagugcuggcucgugagcaacggguccuaccugaacgagacgcacuucagcgacgacaucgagcagcaggcggacaacaugaucaccgagaugcugcagaaggaguacauggagcggcagggcaagaccccgcucgggcugguggaccuguucgucuucuccaccagcuucuaccucaucuccaucuuccugcaccuggugaagaucccgacgcaccgccacaucgugggcaagcccugccccaagccccaccggcugaaccacauggggaucugcagcugcggcuucuacaagcagccgggcguccccgugcgcuggaagcgguga

SEQ ID NO: 4318 - RNA, 1476 nt, Artificial Sequence
  derived and/or modified protein sequence (opt1) from LASV(NL;Clade IV)__AAO59512__GPCstabilized
augggccagaucgugaccuucuuccaggaggucccccacgugaucgaggaggugaugaacaucguccugaucgcccucagcauccuggccgugcugaaggggcucuacaacuucgcgaccugcggccugguggggcuggucgccuuccuccugcugugcggccgcuccugcacgagcucccucuacaaggggguguacgagcugcagacccuggagcucaacauggagacccugaacaugaccaugccgcugagcugcacgaagaacaacucccaccacuacauccgggugggcaacgagaccggccucgagcugacccugaccaacacgagcaucaucaaccacaaguucugcaaccucuccgacgcccacaagaagaaccuguacgaccacgcccugaugagcaucaucuccaccuuccaccucagcauccccaacuucaaccaguacgaggccauguccugcgacuucaacgggggcaagaucagcguccaguacaaccugucccacagcuacgcgguggacgccgccaagcacugcgggaccguggccaacggcguccugcagaccuucaugcgcauggcguggggcggguccuacaucgcccucgacagcggcugcgggcggugggacugcaucaugacguccuaccaguaccugaucauccagaacaccaccugggaggaccacugccaguucagccgccccucccccaucggcuaccuggggcuccugagccagcggacccgcgacaucuacaucagccggcgccgccggggcacguucaccuggacccuguccgacagcgagggcaaggacacccccgggggcuacugccugacgcgguggaugcucaucgaggccgagcugaagugcuucgggaacaccgccguggccaagugcaacgagaagcacgacgaggaguucugcgacaugcugcgccucuucgacuucaacaagcaggcgauccagcggcugaagacccccgcccagauguccauccagcugaucaacaaggccgugaacgcccucaucaacgaccagcugaucaugaagaaccaccuccgcgacaucaugugcauccccuacugcaacuacagccgguacugguaccugaaccacaccacgaccgggaagaccucccugcccaagugcuggcuggucagcaacggcuccuaccucaacgagacccgcuucagcgacgacaucgagcagcaggccgacaacaugaucacggagaugcugcagaaggaguacauggagcggcagggcaagaccccgcuggggcucguggaccuguucguguucuccaccagcuucuaccugaucuccaucuuccugcaccucgucaagaucccgacccaccgccacaucgugggcaagagcugccccaagccccaccggcugaaccacauggggaucugcuccugcggccuguacaagcagcccggggugccggucaaguggaagcgcuga

SEQ ID NO: 4319 - RNA, 1476 nt, Artificial Sequence
  derived and/or modified protein sequence (opt1) from LASV(Z0947-SLE-2011;Clade IV)__AIT17840__GPCstabilized
augggccagaucgugaccuucuuccaggaggucccccacgugaucgaggaggugaugaacaucguccugaucgcccucagcauccuggccgugcugaaggggcucuacaacuucgcgaccugcggccugguggggcuggucacguuccuccugcugugcggccgcuccugcaccaucagccucuacaaggggguguacgagcugcagacccuggagcucaacauggagacccugaacaugacgaugccgcuguccugcaccaagaacaacagccaccacuacaucauggugggcaacgagaccggccucgagcugacccugacgaacaccuccaucaucaaccacaaguucugcaaccucagcgacgcccacaagaagaaccuguacgaccacgcccugauguccaucaucagcaccuuccaccucuccauccccaacuucaaccaguacgaggccaugagcugcgacuucaacgggggcaagaucuccguccaguacaaccugagccacuccuacgccggggacgcggccaaccacugcggcaccguggccaacggggugcugcagacguucaugcggauggccuggggcggcagcuacaucgcgcucgacuccgggugcgaccggugggacugcaucaugaccagcuaccaguaccugaucauccagaacaccaccugggaggaccacugccaguucucccgccccagccccaucggcuaccuggggcuccugucccagcggacgcgcgacaucuacaucagccggcgccgccggggcaccuucaccuggacccugagcgacuccgagggcaaggacacgcccgggggcuacugccugacccgguggaugcucaucgaggccgagcugaagugcuucgggaacaccgccgucgccaagugcaacgagaagcacgacgaggaguucugcgacaugcugcgccucuucgacuucaacaagcaggccauccagcggcugaaggcgcccgcccagaugagcauccagcugaucaacaaggccgugaacgcccucaucaacgaccagcugaucaugaagaaccaccuccgcgacaucaugugcauccccuacugcaacuacuccaaguacugguaccugaaccacaccacgaccgggaagaccagccugcccaagugcuggcugguguccaacggcagcuaccucaacgagacccacuucuccgacgacaucgagcagcaggccgacaacaugaucacggagaugcugcagaaggaguacauggagcggcagggcaagaccccgcuggggcucgucgaccuguucguguucagcaccuccuucuaccugaucagcaucuuccugcaccucgugaagaucccgacccaccgccacaucgucggcaagcccugccccaagccccaccggcugaaccacauggggaucugcuccugcggccuguacaagcagccgggggugcccgugaaguggaagcgcuga

SEQ ID NO: 4320 - RNA, 1476 nt, Artificial Sequence
  derived and/or modified protein sequence (opt1) from LASV(Z0948-SLE-2011;Clade IV)__AIT17844__GPCstabilized
augggccagaucgugaccuucuuccaggaggucccccacgugaucgaggaggugaugaacaucguccugaucgcccucagcauccuggccgugcugaaggggcucuacaacuucgcgaccugcggccugguggggcuggucacguuccuccugcugugcggccgcuccugcaccaucagccucuacaaggggguguacgagcugcagacccuggagcucaacauggagacccugaacaugacgaugccgcuguccugcaccaagaacaacagccaccacuacaucauggugggcaacgagaccggccucgagcugacccugacgaacaccuccaucaucaaccacaaguucugcaaccucagcgacgcccacaagaagaaccuguacgaccacgcccugauguccaucaucagcaccuuccaccucuccauccccaacuucaaccaguacgaggccaugagcugcgacuucaacgggggcaagaucuccguccaguacaaccugagccacuccuacgccggggacgcggccaaccacugcggcaccguggccaacggggugcugcagacguucaugcggauggccuggggcggcagcuacaucgcgcucgacuccgggugcgaccggugggacugcaucaugaccagcuaccaguaccugaucauccagaacaccaccugggaggaccacugccaguucucccgccccagccccaucggcuaccuggggcuccugucccagcggacgcgcgacaucuacaucagccggcgccgccggggcaccuucaccuggacccugagcgacuccgagggcaaggacacgcccgggggcuacugccugacccgguggaugcucaucgaggccgagcugaagugcuucgggaacaccgccgucgccaagugcaacgagaagcacgacgaggaguucugcgacaugcugcgccucuucgacuucaacaagcaggccauccagcggcugaaggcgcccgcccagaugagcauccagcugaucaaccgcgccgugaacgcccucaucaacgaccagcugaucaugaagaaccaccuccgggacaucaugugcauccccuacugcaacuacuccaaguacugguaccugaaccacaccacgaccgggaagaccagccugcccaagugcuggcugguguccaacggcagcuaccucaacgagacccacuucuccgacgacaucgagcagcaggccgacaacaugaucacggagaugcugcagaaggaguacauggagcgccagggcaagaccccgcuggggcucgucgaccuguucguguucagcaccuccuucuaccugaucagcaucuuccugcaccucgugaagaucccgacccaccggcacaucgucggcaagcccugccccaagccccaccgccugaaccacauggggaucugcuccugcggccuguacaagcagccgggggugcccgugaaguggaagcgguga

SEQ ID NO: 4321 - RNA, 1476 nt, Artificial Sequence
  derived and/or modified protein sequence (opt1) from LASV(Z148;Clade IV)__AAT49008__GPCstabilized
augggccagaucgugaccuucuuccaggaggucccccacgugaucgaggaggugaugaacaucguccugaucgcccucagcauccuggccgugcugaaggggcucuacaacguggcgaccugcggccugaucgggcuggucacguuccucuuccugugcggccgcuccugcagcaccacccuguacaaggggguguacgagcuccagacccuggagcugaacauggagacgcucaacaugaccaugccgcuguccugcaccaagaacaacagccaccacuacaucauggugggcaacgagaccggccuggagcucacgcugaccaacaccuccaucaucaaccacaaguucugcaaccugagcgacgcccacaagaagaaccucuacgaccacacccugauguccaucaucagcacguuccaccuguccauccccaacuucaaccaguacgaggccaugagcugcgacuucaacgggggcaagaucuccguccaguacaaccucagccacuccuacgccguggacgccgcgaaccacugcgggaccguggccaacggcguccugcagaccuucaugcggauggccuggggcgggagcuacaucgcccuggacuccggcugcgggaacugggacugcaucaugaccagcuaccaguaccucaucauccagaacacgaccugggaggaccacugccaguucucccggcccagccccaucggcuaccuggggcugcucucccagcgcacccgggacaucuacaucagccgccggcgccggggcaccuucacguggacccucagcgacuccgagggcaaggacacccccgggggcuacugccugacccgcuggaugcugaucgaggcggagcucaagugcuucgggaacacggccguggccaagugcaacgagaagcacgacgaggaguucugcgacaugcugcggcuguucgacuucaacaagcaggccauccagcgccucaaggcccccgcgcagaugagcauccagcugaucaacaaggccgugaacgcccugaucaacgaccagcucaucaugaagaaccaccuccgggacaucaugugcauccccuacugcaacuacucccgcuacugguaccugaaccacaccgucaccgggaagaccagccugcccaagugcuggcugguguccaacggcagcuaccugaacgagacgcacuucuccgacgacaucgagcagcaggccgacaaccucaucaccgagaugcugcagaaggaguacauggagcggcagggcaagaccccgcuggggcucguggaccuguucgucuucagcaccuccuucuaccugaucagcaucuuccugcaccucgugaagaucccgacgcaccgccacaucgugggcaagcccugccccaagccccaccggcugaaccacauggggaucugcuccugcggcgucuacaagcagccgggggugcccgugcgcuggaagcgguga

SEQ ID NO: 4322 - RNA, 1476 nt, Artificial Sequence
  derived and/or modified protein sequence (opt1) from LASV(Bamba-R114;Clade V)__AHC95555__GPCstabilized
augggccagaucgugaccuucuuccaggaggucccccacgugaucgaggaggugaugaacaucguccugaucgcccucagcauccuggccgugcugaaggggcucuacaacaucgcgaccugcggccugaucgggcuggugacguuccuccugcugugcggccgcuccugcagcuccaaccucuacaagggggucuacgagcugcagagccuggaccucaacauggagacccugaacaugaccaugccgcuguccugcaccaagaacaacagccaccacuacauccgggccggcaacgagacgggccucgagcugacccugaccaacaccucccucaucaaccacaaguucugcaaccugagcgacgcccacaagaagaaccuguacgaccacacgcucauguccaucaucagcaccuuccaccuguccauccccaacuucaaccaguacgaggccaugagcugcgacuucaacgggggcaagaucuccgugcaguacaaccugagccacgccuacgcgaucgacgccgccgagcacugcgggaccguggccaacggcguccuccagaccuucaugcgcauggcguggggcggguccuacaucgcccuggacagcggcugcgggaacugggacugcaucaugacguccuaccaguaccugaucauccagaacaccaccugggaggaccacugccaguucagccgccccucccccaucggcuaccucgggcugcugagccagcggacccgcgacaucuacaucagccggcgccgccggggcacguucaccuggacccuguccgacagcgagggcaacgccacccccgggggcuacugccucacgcgguggaugcugaucgaggccgagcugaagugcuucgggaacaccgccguggcgaagugcaacgagaagcacgacgaggaguucugcgacaugcuccgccuguucgacuucaacaagcaggccaucucccggcucaagagccccgcccagauguccauccagcugaucaacaaggccgugaacgcccugaucaacgaccagcugaucaugaagaaccaccuccgcgacaucaugugcauccccuacugcaacuacagcaaguacugguaccugaaccacaccaucaccgggcggacgucccugcccaagugcuggcucgucagcaacggcuccuaccugaacgagacccacuucagcgacgacaucgagcagcaggcggacaacaugaucaccgagaugcugcagaaggaguacauggagcgccagggcaagaccccgcucgggcugguggaccuguucguguucuccacgagcuucuaccugaucuccaucuuccuccaccuggucaagaucccgacccaccggcacaucgugggcaagcccugccccaagccccaccgccugaaccacauggggaucugcagcugcggccucuacaagcagccgggggugccccugaaguggaagcgguga

SEQ ID NO: 4323 - RNA, 1476 nt, Artificial Sequence
  derived and/or modified protein sequence (opt1) from LASV(Komina-R16;Clade V)__AHC95557__GPCstabilized
augggccagaucgugaccuucuuccaggaggucccccacgugaucgaggaggugaugaacaucguccugaucgcccucagcauccuggccgugcugaaggggcucuacaacaucgcgaccugcggccugaucgggcuggugacguucuuccuccugugcggccgcuccugcagcuccaaccuguacaagggggucuacgagcuccagagccuggaccugaacauggagacccucaacaugaccaugccgcuguccugcaccaagaacaacagccaccacuacauccgggugggcaacgagacgggccuggagcucacccugaccaacaccucccugcucaaccacaaguucugcaaccugagcgacgcccacaagcgcaaccuguacgaccacgcccucauguccaucaucagcacguuccaccuguccauccccaacuucaaccaguacgaggccaugagcugcgacuucaacgggggcaagaucaccgugcaguacaaccugucccacagcuacgccggggacaccgcgaagcacugcggcaccaucgccaacgggguccuccagacguucaugcggauggccuggggcggcuccuacaucgcccuggacagcgggugcggcaacugggacugcaucaugaccuccuaccaguaccugaucauccagaacaccaccugggaggaccacugccaguucagccgccccucccccaucggguaccucggccugcugagccagcggacgcgcgacaucuacaucagccggcgccgccggggcaccuucaccuggacccuguccgacagcgaggggaacgcgacgccgggcggguacugccucacccgguggaugcugaucgaggccgagcugaagugcuucggcaacaccgccguggccaagugcaacgagaagcacgacgaggaguucugcgacaugcuccgccuguucgacuucaacaagcaggccaucucccggcugcgcagccccgcgcagauguccauccagcucaucaacaaggccgugaacgcccugaucaacgaccagcugaucaugaagaaccaccuccgggacaucaugugcauccccuacugcaacuacagcaaguacugguaccugaaccacaccgucacgggccgcaccucccugcccaagugcuggcucgugagcaacggcuccuaccugaacgagacccacuucagcgacgacaucgagcagcaggccgacaacaugaucaccgagaugcugcagaaggaguacauggaccggcaggggaagacgccccucggccugguggaccuguucgucuucuccaccagcuucuaccugaucuccaucuuccuccaccuggugaagaucccgacccaccgccacaucguggggaagcccugccccaagccccaccggcugaaccgcaugggcaucugcagcugcgggcucuacaagcagccgggcguccccgugaaguggaagcgguga

SEQ ID NO: 4324 - RNA, 1476 nt, Artificial Sequence
  derived and/or modified protein sequence (opt1) from LASV(Ouoma-R123;Clade V)__AHC95559__GPCstabilized
augggccagaucaucaccuucuuccaggaggugccccacgucaucgaggaggugaugaacaucgugcugaucgcccucagcauccuggccguccugaaggggcucuacaacaucgcgaccugcggccugaucgggcuggugacguuccuccugcugugcggccgcuccugcagcuccagccucuacaaggggguguacgagcugcagucccuggaccucaacauggagacccugaacaugaccaugccgcugagcugcaccaagaacaacucccaccacuacauccgggucggcaacgagacgggccucgagcugacccugaccaacaccagccucaucaaccacaaguucugcaaccuguccgacgcccacaagaagaaccuguacgaccacgcccucaugagcaucaucuccacguuccaccugagcauccccaacuucaaccaguacgaggccauguccugcgacuucaacgggggcaagaucagcgugcaguacaaccugucccacgccuacgcgaucgacgccgccagccacugcgggaccguggccaacggcguccuccagaccuucaugcgcauggcguggggcggguccuacaucgcccuggacagcggcugcgggaacugggacugcaucaugaccuccuaccaguaccugaucauccagaacacgaccugggaggaccacugccaguucagccggcccagccccaucggcuaccucgggcugcugucccagcgcacccgggacaucuacaucagccgccggcgccggggcaccuucacguggacccuguccgacagcgagggcaacgccacccccgggggcuacugccucacccgcuggaugcugaucgaggccgagcugaagugcuucgggaacacggccguggcgaagugcaacgagaagcacgacgaggaguucugcgacaugcuccggcuguucgacuucaacaagcaggccaucucccgccucaagagccccgcccagauguccauccagcugaucaacaaggccgugaacgcccugaucaacgaccagcugaucaugaagaaccaccuccgggacaucaugugcauccccuacugcaacuacagcaaguacugguaccugaaccacaccgucaccgggaagaccucccugcccaagugcuggcucgugagcaacggcuccuaccugaacgagacgcacuucagcgacgacaucgagcagcaggcggacaacaugaucaccgagaugcugcagaaggaguacauggagcgccagggcaagaccccgcucgggcugguggaccuguucgucuucuccaccagcuucuaccugaucuccaucuuccuccaccuggugaagaucccgacgcaccggcacaucgugggcaagcccugccccaagccccaccgccugaaccacauggggaucugcagcugcggccucuacaagcagccggggguccccgugaaguggaagcgguga

SEQ ID NO: 4325 - RNA, 1476 nt, Artificial Sequence
  derived and/or modified protein sequence (opt1) from LASV(Soromba-R;Clade V)__AHC95553__GPCstabilized
augggccagaucgugaccuucuuccaggaggucccccacgugaucgaggaggugaugaacaucguccugaucgcccucagcauccuggccgugcugaaggggcucuacaacaucgcgaccugcggccugaucgggcuggugacguucuuccuccugugcggccgcuccugcagcuccaaccuguacaagggggucuacgagcuccagagccuggaccugaacauggagacccucaacaugaccaugccgcuguccugcaccaagaacaacagccaccacuacauccgggugggcaacgagacgggccuggagcucacccugaccaacaccucccugcucgaccacaaguucugcaaccugagcgacgcccacaagaagaaccuguacgaccacgcccucauguccaucaucagcacguuccaccuguccauccccaacuucaaccaguacgaggccaugagcugcgacuucaacgggggcaagaucaccgugcaguacaaccugucccacagcuacgccggggacgcggcccgccacugcggcaccaucgccaacgggguccuccagaccuucaugcggauggccuggggcggcuccuacaucgcgcuggacagcgggugcggcaacugggacugcaucaugacguccuaccaguaccugaucauccagaacaccaccugggaggaccacugccaguucagccgccccucccccaucggguaccucagccugcugagccagcggacccgcgacaucuacaucucccggcgccgccggggcacguucaccuggacccugagcgacuccgagggcaacgccacccccgggggcuacugccucacgcgguggaugcugaucgaggccgagcugaagugcuucgggaacaccgccguggccaagugcaacgagaagcacgacgaggaguucugcgacaugcuccgccuguucgacuucaacaagcaggcgaucagccggcugcgcucccccgcccagaugagcauccagcucaucaacaaggccgugaacgcccugaucaacgaccagcugaucaugaagaaccaccuccgggacaucaugugcauccccuacugcaacuacuccaaguacugguaccugaaccacaccgucaccgggcgcacgagccugcccaagugcuggcucguguccaacggcagcuaccugaacgagacccacuucuccgacgacaucgagcagcaggccgacaacaugaucaccgagaugcugcagaaggaguacauggaccggcagggcaagaccccgcucgggcugguggaccuguucgucuucagcacguccuucuaccugaucagcaucuuccuccaccuggugaagaucccgacccaccgccacaucgugggcaagcccugccccaagccccaccggcugaaccgcauggggaucugcuccugcggccucuacaagcagccggggguccccgugaaguggaagcgguga

SEQ ID NO: 4326 - RNA, 1473 nt, Artificial Sequence; identical to SEQ ID NO: 4080
  derived and/or modified protein sequence (opt1) from LASV(Alzey;Clade VI)__SCA79105__GPCstabilized

SEQ ID NO: 4327 - RNA, 1473 nt, Artificial Sequence
  derived and/or modified protein sequence (opt1) from LASV(Lassa/H.sapiens-wt/TGO/2016/201600568;Clade VI)__AVN98153__GPCstabilized
augggccagaucaucaccuucuuccaggaggugccccacgucaucgaggaggugaugaacaucgugcugaucgcccucagccugcuggccauccucaagggggucuacaacguggcgaccugcggcaucaucgggcuggugacguuccuguuccucugcggccgcuccugcagccugaucuacaagggguccuacgagcugcagacccucgagcugaacauggagacccugaacaugaccaugccgcucagcugcacgaagaacuccagccaccacuacauccgggucggcaacgagaccggccuggagcugacccucaccaacacguccaucaucaaccacaaguucugcaaccugagcgacgcccacaagcgcaaccuguacgaccacgcccucauguccauccugagcaccuuccaccuguccauccccaacuucaaccaguacgaggccaugagcugcgacuucaacgggggcaagaucuccgugcaguacaaccucagccacgccuacgcgguggacgccgccgagcacugcgggaccgucgccaacggcgugcugcagaccuucaugcggauggcguggggcggguccuacaucgcccuggacagcggcugcgggaacugggacugcaucaugacguccuaccaguaccucaucauccagaacaccaccugggaggaccacugccaguucagccggcccucccccaucggcuaccuggggcugcucagccagcgcacccgggacaucuacaucagccgccggcgccggggcacguucaccuggacccucuccgacagcgagggcaacgagacccccgggggcuacugccugacgcgcuggaugcugaucgaggccgagcucaagugcuucgggaacaccgccguggccaagugcaacgagaagcacgacgaggaguucugcgacaugcugcggcuguucgacuucaacaagcaggcgauccagcgccucaagucccccgcccagaugagcauccagcugaucaacaaggccgucaacgcccugaucaacgaccagcucaucaugaagaaccaccuccgggacaugaugugcauccccuacugcaacuacuccaaguacugguaccugaaccacaccagcuccgggcgcgccagccugcccaagugcuggcugguguccaacggcagcuaccugaacgagacccacuucuccgacgacaucgagcagcaggcggacaacaugaucacggagaugcuccagaaggaguacaucgaccggcagggcaagaccccgcuggggcugguggaccucuucgucuucagcaccuccuucuaccugaucagcaucuuccugcaccugaucaagaucccgacccaccgccacaucgugggcaagcccugccccaagccccaccggcucaaccacauggggaucugcuccugcggccuguacaagcagccgggggugcccacgcgcuggaagcgguga

SEQ ID NO: 4328 - RNA, 1473 nt, Artificial Sequence
  derived and/or modified protein sequence (opt1) from LASV(NIGERIA IKEJI;Clade II)__AMZ00373__GPCstabilized
augggccagaucaucaccuucuuccaggaggugccccacgucaucgaggaggugaugaacaucgugcugaucgcccucagccugcuggccauccucaaggggaucuacaacgucgcgaccugcggccuguucgggcugaucuccuuccucuuccugugcggccgcagcugcuccacgauguacaaggggguguacgagcugcagacccucgagcuggacauggccaaccugaacaugaccaugccgcucagcugcaccaagaacaacucccaccacuacaucauggugggcaacgagacgggccuggagcugacccucaccaaccagagcaucaucaaccacaaguucugcaaccuguccgacgcccacaagaagaaccuguacgaccacacccucaugagcaucaucuccacguuccaccugagcauccccaacuucaaccaguacgaggccauguccugcgacuucaacgggggcaagaucagcguccaguacaaccugucccacagcuacgccguggacgcggccaaccacugcgggaccguggccaacggcguccuccagaccuucaugcggauggccuggggcggguccuacaucgcgcuggacagcggcugcgggaacugggacugcaucaugaccuccuaccaguaccugaucauccagaacacgaccugggaggaccacugccaguucagccgccccucccccaucggcuaccucgggcugcugagccagcggacccgcgacaucuacaucagccggcgccgccggggcaccuucacguggacccuguccgacagcgagggcaacgacgcccccgggggcuacugccucacccgguggaugcugaucgaggccgagcugaagugcuucgggaacaccgccaucgccaagugcaacgagaagcacgacgaggaguucugcgacaugcuccgccuguucgacuucaacaagcaggcgaucaagcggcugaaggcccccgcccagauguccauccagcucaucaacaaggccgugaacgcccugaucaacgaccagcugaucaugaagaaccaccuccgcgacaucaugugcaucccguacugcaacuacagcaaguacugguaccugaacaacacggugaccgggaaguccagccugcccaagugcuggcucgucuccaacggcagcuaccugaacgagacccacuucuccgacgacaucgagcagcaggcggacaacaugaucaccgagaugcugcagaaggaguacauggaccggcagggcaagacgccccucgggcugguggaccuguucguguucagcaccuccuucuaccucaucagcaucuuccugcaccuggucaagaucccgacccaccgccacaucaccggcaagcccugccccaagccccaccggcugaaccacauggggaucugcuccugcggccucuacaagcagccgggggugcccgugaaguggaagcgcuga

SEQ ID NO: 4329 - RNA, 1476 nt, Artificial Sequence
  derived and/or modified protein sequence (opt1) from LASV(Josiah;Clade IV)__NP_694870__GPCstabilized
augggccagaucgugaccuucuuccaggaggucccccacgugaucgaggaggugaugaacaucguccugaucgcccucagcgugcuggccgugcugaaggggcucuacaacuucgcgaccugcggccuggucgggcuggugacguuccuccugcugugcggccgcuccugcaccaccagccucuacaaggggguguacgagcugcagacccuggagcucaacauggagacgcugaacaugaccaugccgcuguccugcaccaagaacaacagccaccacuacaucauggucggcaacgagaccggccucgagcugacgcugaccaacaccuccaucaucaaccacaaguucugcaaccucagcgacgcccacaagaagaaccuguacgaccacgcccugauguccaucaucagcaccuuccaccucuccauccccaacuucaaccaguacgaggccaugagcugcgacuucaacgggggcaagaucuccgugcaguacaaccugagccacuccuacgccggggacgcggccaaccacugcggcacgguggccaacgggguccugcagaccuucaugcggauggccuggggcggcagcuacaucgcgcucgacuccgggugcggcaacugggacugcaucaugaccagcuaccaguaccugaucauccagaacaccacgugggaggaccacugccaguucucccgccccagccccaucggguaccugggccuccugucccagcggacccgcgacaucuacaucagccggcgccggcgcggcaccuucaccuggacgcugagcgacuccgaggggaaggacaccccgggcggguacugccucacccgguggaugcugaucgaggccgagcugaagugcuucggcaacaccgccguggccaagugcaacgagaagcacgacgaggaguucugcgacaugcuccgccuguucgacuucaacaagcaggccauccagcggcugaaggcgcccgcccagaugagcauccagcucaucaacaaggccgugaacgcccugaucaacgaccagcugaucaugaagaaccaccuccgcgacaucaugugcauccccuacugcaacuacuccaaguacugguaccugaaccacacgaccaccgggcggaccagccugcccaagugcuggcucgucuccaacggcagcuaccugaacgagacgcacuucuccgacgacaucgagcagcaggccgacaacaugaucaccgagaugcugcagaaggaguacauggagcgccagggcaagaccccgcucgggcugguggaccuguucguguucagcaccuccuucuaccucaucagcaucuuccugcaccuggucaagauccccacgcaccggcacaucgugggcaaguccugccccaagccccaccgccugaaccacauggggaucugcagcugcggccucuacaagcagccgggggugcccgucaaguggaagcgguga

SEQ ID NO: 4330 - RNA, 1473 nt, Artificial Sequence
  derived and/or modified protein sequence (opt1) from LASV(LP;Clade I)__AAF86701__GPCstabilized
augggccagaucaucaccuucuuccaggaggugccccacgucaucgaggaggugaugaacaucgugcugaucgcccucagccugcuggccauccucaaggggcuguacaacaucgcgaccugcggcaucaucgggcuggucgccuuccucuuccugugcggcaaguccugcagccugacgcucaagggcggguacgagcugcagacccuggagcucaacauggagacccugaacaugaccaugccgcuguccugcacgaagaacagcucccaccacuacauccgcgugggcaacgagaccgggcucgagcugacccugaccaacacgagcaucaucaaccacaaguucugcaaccucuccgacgcccacaagaagaaccuguacgaccacgcccugaugagcaucaucuccaccuuccaccucagcauccccaacuucaaccaguacgaggccauguccugcgacuucaacggcgggaagaucagcgugcaguacaaccugucccacagcuacgcgggcgacgccgccgagcacugcgggaccgucgccaacggcgugcugcagaccuucaugcggauggcguggggcgggcgcuacaucgcccucgacuccggcugcgggaacugggacugcaucaugacgagcuaccaguaccugaucauccagaacaccaccugggaggaccacugccaguucucccggcccagccccaucggcuaccugggccuccugucccagcgcacccgggacaucuacaucagccgccggcgccgggggacguucaccuggacccugagcgacuccgagggcaacgagacccccgggggcuacugccucacgcgcuggaugcugaucgaggccgagcugaagugcuucgggaacaccgccguggccaagugcaacgagaagcacgacgaggaguucugcgacaugcuccggcuguucgacuucaacaagcaggcgauccgccggcugaaggccccggcccagaugagcauccagcucaucaacaaggccgucaacgcccugaucaacgaccagcugaucaugaagaaccaccuccgcgacaucaugugcauccccuacugcaacuacuccaaguacugguaccugaaccacaccagcuccggccggaccagccugcccaagugcuggcucaucuccaacggcagcuaccugaacgagacgcaguucuccgacgacaucgagcagcaggcggacaacaugaucaccgagaugcugcagaaggaguacaucgagcgccaggggaagaccccgcucggccugguggacaucuucaucuucagcaccuccuucuaccugaucagcaucuuccuccaccugaucaagauccccacgcaccggcacaucguggggaagcccugccccaagccgcaccgccugaaccacaugggcgucugcuccugcgggcuguacaagcaccccggcgugcccaccaaguggaagcgguga

SEQ ID NO: 4331 - RNA, 1473 nt, Artificial Sequence
  derived and/or modified protein sequence (opt1) from LASV(803213;Clade II)__AAF86703__GPCstabilized
augggccagaucaucaccuucuuccaggaggugccccacgucaucgaggaggugaugaacaucgugcugaucgcccucagccugcuggccauccucaaggggaucuacaacgucgcgaccugcggccuguucgggcugaucuccuuccuccugcugugcggccgcagcugcuccgugacguacaaggggguguacgagcuccagacccuggagcugaacauggccaaccucaacaugaccaugccgcugagcugcaccaagaacaacucccaccacuacaucauggucggcaacgagacgggccuggagcucacccugaccaacaccagcaucaucaaccacaaguucugcaaccuguccgacgcccacaagaagaaccucuacgaccacgcccugaugagcaucaucuccacguuccaccugagcauccccaacuucaaccaguacgaggccauguccugcgacuucaacgggggcaagaucagcgugcaguacaaccucucccacagcuucgcgguggacgccgccaaccacugcgggaccaucgccaacggcguccugcagaccuucaugcggauggcguggggcggguccuacaucgcccuggacagcggcugcgggaacugggacugcaucaugaccuccuaccaguaccucaucauccagaacacgaccugggaggaccacugccaguucagccgccccucccccaucggcuaccuggggcugcucagccagcggacccgcgacaucuacaucagccggcgccggcgcggcaccuucacguggacccuguccgacagcgagggcaacgaggcccccgggggcuacugccugacccgguggaugcucaucgaggccgagcugaagugcuucgggaacaccgccguggcgaagugcaacgagaagcacgacgaggaguucugcgacaugcugcgccucuucgacuucaacaagcaggccaucaagcggcugaagacgccggcccagauguccauccagcugaucaacaaggccgugaacgcccucaucaacgaccagcugaucaugaagaaccaccuccgcgacaucaugugcauccccuacugcaacuacagccgguacugguaccugaaccacaccgucaccggcaagaccucccugccccgcugcuggcuggugagcaacggguccuaccucaacgagacgcacuucagcgacgacaucgagcagcaggcggacaacaugaucaccgagaugcugcagaaggaguacauggaccggcagggcaagaccccgcugggccucguggaccuguucgucuucuccaccagcuucuaccugaucuccaucuuccuccaccuggugaagauccccacgcaccgccacaucguggggaagcccugccccaagccgcaccggcugaaccacaugggcaucugcagcugcgggcuguacaagcaccccggcguccccgugaaguggaagcgcuga

SEQ ID NO: 4332 - RNA, 1473 nt, Artificial Sequence
  derived and/or modified protein sequence (opt1) from LASV(GA391;Clade III)__CAA36645__GPCstabilized
augggccagaucgugaccuucuuccaggaggucccccacgugaucgaggaggugaugaacaucguccugaucgcccucagcauccuggccauccugaaggggcucuacaacguggcgaccugcggccugaucgggcuggugacguuccuccugcuguccggccgcagcugcucccucaucuacaaggggaccuacgagcugcagacccuggagcucaacauggagacccugaacaugacgaugccgcugagcugcaccaagaacaacucccaccacuacauccgggucggcaacgagaccggccucgagcugacccugacgaacaccagcauccucaaccacaaguucugcaaccuguccgacgcccacaagcgcaaccuguacgaccacagccucauguccaucaucagcaccuuccaccuguccauccccaacuucaaccaguacgaggccaugagcugcgacuucaacgggggcaagaucaccgugcaguacaaccugucccacagcuucgccguggacgccgcggggcacugcggcacgcucgccaacgggguccugcagaccuucaugcggauggccuggggcggcuccuacaucgcccuggacagcgggugcggcaacugggacugcaucaugaccuccuaccaguaccucaucauccagaacaccacgugggacgaccacugccaguucagccgccccucccccaucggguaccugggccugcucagccagcggacccgcgacaucuacaucagccggcgccggcgcggcaccuucaccuggacgcuguccgacagcgaggggaacgagaccccgggcggguacugccugacccgguggaugcucaucgaggcggagcugaagugcuucggcaacaccgccguggccaagugcaacgagaagcacgacgaggaguucugcgacaugcugcgccucuucgacuucaacaagcaggccauccggcgccugaagacgcccgcccagauguccauccagcugaucaacaaggcggugaacgcccucaucaacgaccagcugaucaugaagaaccaccuccgggacaucaugugcauccccuacugcaacuacagccgcuacugguaccugaaccacaccuccaccgggaagaccagccugccccggugcuggcugaucuccaacggcagcuaccucaacgagacgaaguucuccgacgacaucgagcagcaggccgacaacaugaucaccgagaugcugcagaaggaguacaucgaccgccagggcaagaccccgcuggggcucgucgaccuguucguguucagcaccuccuucuaccugaucagcaucuuccugcaccucgugaagauccccacgcaccggcacaucgucggcaagcccugccccaagccgcaccgccugaaccacauggggaucugcuccugcggccuguacaagcagcccggggugcccgugcgguggaagcgcuga

SEQ ID NO: 4333 - RNA, 1476 nt, Artificial Sequence
  derived and/or modified protein sequence (opt1) from LASV(AV;Clade V)__CCA30314__GPCstabilized
augggccagaucgugaccuucuuccaggaggucccccacgugaucgaggaggugaugaacaucguccugaucgcccucagcauccuggccgugcugaaggggcucuacaacaucgcgaccugcggccugaucgggcugaucacguuccuccugcugugcggccgcuccugcagcuccaaccucuacaaggggguguacgagcugcagagccuggaccucaacauggagacccugaacaugaccaugccgcuguccugcaccaagaacaacagccaccacuacauccgggucggcaacgacacgggccucgagcugacccugaccaacaccuccauccucaaccacaaguucugcaaccugagcgacgcccacaagaaggaccuguacgaccacgcccucauguccaucaucagcacguuccaccuguccauccccaacuucaaccaguacgaggccaugagcugcgacuucaacgggggcaagaucuccgugcaguacaaccugagccacuccuacgccaucgacgcggccaaccacugcgggaccguggccaacggcauccuccagaccuucaugcgcauggccuggggcgggagcuacaucgcgcuggacuccggcugcgggaacugggacugcaucaugaccagcuaccaguaccugaucauccagaacacgaccugggagaaccacugccaguucucccggcccagccccaucggcuaccucgggcugcugagccagcgcacccgggacaucuacaucucccgccggcgccggggcaccuucacguggacccucagcgacuccgagggcaacgccacccccgggggcuacugccugacccgcuggaugcugaucgaggccgagcucaagugcuucgggaacacggccgucgccaagugcaacgagaagcacgacgaggaguucugcgacaugcugcggcuguucgacuucaacaagcaggcgaucagccgccucaaguccccggcccagaugagcauccagcugaucaacaaggccgugaacgcccugaucaacgaccagcucaucaugaagaaccaccuccgggacaucaugugcauccccuacugcaacuacuccaaguacugguaccugaaccacaccaucaccggcaagaccagccugcccaagugcuggcugguguccaacgggagcuaccugaacgagacgcacuucuccgacgacaucgagcagcaggccgacaacaugaucaccgagaugcuccagaaggaguacauggagcgccagggcaagaccccgcugggccuggucgaccucuucguguucagcaccuccuucuaccugaucagcaucuuccugcggcuggugaagauccccacgcaccgccacaucgucgggaagcccugccccaagccgcaccggcucaaccacaugggcaucugcuccugcgggcuguacaagcagcccggcgugcccgugcgcuggaagcgguga

SEQ ID NO: 4334 - RNA, 1473 nt, Artificial Sequence
  derived and/or modified protein sequence (opt1) from LASV(Togo/2016/7082;Clade VI)__AMR44577__GPCstabilized
augggccagaucaucaccuucuuccaggaggugccccacgucaucgaggaggugaugaacaucgugcugaucgcccucagccugcuggccauccucaagggggucuacaacguggcgaccugcggcaucaucgggcuggugacguuccuguuccucugcggccgcuccugcagccugaucuacaagggguccuacgagcugcagacccucgagcugaacauggagacccugaacaugaccaugccgcucagcugcacgaagaacuccagccaccacuacauccgggucggcaacgagaccggccuggagcugacccucaccaacacguccaucaucaaccacaaguucugcaaccugagcgacgcccacaagcgcaaccuguacgaccacgcccucauguccauccugagcaccuuccaccuguccauccccaacuucaaccaguacgaggccaugagcugcgacuucaacgggggcaagaucuccgugcaguacaaccucagccacgccuacgcgguggacgccgccgagcacugcgggaccgucgccaacggcgugcugcagaccuucaugcggauggcguggggcggguccuacaucgcccuggacagcggcugcgggaacugggacugcaucaugacguccuaccaguaccucaucauccagaacaccaccugggaggaccacugccaguucagccgccccucccccaucggcuaccuggggcugcucagccagcggacccgcgacaucuacaucagccggcgccggcgcggcacguucaccuggacccuguccgacagcgagggcaacgagacccccgggggcuacugccugacgcgguggaugcucaucgaggccgagcugaagugcuucgggaacaccgccguggccaagugcaacgagaagcacgacgaggaguucugcgacaugcugcgccucuucgacuucaacaagcaggcgauccagcggcugaaguccccggcccagaugagcauccagcugaucaacaaggccgucaacgcccucaucaacgaccagcugaucaugaagaaccaccuccgcgacaugaugugcauccccuacugcaacuacuccaaguacugguaccugaaccacaccagcuccggccggaccagccugcccaagugcuggcugguguccaacgggagcuaccucaacgagacgcacuucuccgacgacaucgagcagcaggccgacaacaugaucaccgagaugcugcagaaggaguacaucgaccgccagggcaagaccccgcugggccucguggaccuguucgucuucagcaccuccuucuaccugaucagcaucuuccuccaccugaucaagauccccacgcaccggcacaucguggggaagcccugccccaagccgcaccgccugaaccacaugggcaucugcuccugcgggcuguacaagcagcccggcgugcccacccgguggaagcgcuga

SEQ ID NO: 4335 - RNA, 1473 nt, Artificial Sequence
  derived and/or modified protein sequence (opt1) from LASV(KAK-428;Clade n.d. (VII))__ANH09740__GPCstabilized
augggccagaucgugaccuucuuccaggaggucccccacgugaucgaggaggugaugaacaucguccugaucgcccucagccugcuggccauccucaaggggcuguacaacuucgcgaccugcggcgugaucgggcugaucacguuccuccugcugugcggccgcuccugcagcgccaccuacaaggggcaguacgagcuccagacccuggagcugaacauggagucccucaacaugaccaugccgcugagcugcacgaagaacaacucccaccacuacauccgggccggcaacaacaccggccuggagcucacccugaccaacacgagcaucaucucccacaaguucugcaaccugagcgacgcccacaagaagaaccucuacgaccacacccugauguccaucaucaccaccuuccaccugagcauccccaacuucaaccaguacgaggccauguccugcgacuucaacgggggcaagaucagcauccaguacaaccucucccacagcuacgcgggggacgccgcccagcacugcggcacgguggccaacgggguccugcagaccuucaugcgcauggcguggggcggcuccuaccuggcccucgacagcgggugccggggcugggacugcaucaucuccagcuaccaguaccugaucauccagaacaccaccugggacgaccacugccaguucucccgccccagccccaucggguaccugggcuucgugagccagaagacgcgggacaucuacaucucccgccggcgccggggcaccuucaccuggacccucagcgacuccgaggggcacgacaugccgggcggguacugccugacgcgcuggaugcugaucgaggccgaccucaagugcuucggcaacaccgccguggccaagugcaacgagaagcacgacgaggaguucugcgacauguggcggcuguucgacuucaacaagcaggcgauccagcgccugaaggcccccgcccagaugaacauccagcucaucaacaaggccgucaacgcccugaucaacgaccagcugaugaugaagaaccaccuccgggacaucaugugcauccccuacugcaacuacagcaaguucugguaccugaacaacaccaccacggggcgcaccucccugccccggugcuggcucaucagcaacggcuccuaccugaacgagacccacuucagcgacgacaucgagcagcaggcggacaacaugaucaccgagaugcugcagaaggaguacauggaccgccagggcaagacgccgcucgggcugguggaccuguucguguucuccaccagcuucuaccucaucaccaucuuccugcaccuggucaagauccccacccaccggcacaucgugggcaagcccugccccaagccgcaccgccucaaccacauggggaucugcuccugcggccuguacaagcagcccggggugcccguccgguggaagcgcuga

SEQ ID NO: 4336 - RNA, 1473 nt, Artificial Sequence
  derived and/or modified protein sequence (opt1) from LASV(Acar 3080;Clade I)__AAT49014__GPCstabilized
augggccagaucaucaccuucuuccaggaggugccccacgucaucgaggaggugaugaacaucgugcugaucgcccucagccugcuggccauccucaaggggcuguacaacaucgcgaccugcggcaucaucgggcuggucgccuuccucuuccugugcggcaaguccugcagccugacgcucaagggcggguacgagcugcagacccuggagcucaacauggagacccugaacaugaccaugccgcuguccugcacgaagaacagcucccaccacuacauccgcgugggcaacgagaccgggcucgagcugacccugaccaacacgagcaucaucaaccacaaguucugcaaccucuccgacgcccacaagaagaaccuguacgaccacgcccugaugagcaucaucuccaccuuccaccucagcauccccaacuucaaccaguacgaggccauguccugcgacuucaacggcgggaagaucagcgugcaguacaaccugucccacagcuacgcgggcgacgccgccgagcacugcgggaccgucgccaacggcgugcugcagaccuucaugcggauggcguggggcgggcgcuacaucgcccucgacuccggcugcgggaacugggacugcaucaugacgagcuaccaguaccugaucauccagaacaccaccugggaggaccacugccaguucucccggcccagccccaucggcuaccugggccuccugucccagcgcacccgggacaucuacaucagccgccggcgccgggggacguucaccuggacccugagcgacuccgagggcaacgagacccccgggggcuacugccucacgcgcuggaugcugaucgaggccgagcugaagugcuucgggaacaccgccguggccaagugcaacgagaagcacgacgaggaguucugcgacaugcuccggcuguucgacuucaacaagcaggcgauccgccggcugaaggccccggcccagaugagcauccagcucaucaacaaggccgucaacgcccugaucaacgaccagcugaucaugaagaaccaccuccgcgacaucaugugcauccccuacugcaacuacuccaaguacugguaccugaaccacaccagcuccggccggaccagccugcccaagugcuggcucaucuccaacggcagcuaccugaacgagacgcaguucuccgacgacaucgagcagcaggcggaccacaugaucaccgagaugcugcagaaggaguacaucgagcgccaggggaagaccccgcucggccugguggacaucuucaucuucagcaccuccuucuaccugaucagcaucuuccuccaccugaucaagauccccacgcaccggcacaucguggggaagcccugccccaagccgcaccgccugaaccacaugggcgucugcuccugcgggcuguacaagcaccccggcgugcccaccaaguggaagcgguga

SEQ ID NO: 4337 - RNA, 1473 nt, Artificial Sequence; identical to SEQ ID NO: 4330
  derived and/or modified protein sequence (opt1) from LASV(Pinneo-NIG-1969;Clade I)__AIT17836__GPCstabilized

SEQ ID NO: 4338 - RNA, 1473 nt, Artificial Sequence
  derived and/or modified protein sequence (opt1) from LASV(ISTH0009-NIG-2011;Clade II)__AIT17404__GPCstabilized
augggccagaucaucaccuucuuccaggaggugccccacgucaucgaggaggugaugaacaucgugcugaucgcccucagccugcuggccauccucaaggggaucuacaacgucgcgaccugcggccuguucgggcugguguccuuccuccugcugugcggccgcagcugcuccacgaccuacaaggggguguacgagcuccagacccuggagcuggacauggccagccucaacaugaccaugccgcuguccugcacgaagaacaacagccaccacuacaucauggucggcaacgagaccggccuggagcucacccugaccaacacguccaucaucaaccacaaguucugcaaccugagcgacgcccacaagaagaaccucuacgaccacgcccugauguccaucaucagcaccuuccaccuguccauccccaacuucaaccaguacgaggccaugagcugcgacuucaacgggggcaagaucuccgugcaguacaaccucagccacgcguacgccguggacgccgccaaccacugcgggaccaucgcgaacggcguccugcagaccuucaugcggauggccuggggcggguccuacaucgcccuggacagcggcugcggguccugggacugcaucaugacgagcuaccaguaccucaucauccagaacaccaccugggaggaccacugccaguucucccgccccagccccaucggcuaccuggggcugcucagccagcggacccgcgacaucuacaucucccggcgccggcgcggcacguucaccuggacccugagcgacuccgagggcaacgagacccccgggggcuacugccugacgcgguggaugcucaucgaggccgagcugaagugcuucgggaacaccgccguggcgaagugcaacgagaagcacgacgaggaguucugcgacaugcugcgccucuucgacuucaacaagcaggccauccggcgccugaagaccccggcccagaugagcauccagcugaucaacaaggccgugaacgcccucaucaacgaccagcugaucaugaagaaccaccuccgggacaucaugugcauccccuacugcaacuacuccaaguacugguaccugaaccacaccgucacgggcaagaccagccugccccgcugcuggcugguguccaacgggagcuaccucaacgagacccacuucuccgacgacaucgagcagcaggcggacaacaugaucaccgagcugcugcagaaggaguacauggaccggcagggcaagacgccgcucggccugguggaccuguucgucuucagcaccuccuucuaccucaucagcaucuuccugcaccugaucaagauccccacccaccgccacaucaccgggaagcccugccccaagccgcaccggcugaaccacaugggcaucugcuccugcgggcucuacaagcaccccggcgugcccgugaaguggaagcgcuga

SEQ ID NO: 4339 - RNA, 1473 nt, Artificial Sequence
  derived and/or modified protein sequence (opt1) from LASV(ISTH0012-NIG-2011;Clade II)__AIT17408__GPCstabilized
augggccagaucaucaccuucuuccaggaggugccccacgucaucgaggaggugaugaacaucgugcugaucgcccucagccugcuggccauccucaaggggaucuacaacgucgcgaccugcggccuguucgggcugguguccuuccuccugcugugcggccgcagcugcuccacgaccuacaaggggguguacgagcuccagacccuggagcuggacauggccagccucaacaugaccaugccgcuguccugcacgaagaacaacagccaccacuacaucauggucggcaacgagaccggccuggagcucacccugaccaacacguccaucaucaaccacaaguucugcaaccugagcgacgcccacaagaagaaccucuacgaccacgcccugauguccaucaucagcaccuuccaccuguccauccccaacuucaaccaguacgaggccaugagcugcgacuucaacgggggcaagaucuccgugcaguacaaccucagccacaccuacgcgguggacgccgccaaccacugcgggaccgucgccaacggcgugcugcagacguucaugcggauggcguggggcggguccuacaucgcccuggacagcggcugcggguccugggacugcaucaugaccagcuaccaguaccucaucauccagaacaccaccugggaggaccacugccaguucucccgccccagccccaucggcuaccuggggcugcucagccagcggacgcgcgacaucuacaucucccggcgccggcgcggcaccuucaccuggacccugagcgacuccgagggcaacgagacgcccgggggcuacugccugacccgguggaugcucaucgaggccgagcugaagugcuucgggaacaccgccguggccaagugcaacgagaagcacgacgaggaguucugcgacaugcugcgccucuucgacuucaacaagcaggcgauccggcgccugaagaccccggcccagaugagcauccagcugaucaacaaggccgucaacgcccucaucaacgaccagcugaucaugaagaaccaccuccgggacaucaugugcauccccuacugcaacuacuccaaguacugguaccugaaccacacggugaccggcaagaccagccugccccgcugcuggcugguguccaacgggagcuaccucaacgagacccacuucuccgacgacaucgagcagcaggccgacaacaugaucacggagcugcugcagaaggaguacauggaccggcagggcaagaccccgcucggccuggucgaccuguucguguucagcaccuccuucuaccucaucagcaucuuccugcaccuggugaagauccccacccaccgccacgucaucgggaagcccugccccaagccgcaccggcugaaccacaugggcaucugcuccugcgggcucuacaagcaccccggcgugcccgugaaguggaagcgcuga

SEQ ID NO: 4340 - RNA, 1473 nt, Artificial Sequence
  derived and/or modified protein sequence (opt1) from LASV(ISTH0047-NIG-2011;Clade II)__AIT17412__GPCstabilized
augggccagaucaucaccuucuuccaggaggugccccacgucaucgaggaggugaugaacaucgugcugaucgcccucagccugcuggccauccucaaggggaucuacaacgucgcgaccugcggccuguucgggcugguguccuuccuccugcugugcggccgcagcugcuccacgaccuacaaggggguguacgagcuccagacccuggagcuggacauggccagccucaacaugaccaugccgcuguccugcacgaagaacaacagccaccacuacaucauggucggcaacgagaccggccuggagcucacccugaccaacacguccaucaucaaccacaaguucugcaaccugagcgacgcccacaagaagaaccucuacgaccacgcccugauguccaucaucagcaccuuccaccuguccauccccaacuucaaccaguacgaggccaugagcugcgacuucaacgggggcaagaucuccgugcaguacaaccucagccacgcguacgccguggacgccgccaaccacugcgggaccaucgcgaacggcguccugcagaccuucaugcggauggccuggggcggguccuacaucgcccuggacagcggcugcggguccugggacugcaucaugacgagcuaccaguaccucaucauccagaacaccuccugggaggaccacugccaguucagccgccccagccccaucggcuaccuggggcugcucucccagcggacccgcgacaucuacaucagccggcgccggcgcggcaccuucacguggacccuguccgacagcgagggcaacgagacccccgggggcuacugccugacccgguggaugcucaucgaggccgagcugaagugcuucgggaacacggccguggcgaagugcaacgagaagcacgacgaggaguucugcgacaugcugcgccucuucgacuucaacaagcaggccauccggcgccugaagaccccggcccagauguccauccagcugaucaacaaggccgugaacgcccucaucaacgaccagcugaucaugaagaaccaccuccgggacaucaugugcauccccuacugcaacuacagcaaguacugguaccugaaccacaccgucaccggcaagacgucccugccccgcugcuggcuggugagcaacggguccuaccucaacgagacccacuucagcgacgacaucgagcagcaggcggacaacaugaucaccgagcugcugcagaaggaguacaucgaccggcagggcaagaccccgcucggccugguggaccuguucgucuucuccacgagcuucuaccucaucuccaucuuccugcaccuggugaagauccccacccaccgccacgugaucgggaagcccugccccaagccgcaccggcugaaccacaugggcaucugcagcugcgggcucuacaagcaccccggcguccccgugaaguggaagcgcuga

SEQ ID NO: 4341 - RNA, 1473 nt, Artificial Sequence
  derived and/or modified protein sequence (opt1) from LASV(ISTH0073-NIG-2011;Clade II)__AIT17416__GPCstabilized
augggccagaucaucaccuucuuccaggaggugccccacgucaucgaggaggugaugaacaucgugcugaucgcccucagccugcuggccauccucaaggggaucuacaacgucgcgaccugcggccuguucgggcugguguccuuccuccugcugugcggccgcagcugcuccacgaccuacaaggggguguacgagcuccagacccuggagcuggacauggccagccucaacaugaccaugccgcuguccugcacgaagaacaacagccaccacuacaucauggucggcaacgagaccggccuggagcucacccugaccaacacguccaucaucaaccacaaguucugcaaccugagcgacgcccaccggaagaaccucuacgaccacgcccugauguccaucaucagcaccuuccaccuguccauccccaacuucaaccaguacgaggccaugagcugcgacuucaacgggggcaagaucuccgugcaguacaaccucagccacgcguacgccguggacgccgccaaccacugcgggaccaucgcgaacggcguccugcagaccuucaugcgcauggccuggggcggguccuacaucgcccuggacagcggcugcggguccugggacugcaucaugacgagcuaccaguaccucaucauccagaacaccuccugggaggaccacugccaguucagccggcccagccccaucggcuaccuggggcugcucucccagcgcacccgggacaucuacaucagccgccggcgccggggcaccuucacguggacccuguccgacagcgagggcaacgagacccccgggggcuacugccugacccgcuggaugcucaucgaggccgagcugaagugcuucgggaacacggccguggcgaagugcaacgagaagcacgacgaggaguucugcgacaugcugcggcuguucgacuucaacaagcaggccauccgccggcugaagaccccggcccagauguccauccagcugaucaacaaggccgugaacgcccucaucaacgaccagcugaucaugaagaaccaccuccgcgacaucaugugcauccccuacugcaacuacagcaaguacugguaccucaaccacaccgucaccggcaagacgucccugccccggugcuggcuggugagcaacggguccuaccucaacgagacccacuucagcgacgacaucgagcagcaggcggacaacaugaucaccgagcugcugcagaaggaguacaucgaccgccagggcaagaccccgcucggccugguggaccuguucgucuucuccacgagcuucuaccucaucuccaucuuccugcaccuggugaagauccccacccaccggcacgugaucgggaagcccugccccaagccgcaccgccugaaccacaugggcaucugcagcugcgggcucuacaagcaccccggcguccccgugaaguggaagcgguga

SEQ ID NO: 4342 - RNA, 1473 nt, Artificial Sequence
  derived and/or modified protein sequence (opt1) from LASV(ISTH0230-NIG-2011;Clade II)__AIT17420__GPCstabilized
augggccagaucaucaccuucuuccaggaggugccccacgucaucgaggaggugaugaacaucgugcugaucgcccucagccugcuggccauccucaaggggaucuacaacgucgcgaccugcggccuguucgggcugguguccuuccuccugcugugcggccgcagcugcuccacgaccuacaaggggguguacgagcuccagacccuggagcuggacauggccagccucaacaugaccaugccgcuguccugcacgaagaacaacagccaccacuacaucauggucggcaacgagaccggccuggagcucacccugaccaacacguccaucaucaaccacaaguucugcaaccugagcgacgcccacaagaagaaccucuacgaccacgcccugauguccaucaucagcaccuuccaccuguccauccccaacuucaaccaguacgaggccaugagcugcgacuucaacgggggcaagaucuccgugcaguacaaccucagccacaccuacgcgguggacgccgccaaccacugcgggaccaucgccaacggcguccugcagacguucaugcggauggcguggggcggguccuacaucgcccuggacagcggcugcggguccugggacugcaucaugaccagcuaccaguaccucaucauccagaacaccaccugggaggaccacugccaguucucccgccccagccccaucggcuaccuggggcugcucagccagcggacgcgcgacaucuacaucucccggcgccggcgcggcaccuucaccuggacccugagcgacuccgagggcaacgagacgcccgggggcuacugccugacccgguggaugcucaucgaggccgagcugaagugcuucgggaacaccgccguggccaagugcaacgagaagcacgacgaggaguucugcgacaugcugcgccucuucgacuucaacaagcaggcgauccggcgccugaagaccccggcccagaugagcauccagcugaucaacaaggccgugaacgcccucaucaacgaccagcugaucaugaagaaccaccuccgggacaucaugugcauccccuacugcaacuacuccaaguacugguaccugaaccacacggucaccggcaagaccagccugccccgcugcuggcugguguccaacgggagcuaccucaacgagacccacuucuccgacgacaucgagcagcaggccgacaacaugaucacggagcugcugcagaaggaguacauggaccggcagggcaagaccccgcucggccugguggaccuguucgucuucagcaccuccuucuaccucaucagcaucuuccugcaccugaucaagauccccacccaccgccacaucacggggaagcccugccccaagccgcaccggcugaaccacaugggcaucugcuccugcgggcucuacaagcaccccggcgugcccgugaaguggaagcgcuga

SEQ ID NO: 4343 - RNA, 1473 nt, Artificial Sequence
  derived and/or modified protein sequence (opt1) from LASV(ISTH0531-NIG-2011;Clade II)__AIT17424__GPCstabilized
augggccagaucaucaccuucuuccaggaggugccccacgucaucgaggaggugaugaacaucgugcugaucgcccucagccugcuggccauccucaaggggaucuacaacgucgcgaccugcggccuguucgggcugguguccuuccuccugcugugcggccgcagcugcuccacgaccuacaaggggguguacgagcuccagacccuggagcuggacaugaccaaccucaacaugacgaugccgcugagcugcaccaagaacaacucccaccacuacaucauggucggcaacgagaccggccuggagcucacccugacgaacaccagcaucaucaaccacaaguucugcaaccuguccgacgcccacaagaagaaccucuacaaccacgcccugaugagcaucaucuccaccuuccaccugagcauccccaacuucaaccaguacgaggccauguccugcgacuucaacgggggcaagaucagcgugcaguacaaccucucccacgccuacgcgguggacgccgccaaccacugcgggaccaucgccaacggcguccugcagacguucaugcggauggcguggggcgggagcuacaucgcccuggacuccggcugcgggagcugggacugcaucaugaccuccuaccaguaccucaucauccagaacaccaccugggaggaccacugccaguucagccgccccucccccaucggcuaccuggggcugcucagccagcggacgcgcgacaucuacaucagccggcgccggcgcggcaccuucaccuggacccuguccgacagcgagggcaacgagacgcccgggggcuacugccugacccgguggaugcucaucgaggccgagcugaagugcuucgggaacaccgccguggccaagugcaacgagaagcacgacgaggaguucugcgacaugcugcgccucuucgacuucaacaagcaggcgauccggcgccugaagaccccggcccagacgaacauccagcugaucaacaaggccgugaacgcccucaucaacgaccagcugaucaugaagaaccaccuccgggacaucaugugcauccccuacugcaacuacuccaaguacugguaccugaaccacaccgucaccggcaagaccagccugccccgcugcuggcugguguccaacgggagcuaccucaacgagacgcacuucuccgacgacaucgagcagcaggccgacaacaugaucaccgagcugcugcagaaggaguacauggaccggcagggcaagaccccgcucggccugguggaccuguucgucuucagcaccuccuucuaccucaucagcaucuuccugcaccuggugaagauccccacgcaccgccacaucaucgggaagcccugccccaagccgcaccggcugaaccacaugggcaucugcuccugcgggcucuacaagcaccccggcgugcccgucaaguggaagcgcuga

SEQ ID NO: 4344 - RNA, 1473 nt, Artificial Sequence
  derived and/or modified protein sequence (opt1) from LASV(ISTH0595-NIG-2011;Clade II)__AIT17428__GPCstabilized
augggccagaucaucaccuucuuccaggaggugccccacgucaucgaggaggugaugaacaucgugcugaucgcccucagccugcuggccauccucaaggggaucuacaacgucgcgaccugcggccuguucgggcugguguccuuccuccugcugugcggccgcagcugcuccacgaccuacaaggggguguacgagcuccagacccuggagcuggacauggccagccucaacaugaccaugccgcuguccugcacgaagaacaacagccaccacuacaucauggucggcaacgagaccggccuggagcucacccugaccaacacguccaucaucaaccacaaguucugcaaccugagcgacgcccacaagaagaaccucuacgaccacgcccugauguccaucaucagcaccuuccaccuguccauccccaacuucaaccaguacgaggccaugagcugcgacuucaacgggggcaagaucuccgugcaguacaaccucagccacaccuacgcgguggacgccgccaaccacugcgggaccaucgccaacggcguccugcagacguucaugcggauggcguggggcggguccuacaucgcccuggacagcggcugcggguccugggacugcaucaugaccagcuaccaguaccucaucauccagaacaccaccugggaggaccacugccaguucucccgccccagccccaucggcuaccuggggcugcucagccagcggacgcgcgacaucuacaucucccggcgccggcgcggcaccuucaccuggacccugagcgacuccgagggcaacgagacgcccgggggcuacugccugacccgguggaugcucaucgccgccgaccugaagugcuucgggaacaccgccguggcgaagugcaacgagaagcacgacgaggaguucugcgacaugcugcgccucuucgacuucaacaagcaggccaucgagcggcugaagaccccggcccagaugagcauccagcugaucaacaaggccgugaacgcccucaucaacgaccagcugaucaugaagaaccaccuccgcgacaucaugugcauccccuacugcaacuacuccaaguacugguaccugaaccacacggucaccggccggaccagccugccccgcugcuggcugguguccaacgggagcuaccucaacgagacccacuucuccgacgacaucgagcagcaggcggacaacaugaucacggagcugcugcagaaggaguacauggaccggcagggcaagaccccgcucggccugguggaccuguucgucuucagcaccuccuucuaccucaucagcaucuuccugcaccuggugcgcauccccacccaccggcacgugaucgggaagcccugccccaagccgcaccgccugaaccacaugggcaucugcuccugcgggcucuacaagcaccccggcguccccgugaaguggaagcgguga

SEQ ID NO: 4345 - RNA, 1473 nt, Artificial Sequence
  derived and/or modified protein sequence (opt1) from LASV(ISTH0964-NIG-2011;Clade II)__AIT17430__GPCstabilized
augggccagaucaucaccuucuuccaggaggugccccacgucaucgaggaggugaugaacaucgugcugaucgcccucagccugcuggccauccucaaggggaucuacaacgucgcgaccugcggccuguucgggcugguguccuuccuccugcugugcggccgcagcugcuccacgaccuacaaggggguguacgagcuccagacccuggagcuggacauggccagccucaacaugaccaugccgcuguccugcacgaagaacaacagccaccacuacaucauggucggcaacgagaccggccuggagcucacccugaccaacacguccaucaucaaccacaaguucugcaaccugagcgacgcccacaagaagaaccucuacgaccacgcccugauguccaucaucagcaccuuccaccuguccauccccaacuucaaccaguacgaggccaugagcugcgacuucaacgggggccggaucuccgugcaguacaaccucagccacaccuacgcgguggacgccgccaagcacugcgggaccaucgccaacggcguccugcagacguucaugcgcauggcguggggcggguccuacaucgcccuggacagcggcugcggguccugggacugcaucaugaccagcuaccaguaccucaucauccagaacaccaccugggaggaccacugccaguucucccggcccagccccaucggcuaccuggggcugcucagccagcgcacgcgggacaucuacaucucccgccggcgccggggcaccuucaccuggacccugagcgacuccgagggcaacgagacgcccgggggcuacugccugacccgcuggaugcucaucgaggccgagcugaagugcuucgggaacaccgccguggccaagugcaacgagaagcacgacgaggaguucugcgacaugcugcggcuguucgacuucaacaagcaggcgauccgccggcugaagaccccggcccagaugagcauccagcugaucaacaaggccgugaacgcccucaucaacgaccagcugaucaugaagaaccaccuccgcgacaucaugugcauccccuacugcaacuacuccaaguacugguaccucaaccacacggucaccggcaagaccagccugccccggugcuggcugguguccaacgggagcuaccucaacgagacccacuucuccgacgacaucgagcagcaggccgacaacaugaucacggagcugcugcagaaggaguacaucgaccgccagggcaagaccccgcucggccugguggaccuguucgucuucagcaccuccuucuaccucaucagcaucuuccugcaccuggugaagauccccacccaccggcacgugaucgggaagcccugccccaagccgcaccgccugaaccacaugggcaucugcuccugcgggcucuacaagcaccccggcguccccgugaaguggaagcgguga

SEQ ID NO: 4346 - RNA, 1473 nt, Artificial Sequence
  derived and/or modified protein sequence (opt1) from LASV(ISTH1038-NIG-2011;Clade II)__AIT17438__GPCstabilized
augggccagaucaucaccuucuuccaggaggugccccacgucaucgaggaggugaugaacaucgugcugaucgcccucagccugcuggccauccucaaggggaucuacaacgucgcgaccugcggccuguucgggcugguguccuuccuccugcugugcggccgcagcugcuccacgaccuacaaggggguguacgagcuccagacccuggagcuggacauggccaaccucaacaugaccaugccgcugagcugcacgaagaacaacucccaccacuacauccgggucggcaacgagaccggccuggagcucacccugaccaacacgagcaucaucucccacaaguucugcaaccugagcgacgcccacaagaagaaccucuacgaccacgcccugauguccaucaucagcaccuuccaccuguccauccccaacuucaaccaguacgaggccaugagcugcgacuucaacgggggcaagaucuccgugcaguacaaccucagccacaccuacgcgguggacgccgccaaccacugcgggaccaucgccaacggcguccugcagacguucaugcgcauggcguggggcggguccuacaucgcccuggacagcggcugcggguccugggacugcaucaugaccagcuaccaguaccucaucauccagaacaccaccugggaggaccacugccaguucucccggcccagccccaucggcuaccuggggcugcucagccagcgcacgcgggacaucuacaucucccgccggcgccggggcaccuucaccuggacccugagcgacuccgagggcaaggagacgcccgggggcuacugccugacccgcuggaugcucaucgaggccgagcugaagugcuucgggaacaccgccguggccaagugcaacgagaagcacgacgaggaguucugcgacaugcugcggcuguucgacuucaacaagcaggcgauccgccggcugaagaccccggcccagaugaacauccagcugaucaacaaggccgugaacgcccucaucaacgaccagcugaucaugaagaaccaccuccgcgacaucaugugcauccccuacugcaacuacagcaaguacugguaccucaaccacacggucaccggcaagaccucccugccccggugcuggcuggugagcaacggguccuaccucaacgagacccacuucagcgacgacaucgagcagcaggccgacaacaugaucacggagcugcugcagaaggaguacaucgaccgccagggcaagaccccgcucggccugguggaccuguucgucuucuccaccagcuucuaccucaucuccaucuuccugcaccuggugaagauccccacccaccggcacgugaucgggaagcccugccccaagccgcaccgccugaaccagaugggcaucugcagcugcgggcucuacaagcagcccggcguccccgugaaguggaagcgguga

SEQ ID NO: 4347 - RNA, 1473 nt, Artificial Sequence
  derived and/or modified protein sequence (opt1) from LASV(ISTH1048-NIG-2011;Clade II)__AIT17442__GPCstabilized
augggccagaucaucaccuucuuccaggaggugccccacgucaucgaggaggugaugaacaucgugcugaucgcccucagccugcuggccauccucaaggggaucuacaacgucgcgaccugcggccuguucgggcugguguccuuccuccugcugugcggccgcagcugcuccacgaccuacaaggggguguacgagcuccagacccuggagcuggacauggccagccucaacaugaccaugccgcuguccugcacgaagaacaacagccaccacuacaucauggucggcaacgagaccggccuggagcucacccugaccaacacguccaucaucaaccacaaguucugcaaccugagcgacgcccaccggaagaaccucuacgaccacgcccugauguccaucaucagcaccuuccaccuguccauccccaacuucaaccaguacgaggccaugagcugcgacuucaacgggggcaagaucuccgugcaguacaaccucagccacgcguacgccguggacgccgccaaccacugcgggaccaucgcgaacggcguccugcagaccuucaugcgcauggccuggggcggguccuacaucgcccuggacagcggcugcggguccugggacugcaucaugacgagcuaccaguaccucaucauccagaacaccuccugggaggaccacugccaguucagccggcccagccccaucggcuaccuggggcugcucucccagcgcacccgggacaucuacaucagccgccggcgccggggcaccuucacguggacccuguccgacagcgagggcaacgagacccccgggggcuacugccugacccgcuggaugcucaucgaggccgagcugaagugcuucgggaacacggccguggcgaagugcaacgagaagcacgacgaggaguucugcgacaugcugcggcuguucgacuucaacaagcaggccauccgccggcugaagaccccggcccagauguccauccagcugaucaacaaggccgugaacgcccucaucaacgaccagcugaucaugaagaaccaccuccgcgacaucaugugcauccccuacugcaacuacagcaaguacugguaccucaaccacaccgucaccggcaagacgucccugccccggugcuggcuggugagcaacggguccuaccucaacgagacccacuucagcgacgacaucgagcagcaggcggacaacaugaucaccgagcugcugcagaaggaguacaucgaccgccagggcaagaccccgcucggccugguggaccuguucgucuucuccacgagcuucuaccucaucuccaucuuccugcaccuggugaagauccccacccaccggcacgugaucgggaagcccugccccaagccgcaccgcaucaaccacaugggcaucugcagcugcgggcuguacaagcaccccggcguccccgugaaguggaagcgguga

SEQ ID NO: 4348 - RNA, 1473 nt, Artificial Sequence
  derived and/or modified protein sequence (opt1) from LASV(ISTH1058-NIG-2011;Clade II)__AIT17446__GPCstabilized
augggccagaucaucaccuucuuccaggaggugccccacgucaucgaggaggugaugaacaucgugcugaucgcccucagccugcuggccauccucaaggggaucuacaacgucgcgaccugcggccuguucgggcugguguccuuccuccugcugugcggccgcagcugcuccacgaccuacaaggggguguacgagcuccagacccuggagcuggacauggccagccucaacaugaccaugccgcuguccugcacgaagaacaacagccaccacuacaucauggucggcaacgagaccggccuggagcucacccugaccaacacguccaucaucaaccacaaguucugcaaccugagcgacgcccacaagaagaaccucuacgaccacgcccugauguccaucaucagcaccuuccaccuguccauccccaacuucaaccaguacgaggccaugagcugcgacuucaacgggggcaagaucuccgugcaguacaaccucagccacaccuacgcgguggacgccgccucccacugcgggaccgucgccaacggcgugcugcagacguucaugcggauggcguggggcgggagcuacaucgcccuggacuccggcugcgggagcugggacugcaucaugaccuccuaccaguaccucaucauccagaacaccaccugggaggaccacugccaguucagccgccccagccccaucggcuaccuggggcugcucucccagcggacgcgcgacaucuacaucagccggcgccggcgcggcaccuucaccuggacccuguccgacagcgagggcaacgagacgcccgggggcuacugccugacccgguggaugcucaucgaggccgagcugaagugcuucgggaacaccgccguggccaagugcaacgagaagcacgacgaggaguucugcgacaugcugcgccucuucgacuucaacaagcaggcgauccggcgccugaagaccccggcccagauguccauccagcugaucaacaaggccgucaacgcccucaucaacgaccagcugaucaugaagaaccaccuccgggacaucaugugcauccccuacugcaacuacagcaaguacugguaccugaaccacacggugaccggcaagaccucccugccccgcugcuggcuggugagcaacggguccuaccucaacgagacccacuucagcgacgacaucgagcagcaggccgacaacaugaucacggagcugcugcagaaggaguacauggaccggcagggcaagaccccgcucggccuggucgaccuguucguguucuccaccagcuucuaccucaucuccaucuuccugcaccuggugaagauccccacccaccgccacgucaucgggaagcccugccccaagccgcaccggcugaaccacaugggcaucugcagcugcgggcucuacaagcaccccggcgugcccgugaaguggaagcgcuga

SEQ ID NO: 4349 - RNA, 1473 nt, Artificial Sequence
  derived and/or modified protein sequence (opt1) from LASV(ISTH1064-NIG-2011;Clade II)__AIT17450__GPCstabilized
augggccagaucaucaccuucuuccaggaggugccccacgucaucgaggaggugaugaacaucgugcugaucgcccucagccugcuggccauccucaaggggaucuacaacgucgcgaccugcggccuguucgggcugguguccuuccuccugcugugcggccgcagcugcuccacgaccuacaaggggguguacgagcuccagacccuggagcuggacauggccagccucaacaugaccaugccgcuguccugcacgaagaacaacagccaccacuacaucauggucggcaacgagaccggccuggagcucacccugaccaacacguccaucaucaaccacaaguucugcaaccugagcgacgcccacaagaagaaccucuacgaccacgcccugauguccaucaucagcaccuuccaccuguccauccccaacuucaaccaguacgaggccaugagcugcgacuucaacgggggcaagaucuccgugcaguacaaccucagccacaccuacgcgguggacgccgccaaccacugcgggaccaucgccaacggcguccugcagacguucaugcggauggcguggggcggguccuacaucgcccuggacagcggcugcggguccugggacugcaucaugaccagcuaccaguaccucaucauccagaacaccaccugggaggaccacugccaguucucccgccccagccccaucggcuaccuggggcugcucagccagcggacgcgcgacaucuacaucucccggcgccggcgcggcaccuucaccuggacccugagcgacuccgagggcaacgagacgcccgggggcuacugccugacccgguggaugcucaucgaggccgagcugaagugcuucgggaacaccgccguggccaagugcaacgagaagcacgacgaggaguucugcgacaugcugcgccucuucgacuucaacaagcaggcgauccggcgccugaagaccccggcccagaugagcauccagcugaucaacaaggccgugaacgcccucaucaacgaccagcugaucaugaagaaccaccuccgggacaucaugugcauccccuacugcaacuacuccaaguacugguaccugaaccacacggucaccggcaagaccagccugccccgcugcuggcugguguccaacgggagcuaccucaacgagacccacuucuccgacgacaucgagcagcaggccgacaacaugaucacggagcugcugcagaaggaguacaucgaccggcagggcaagaccccgcucggccugguggaccuguucgucuucagcaccuccuucuaccucaucagcaucuuccugcaccuggugaagauccccacccaccgccacaucaucgggaagcccugccccaagccgcaccggcugaaccacaugggcaucugcuccugcgggcucuacaagcaccccggcgugcccgucaaguggaagcgcuga

SEQ ID NO: 4350 - RNA, 1473 nt, Artificial Sequence
  derived and/or modified protein sequence (opt1) from LASV(ISTH1069-NIG-2011;Clade II)__AIT17454__GPCstabilized
augggccagaucaucaccuucuuccaggaggugccccacgucaucgaggaggugaugaacaucgugcugaucgccuucagccuccuggccauccugaaggggaucuacaacgucgcgaccugcggccucuucgggcugguguccuuccugcuccugugcggccgcagcugcuccacgaccuacaaggggguguacgagcugcagacccucgagcuggacauggccagccugaacaugaccaugccgcucuccugcacgaagaacaacagccaccacuacaucauggucggcaacgagaccggccuggagcugacccucaccaacacguccaucaucaaccacaaguucugcaaccugagcgacgcccacaagcggaaccuguacgaccacgcccucauguccaucaucagcaccuuccaccuguccauccccaacuucaaccaguacgaggccaugagcugcgacuucaacgggggcaagaucuccgugcaguacaaccugagccacaccuacgcgguggacgccgccgggcacugcggcaccaucgccaacgggguccuccagacguucaugcgcauggcguggggcggcuccuacaucgcccuggacagcgggugcggcuccugggacugcaucaugaccagcuaccaguaccugaucauccagaacaccaccugggaggaccacugccaguucucccggcccagccccaucggguaccucggccugcugagccagcgcacgcgggacaucuacaucucccgccggcgccggggcaccuucaccuggacccucagcgacuccgaggggaacgagacgccgggcggguacugccugacccgcuggaugcugaucgaggccgagcucaagugcuucggcaacaccgccguggccaagugcaacgagaagcacgacgaggaguucugcgacaugcugcggcuguucgacuucaacaagcaggcgauccgccggcucaagacccccgcccagaugagcauccagcugaucaacaaggccgugaacgcccugaucaacgaccagcucaucaugaagaaccaccuccgcgacaucaugugcauccccuacugcaacuacuccaaguacugguaccugaaccacacgaucaccgggaagaccagccugccccggugcuggcuggucuccaacggcagcuaccugaacgagacccacuucuccgacgacaucgagcagcaggccgacaacaugaucacggagcuccugcagaaggaguacauggaccgccagggcaagaccccgcuggggcucguggaccuguucguguucagcaccuccuucuaccugaucagcaucuuccuccaccuggucaagauccccacccaccggcacaucaucggcaagcccugccccaagccgcaccgccugaaccacauggggaucugcuccugcggccuguacaagcaccccggggugcccgugcgguggaagcgcuga

SEQ ID NO: 4351 - RNA, 1473 nt, Artificial Sequence
  derived and/or modified protein sequence (opt1) from LASV(ISTH1096-NIG-2012;Clade II)__AIT17458__GPCstabilized
augggccagaucaucaccuucuuccaggaggugccccacgucaucgaggaggugaugaacaucgugcugaucgcccucagccugcuggccauccucaaggggaucuacaacgucgcgaccugcggccuguucgggcugguguccuuccuccugcugugcggccgcagcugcuccacgaccuacaaggggguguacgagcuccagacccuggagcuggacauggccagccucaacaugaccaugccgcuguccugcacgaagaacaacagccaccacuacaucauggucggcaacgagaccggccuggagcucacccugaccaacacguccaucaucaaccacaaguucugcaaccugagcgacgcccacaagaagaaccucuacgaccacgcccugauguccaucaucagcaccuuccaccuguccauccccaacuucaaccaguacgaggccaugagcugcgacuucaacgggggcaagaucuccgugcaguacaaccucagccacaccuacgcgaucgacgccgccaaccacugcgggaccaucgccaacggcgugcugcagacguucaugcggauggcguggggcggguccuacaucgcccuggacagcggcugcggguccugggacugcaucaugaccaccuaccaguaccucaucauccagaacaccacgugggaggaccacugccaguucagccgccccucccccaucggcuaccuggggcugcucagccagcggacccgcgacaucuacaucagccggcgccggcgcggcaccuucaccuggacgcuguccgacagcgagggcaacgagacccccgggggcuacugccugacccgguggaugcucaucgaggccgagcugaagugcuucgggaacaccgccgucgccaagugcaacgagaagcacgacgaggaguucugcgacaugcugcgccucuucgacuucaacaagcaggcgauccggcgccugaagacgccggcccagauguccauccagcugaucaacaaggccgugaacgcccucaucaacgaccagcugaucaugaagaaccaccuccgggacaucaugugcauccccuacugcaacuacagcaaguacugguaccugaaccacaccgugaccggcaagaccucccugccccgcugcuggcuggucagcaacggguccuaccucaacgagacgcacuucagcgacgacaucgagcagcaggccgacaacaugaucaccgagcugcugcagaaggaguacauggaccggcagggcaagaccccgcucggccugguggaccuguucguguucuccaccagcuucuaccucaucuccaucuuccugcaccuggucaagauccccacgcaccgccacgugaucgggaagcccugccccaagccgcaccggcugaaccacaugggcaucugcagcugcgggcucuacaagcaccccggcgugcccgucaaguggaagcgcuga

SEQ ID NO: 4352 - RNA, 1473 nt, Artificial Sequence
  derived and/or modified protein sequence (opt1) from LASV(ISTH1107-NIG-2012;Clade II)__AIT17462__GPCstabilized
augggccagaucaucaccuucuuccaggaggugccccacgucaucgaggaggugaugaacaucgugcugaucgcccucagccugcuggccauccucaaggggaucuacaacgucgcgaccugcggccuguucgggcugguguccuuccuccugcugugcggccgcagcugcuccacgaccuacaaggggguguacgagcuccagacccuggagcuggacauggccagccucaacaugaccaugccgcuguccugcacgaagaacaacagccaccacuacaucauggucggcaacgagaccggccuggagcucacccugaccaacacguccaucaucaaccacaaguucugcaaccugagcgacgcccacaagaagaaccucuacgaccacgcccugauguccaucaucagcaccuuccaccuguccauccccaacuucaaccaguacgaggccaugagcugcgacuucaacgggggcaagaucuccgugcaguacaaccucagccacgcguacgccguggacgccgccaaccacugcgggaccaucgcgaacggcguccugcagaccuucaugcggauggccuggggcggguccuacaucgcccuggacagcggcugcggguccugggacugcaucaugacgagcuaccaguaccucaucauccagaacaccaccugggaggaccacugccaguucucccgccccagccccaucggcuaccuggggcugcucagccagcggacccgcgacaucuacaucucccggcgccggcgcggcacguucaccuggacccugagcgacuccgagggcaacgagacccccgggggcuacugccugacgcgguggaugcucaucgaggccgagcugaagugcuucgggaacaccgccguggcgaagugcaacgagaagcacgacgaggaguucugcgacaugcugcgccucuucgacuucaacaagcaggccauccggcgccugaagaccccggcccagaugagcauccagcugaucaacaaggccgugaacgcccucaucaacgaccagcugaucaugaagaaccaccuccgggacaucaugugcauccccuacugcaacuacuccaaguacugguaccugaaccacaccgucacgggcaagaccagccugcccaagugcuggcugguguccaacgggagcuaccucaacgagacccacuucuccgacgacaucgagcagcaggcggacaacaugaucaccgagcugcugcagaaggaguacaucgaccgccagggcaagacgccgcucggccugguggaccuguucgucuucagcaccuccuucuaccucaucagcaucuuccugcaccuggugaagauccccacccaccggcacgugaucgggaagcccugccccaagccgcaccgccugaaccacaugggcaucugcuccugcgggcucuacaagcaccccggcguccccgugaaguggaagcgguga

SEQ ID NO: 4353 - RNA, 1473 nt, Artificial Sequence
  derived and/or modified protein sequence (opt1) from LASV(ISTH1111-NIG-2011;Clade II)__AIT17466__GPCstabilized
augggccagaucaucaccuucuuccaggaggugccccaggucaucgaggaggugaugaacaucgugcugaucgcccucagccugcuggccauccucaaggggaucuacaacgucgcgaccugcggccuguucgggcugguguccuuccuccugcugugcggccgcagcugcuccacgaccuacaaggggguguacgagcuccagacccuggagcuggacauggccagccucaacaugaccaugccgcuguccugcacgaagaacaacagccaccacuacaucauggucggcaacgagaccggccuggagcucacccugaccaaccaguccaucaucaaccacaaguucugcaaccugagcgacgcccacaagaagaaccucuacgaccacgcccugauguccaucaucagcacguuccaccuguccauccccaacuucaaccaguacgaggccaugagcugcgacuucaacgggggcaagaucuccgugcaguacaaccucagccacaccuucgcgguggacgccgccaaccacugcgggaccaucgccaacggcguccugcagaccuucaugcggauggcguggggcggguccuacaucgcccuggacagcggcugcggguccugggacugcaucaugacgagcuaccaguaccucaucauccagaacaccaccugggaggaccacugccaguucucccgccccagccccaucggcuaccuggggcugcucagccagcggacccgcgacaucuacaucucccggcgccggcgcggcacguucaccuggacccugagcgacuccgagggcaacgagacccccgggggcuacugccugacgcgguggaugcucaucgaggccgagcugaagugcuucgggaacaccgccguggccaagugcaacgagaagcacgacgaggaguucugcgacaugcugcgccucuucgacuucaacaagcaggcgauccggcgccugaagaccccggcccagaugagcauccagcugaucaacaaggccgugaacgcccucaucaacgaccagcugaucaugaagaaccaccuccgggacaucaugugcauccccuacugcaacuacuccaaguacugguaccugaaccacaccaucacgggcaagaccagccugccccgcugcuggcuggucuccaacgggagcuaccucaacgagacccacuucuccgacgacaucgagcagcaggccgacaacaugaucaccgagcugcugcagaaggaguacauggaccggcagggcaagacgccgcucggccugguggaccuguucguguucagcaccuccuucuaccucaucagcaucuuccugcaccuggucaagauccccacccaccgccacgugaucgggaagcccugccccaagccgcaccggcugaaccacaugggcaucugcuccugcgggcucuacaagcaccccggcgugcccgucaaguggaagcgcuga

SEQ ID NO: 4354 - RNA, 1473 nt, Artificial Sequence
  derived and/or modified protein sequence (opt1) from LASV(ISTH1121-NIG-2012;Clade II)__AIT17470__GPCstabilized
augggccagaucaucaccuucuuccaggaggugccccacgucaucgaggaggugaugaacaucgugcugaucgcccucagccugcuggccauccucaaggggaucuacaacgucgcgaccugcggccuguucgggcugguguccuuccuccugcugugcggccgcagcugcuccacgaccuacaaggggguguacgagcuccagacccuggagcuggacauggccagccucaacaugaccaugccgcuguccugcacgaagaacaacagccaccacuacaucauggucggcaacgagaccggccuggagcucacccugaccaacacguccaucaucaaccacaaguucugcaaccugagcgacgcccaccggaagaaccucuacgaccacgcccugauguccaucaucagcaccuuccaccuguccauccccaacuucaaccaguacgaggccaugagcugcgacuucaacgggggcaagaucuccgugcaguacaaccucagccacaccuacgcgguggacgccgccaaccacugcgggaccaucgccaacggcguccugcagacguucaugcgcauggcguggggcggguccuacaucgcccuggacagcggcugcggguccugggacugcaucaugaccagcuaccaguaccucaucauccagaacaccaccugggaggaccacugccaguucucccggcccagccccaucggcuaccuggggcugcucagccagcgcacgcgggacaucuacaucucccgccggcgccggggcaccuucaccuggacccugagcgacuccgagggcaacgagacgcccgggggcuacugccugacccgcuggaugcucaucgaggccgagcugaagugcuucgggaacaccgccguggccaagugcaacgagaagcacgacgaggaguucugcgacaugcugcggcuguucgacuucaacaagcaggcgauccgccggcugaagaccccggcccagaugagcauccagcugaucaacaaggccgugaacgcccucaucaacgaccagcugaucaugaagaaccaccuccgcgacaucaugugcauccccuacugcaacuacuccaaguacugguaccucaaccacacggucaccggcaagaccagccugccccggugcuggcugguguccaacgggagcuaccucaacgagacccacuucuccgacgacaucgagcagcaggccgacaacaugaucacggagcugcugcagaaggaguacaucgaccgccagggcaagaccccgcucggccugguggaccuguucgucuucagcaccuccuucuaccucaucagcaucuuccugcaccuggugaagauccccacccaccggcacgugaucgggaagcccugccccaagccgcaccgccugaaccacaugggcaucugcuccugcgggcucuacaagcaccccggcguccccgugaaguggaagcgguga

SEQ ID NO: 4355 - RNA, 1473 nt, Artificial Sequence
  derived and/or modified protein sequence (opt1) from LASV(ISTH1129-NIG-2012;Clade II)__AIT17474__GPCstabilized
augggccagaucaucaccuucuuccaggaggugccccacgucaucgaggaggugaugaacaucgugcugaucgcccucagccugcuggccauccucaaggggaucuacaacgucgcgaccugcggccuguucgggcugguguccuuccuccugcugugcggccgcagcugcuccacgaccuacaaggggguguacgagcuccagacccuggagcuggacauggccagccucaacaugaccaugccgcuguccugcacgaagaacaacagccaccacuacaucauggucggcaacgagaccggccuggagcucacccugaccaacacguccaucaucaaccacaaguucugcaaccugagcgacgcccacaagaagaaccucuacgaccacgcccugauguccaucaucagcaccuuccaccuguccauccccaacuucaaccaguacgaggccaugagcugcgacuucaacgggggcaagaucuccauccaguacaaccucagccacaccuacgcgguggacgccgccaaccacugcgggaccaucgccaacggcgugcugcagacguucaugcggauggcguggggcggguccuacaucgcccuggacagcggcugcggguccugggacugcaucaugaccagcuaccaguaccucaucauccagaacaccaccugggaggaccacugccaguucucccgccccagccccaucggcuaccuggggcugcucagccagcggacgcgcgacaucuacaucucccggcgccggcgcggcaccuucaccuggacccugagcgacuccgagggcaacgagacgcccgggggcuacugccugacccgguggaugcucaucgaggccgagcugaagugcuucgggaacaccgccgucgccaagugcaacgagaagcacgacgaggaguucugcgacaugcugcgccucuucgacuucaacaagcaggcgauccggcgccugaagaccccggcccagaugagcauccagcugaucaacaaggccgugaacgcccucaucaacgaccagcugaucaugaagaaccaccuccgggacaucaugugcauccccuacugcaacuacuccaaguacugguaccugaaccacacgaucaccggcaagaccagccugccccgcugcuggcugguguccaacgggagcuaccucaacgagacccacuucuccgacgacaucgagcagcaggccgacaacaugaucacggagcugcugcagaaggaguacaucgaccggcagggcaagaccccgcucggccuggucgaccuguucguguucagcaccuccuucuaccucaucagcaucuuccugcaccuggugaagauccccacccaccgccacaucacggggaagcccugccccaagccgcaccggcugaaccacaugggcaucugcuccugcgggcucuacaagcaccccggcguccccgugcgcuggaagcgguga

SEQ ID NO: 4356 - RNA, 1473 nt, Artificial Sequence
  derived and/or modified protein sequence (opt1) from LASV(ISTH1137-NIG-2011;Clade II)__AIT17478__GPCstabilized
augggccagaucaucaccuucuuccaggaggugccccacgucaucgaggaggugaugaacaucgugcugaucgcccucagccugcuggccauccucaaggggaucuacaacgucgcgaccugcggccuguucgggcugguguccuuccuccugcugugcggccgcagcugcuccacgaccuacaaggggguguacgagcuccagacccuggagcuggacauggccagccucaacaugaccaugccgcuguccugcacgaagaacaacagccaccacuacaucauggucggcaacgagaccggccuggagcucacccugaccaacacguccaucaucaaccacaaguucugcaaccugagcgacgcccacaagaagaaccucuacgaccacgcccugauguccaucaucagcaccuuccaccuguccauccccaacuucaaccaguacgaggccaugagcugcgacuucaacgggggcaagaucuccgugcaguacaaccucagccacaccuacgcgguggacgccgccgaccacugcgggaccaucgccaacggcguccugcagacguucaugcggauggcguggggcggguccuacaucgcccuggacagcggcugcggguccugggacugcaucaugaccagcuaccaguaccucaucauccagaacaccaccugggaggaccacugccaguucucccgccccagccccaucggcuaccuggggcugcucagccagcggacgcgcgacaucuacaucucccggcgccggcgcggcaccuucaccuggacccugagcgacuccgagggcaacgagacgcccgggggcuacugccugacccgguggaugcucaucgaggccgagcugaagugcuucgggaacaccgccguggccaagugcaacgagaagcacgacgaggaguucugcgacaugcugcgccucuucgacuucaacaagcaggcgaucagccggcugaagaccccggcccagauguccauccagcugaucaacaaggccgugaacgcccucaucaacgaccagcugaucaugaagaaccaccuccgcgacaucaugugcauccccuacugcaacuacagcaaguacugguaccugaaccacacggucaccggcaagaccucccugccccggugcuggcuggugagcaacggguccuaccucaacgagacccacuucagcgacgacaucgagcagcaggccgacaacaugaucacggagaugcugcagaaggaguacaucgaccgccagggcaagaccccgcugggccucguggaccuguucgucuucuccaccagcuucuaccugaucuccaucuuccuccaccuggugaagauccccacccaccggcacgugaucgggaagcccugccccaagccgcaccgccugaaccacaugggcaucugcagcugcgggcuguacaagcaccccggcguccccgugaaguggaagcgguga

SEQ ID NO: 4357 - RNA, 1473 nt, Artificial Sequence
  derived and/or modified protein sequence (opt1) from LASV(ISTH2010-NIG-2012;Clade II)__AIT17482__GPCstabilized
augggccagaucaucaccuucuuccaggaggugccccacgucaucgaggaggugaugaacaucgugcugaucgcccucagccugcuggccauccucaaggggaucuacaacgucgcgaccugcggccuguucgggcugguguccuuccuccugcugugcggccgcagcugcuccacgaccuacaaggggguguacgagcuccagacccuggagcuggacauggccagccucaacaugaccaugccgcuguccugcacgaagaacaacagccaccacuacaucauggucggcaacgagaccggccuggagcucacccugaccaacacguccaucaucaaccacaaguucugcaaccugagcgacgcccacaagaagaaccucuacgaccacgcccugauguccaucaucagcaccuuccaccuguccauccccaacuucaaccaguacgaggccaugagcugcgacuucaacgggggcaagaucuccgugcaguacaaccucagccacgcguacgccguggacgccgccaaccacugcgggaccaucgcgaacggcguccugcagaccuucaugcggauggccuggggcggguccuacaucgcccuggacagcggcugcggguccugggacugcaucaugacgagcuaccaguaccucaucauccagaacaucaccugggaggaccacugccaguucucccgccccagccccaucggcuaccuggggcugcucagccagcggacccgcgacaucuacaucucccggcgccggcgcggcaccuucacguggacccugagcgacuccgagggcaacgagacccccgggggcuacugccugacccgguggaugcucaucgaggccgagcugaagugcuucgggaacacggccguggcgaagugcaacgagaagcacgacgaggaguucugcgacaugcugcgccucuucgacuucaacaagcaggccauccggcgccugaagaccccggcccagaugagcauccagcugaucaacaaggccgugaacgcccucaucaacgaccagcugaucaugaagaaccaccuccgggacaucaugugcauccccuacugcaacuacuccaaguacugguaccugaaccacaccgucaccggcaagacgagccugccccgcugcuggcugguguccaacgggagcuaccucaacgagacccacuucuccgacgacaucgagcagcaggcggacaacaugaucaccgagcugcugcagaaggaguacaucgaccggcagggcaagaccccgcucggccugguggaccuguucgucuucagcacguccuucuaccucaucagcaucuuccugcaccuggugaagauccccacccaccgccacguggucgggaagcccugccccaagccgcaccggcugaaccacaugggcaucugcuccugcgggcucuacaagcaccccggcgugcccgugaaguggaagcgcuga

SEQ ID NO: 4358 - RNA, 1473 nt, Artificial Sequence
  derived and/or modified protein sequence (opt1) from LASV(ISTH2016-NIG-2012;Clade II)__AIT17486__GPCstabilized
augggccagaucaucaccuucuuccaggaggugccccacgucaucgaggaggugaugaacaucgugcugaucgcccucagccugcuggccauccucaaggggaucuacaacgucgcgaccugcggccuguucgggcugguguccuuccuccugcugugcggccgcagcugcuccacgaccuacaaggggguguacgagcuccagacccuggagcuggacauggccagccucaacaugaccaugccgcuguccugcacgaagaacaacagccaccacuacaucauggucggcaacgagaccggccuggagcucacccugaccaacacguccaucaucaaccacaaguucugcaaccugagcgacgcccacaagaagaaccucuacgaccacgcccugauguccaucaucagcaccuuccaccuguccauccccaacuucaaccaguacgaggccaugagcugcgacuucaacgggggcaagaucuccgugcaguacaaccucagccacaccuacgcgguggacgccgccaaccacugcgggaccaucgccaacggcguccugcagacguucaugcggauggcguggggcggguccuacaucgcccuggacagcggcugcggguccugggacugcaucaugaccagcuaccaguaccucaucauccagaacaccaccugggaggaccacugccaguucucccgccccagccccgugggcuaccuggggcugcucagccagcggacgcgcgacaucuacaucucccggcgccggcgcggcaccuucaccuggacccugagcgacuccgagggcaacgagacgcccgggggcuacugccugacccgguggaugcucaucgaggccgagcugaagugcuucgggaacaccgccguggccaagugcaacgagaagcacgacgaggaguucugcgacaugcugcgccucuucgacuucaacaagcaggcgauccggcgccugaagaccccggcccagaugagcauccagcugaucaacaaggccgucaacgcccucaucaacgaccagcugaucaugaagaaccaccuccgggacaucaugugcauccccuacugcaacuacuccaaguacugguaccugaaccacacggugaccggcaagaccagccugccccgcugcuggcugguguccaacgggagcuaccucaacgagacccacuucuccgacgacaucgagcagcaggccgacaacaugaucacggagcugcugcagaaggaguacaucgaccggcagggcaagaccccgcucggccuggucgaccuguucguguucagcaccuccuucuaccucaucagcaucuuccugcaccuggugaagauccccacccaccgccacgucaucgggaagcccugccccaagccgcaccggcugaaccacaugggcaucugcuccugcgggcucuacaagcaccccggcgugcccgugaaguggaagcgcuga

SEQ ID NO: 4359 - RNA, 1473 nt, Artificial Sequence
  derived and/or modified protein sequence (opt1) from LASV(ISTH2020-NIG-2012;Clade II)__AIT17490__GPCstabilized
augggccagaucaucaccuucuuccaggaggugccccacgucaucgaggaggugaugaacaucgugcugaucacccucagccugcuggccauccucaaggggaucuacaacgucgccacgugcggccuguucgggcugguguccuuccuccugcugugcggccgcagcugcuccaccaccuacaaggggguguacgagcuccagacccuggagcuggacauggcgaaccucaacaugacgaugccgcugagcugcaccaagaacaacucccaccacuacaucauggucggcaacgagaccggccuggagcucacccugacgaacaccagcaucaucaaccacaaguucugcaaccuguccgacgcccacaagaagaaccucuacgaccacgcccugaugagcaucaucuccaccuuccaccugagcauccccaacuucaaccaguacgaggccauguccugcgacuucaacgggggcaagaucagcgugcaguacaaccucucccacaccuucgccguggacgcggccaaccacugcgggacgaucgccaacggcguccugcagaccuucaugcggauggccuggggcgggagcuacaucgcgcuggacuccggcugcgggagcugggacugcaucaugaccuccuaccaguaccucaucauccagaacaccacgugggaggaccacugccaguucagccgccccucccccaucggcuaccuggggcugcucagccagcggacccgcgacaucuacaucagccggcgccggcgcggcaccuucaccuggacgcuguccgacagcgagggcaacgagacccccgggggcuacugccugacccgguggaugcucaucgaggccgagcugaagugcuucgggaacaccgccguggccaagugcaacgagaagcacgacgaggaguucugcgacaugcugcgccucuucgacuucaacaagcaggccauccggcgccugaagacgccggcgcagauguccauccagcugaucaacaaggccgugaacgcccucaucaacgaccagcugaucaugaagaaccaccuccgggacaucaugugcauccccuacugcaacuacagcaaguacugguaccugaaccacaccgucaccggcaagaccucccugccccgcugcuggcuggugagcaacggguccuaccucaacgagacgcacuucagcgacgacaucgagcagcaggccgacaacaugaucaccgagcugcugcagaaggaguacauggaccggcagggcaagaccccgcucggccugguggaccuguucgucuucuccaccagcuucuaccucaucuccaucuuccugcaccuggugaagauccccacgcaccgccacaucaucgggaagcccugccccaagccgcaccggcugaaccacaugggcaucugcagcugcgggcucuacaagcaccccggcgugcccgucaaguggaagcgcuga

SEQ ID NO: 4360 - RNA, 1473 nt, Artificial Sequence
  derived and/or modified protein sequence (opt1) from LASV(ISTH2025-NIG-2012;Clade II)__AIT17494__GPCstabilized
augggccagaucaucaccuucuuccaggaggugccccacgucaucgaggaggugaugaacaucgugcugaucgcccucagccugcuggccauccucaagggggucuacaacguggcgaccugcggccuguucgggcugguguccuuccuccugcugugcggccgcagcugcuccacgaucuacaagggggucuacgagcuccagacccuggagcuggacauggccagccucaacaugaccaugccgcuguccugcaccaagaacaacagccaccacuacaucauggugggcaacgagacgggccuggagcucacccugaccaacaccuccaucaucaaccacaaguucugcaaccugagcgacgcccacaagaagaaccucuacgaccacgcccugauguccaucaucagcacguuccaccuguccauccccaacuucaaccaguacgaggccaugagcugcgacuucaacgggggcaagaucuccgugcaguacaaccucagccacaccuacgcggucgacgccgccaaccacugcgggaccaucgccaacggcgugcugcagaccuucaugcggauggcguggggcggguccuacaucgcccuggacagcggcugcggguccugggacugcaucaugacgagcuaccaguaccucaucauccagaacaccuccugggaggaccacugccaguucagccgccccagccccaucggcuaccuggggcugcucucccagcggacccgcgacaucuacaucagccggcgccggcgcggcaccuucacguggacccuguccgacagcgagggcaacgagacccccgggggcuacugccugacccgguggaugcucaucgaggccgagcugaagugcuucgggaacacggccguggccaagugcaacgagaagcacgacgaggaguucugcgacaugcugcgccucuucgacuucaacaagcaggcgauccggcgccugaagaccccggcccagauguccauccagcugaucaacaaggccgucaacgcccucaucaacgaccagcugaucaugaagaaccaccuccgggacaucaugugcauccccuacugcaacuacagcaaguacugguaccugaaccacaccgugaccggcaagacgucccugccccgcugcuggcuggugagcaacggguccuaccucaacgagacccacuucagcgacgacaucgagcagcaggccgacaacaugaucaccgagcugcugcagaaggaguacaucgaccggcagggcaagaccccgcucggccuggucgaccuguucguguucuccacgagcuucuaccucaucuccaucuuccugcaccuggugaagauccccacccaccgccacgucaucgggaagcccugccccaagccgcaccggcugaaccacaugggcaucugcagcugcgggcucuacaagcaccccggcgugcccgugaaguggaagcgcuga

SEQ ID NO: 4361 - RNA, 1473 nt, Artificial Sequence
  derived and/or modified protein sequence (opt1) from LASV(ISTH2031-NIG-2012;Clade II)__AIT17498__GPCstabilized
augggccagaucaucaccuucuuccaggaggugccccacgucaucgaggaggugaugaacaucgugcugaucgcccucagccugcuggccauccucaaggggaucuacaacgucgcgaccugcggccuguucgggcugguguccuuccuccugcugugcggccgcagcugcuccacgaccuacaaggggguguacgagcuccagacccuggagcuggacauggccagccucaacaugaccaugccgcuguccugcacgaagaacaacagccaccacuacaucauggucggcaacgagaccggccuggagcucacccugaccaacacguccaucaucaaccacaaguucugcaaccugagcgacgcccacaagaagaaccucuacgaccacgcccugauguccaucaucagcaccuuccaccuguccauccccaacuucaaccaguacgaggccaugagcugcgacuucaacgggggcaagaucuccgugcaguacaaccucagccacaccuacgcgguggacgccgccaaccacugcgggaccaucgccaacggcguccugcagacguucaugcggauggcguggggcggguccuacaucgcccuggacagcggcugcgggaacugggacugcaucaugaccuccuaccaguaccucaucauccagaacaccaccugggaggaccacugccaguucagccgccccucccccaucggcuaccuggggcugcucagccagcggacgcgcgacaucuacaucagccggcgccggcgcggcaccuucaccuggacccuguccgacagcgagggcaacgagacgcccgggggcuacugccugacccgguggaugcucaucgagaccgagcugaagugcuucgggaacaccgccguggccaagugcaacgagaagcacgacgaggaguucugcgacaugcugcgccucuucgacuucaacaagcaggccaucucccggcugcgcagcccggcgcagauguccauccagcugaucaacaaggccgugaacgcccucaucaacgaccagcugaucaugaagaaccaccuccgggacaucaugugcauccccuacugcaacuacagcaaguacugguaccugaaccacacggucaccggcaagaccucccugcccaagugcuggcuggugagcaacggguccuaccucaacgagacccacuucagcgacgacaucgagcagcaggccgacaacaugaucacggagaugcugcagaaggaguacaucgaccgccagggcaagaccccgcugggccucguggaccuguucgucuucuccaccagcuucuaccugaucuccaucuuccuccaccuggugaagauccccacccaccggcacaucacggggaagcccugccccaagccgcaccgccugaaccacaugggcaucugcagcugcgggcuguacaagcaccccggcgugcccgucaaguggaagcgguga

SEQ ID NO: 4362 - RNA, 1473 nt, Artificial Sequence
  derived and/or modified protein sequence (opt1) from LASV(ISTH2037-NIG-2012;Clade II)__AIT17502__GPCstabilized
augggccagaucaucaccuucuuccaggagaucccccacgugaucgaggaggucaugaacaucgugcugaucacccucagccugcuggccauccucaaggggaucuacaacguggccacgugcggccuguucgggcuggucuccuuccuccugcugugcggcaagagcugcuccaccaccuacaaggggguguacgagcuccagacccuggagcuggacauggcgagccucaacaugacgaugccgcuguccugcaccaagaacaacagccaccacuacaucauggugggcaacgagaccggccuggagcucacccugacgaacaccuccaucaucaaccacaaguucugcaaccugagcgacgcccaccgcaagaaccucuacgaccacacccugauguccaucaucagcaccuuccaccuguccauccccaacuucaaccaguacgaggccaugagcugcgacuucaacgggggcaagaucuccguccaguacaaccucagccacgccuacgccaucgacgcggccacgcacugcgggaccaucgccaacggcgugcugcagaccuucaugcggauggccuggggcggguccuacaucgcgcuggacagcggcugcgggggcugggacugcaucaugaccuccuaccaguaccucaucauccagaacacgaccugggaggaccacugccaguucagccgccccucccccaucggguaccugggccugcucagccagcggacccgcgacaucuacaucagccggcgccggcgcggcaccuucacguggacccuguccgacagcgaggggaacgagaccccgggcggguacugccugacccgguggaugcucaucgaggccgagcugaagugcuucggcaacacggccguggccaagugcaacgagaagcacgacgaggaguucugcgacaugcugcgccucuucgacuucaacaagcaggccauccggcgccugaagacccccgcgcagauguccauccagcugaucaacaaggccgucaacgcccucaucaacgaccagcugaucaugcggaaccaccuccgcgacaucaugugcauccccuacugcaacuacagcaaguacugguaccugaaccacaccgugaccgggaagacgucccugcccaagugcuggcuggugagcaacggcuccuaccucaacgagacccacuucagcgacgacaucgagcagcaggccgacaacaugaucaccgagcugcugcagaaggaguacauggaccggcagggcaagaccccgcucgggcuggucgaccuguucguguucuccacgagcuucuaccucaucuccaucuuccugcaccuggugaagauccccacccaccgccacgucaucggcaagcccugccccaagccgcaccggcugaaccacaugggggugugcagcugcggccucuacaagcaccccggggugcccgucaaguggaagcgcuga

SEQ ID NO: 4363 - RNA, 1473 nt, Artificial Sequence
  derived and/or modified protein sequence (opt1) from LASV(ISTH2042-NIG-2012;Clade II)__AIT17506__GPCstabilized
augggccagaucaucaccuucuuccaggaggugccccacgucaucgaggaggugaugaacaucgugcugaucgcccucagccugcuggccauccucaaggggaucuacaacgucgcgaccugcggccuguucgggcugguguccuuccuccugcugugcggccgcagcugcuccacgaccuacaaggggguguacgagcuccagacccuggagcuggacauggccagccucaacaugaccaugccgcuguccugcacgaagaacaacagccaccacuacaucauggucggcaacgagaccggccuggagcucacccugaccaacacguccaucaucaaccacaaguucugcaaccugagcgacgcccacaagaagaaccucuacgaccacgcccugauguccaucaucagcaccuuccaccuguccauccccaacuucaaccaguacgaggccaugagcugcgacuucaacgggggcaagaucuccgugcaguacaaccucagccacgcguacgccguggacgccgccgagcacugcgggaccaucgcgaacggcguccugcagaccuucaugcggauggccuggggcggguccuacaucgcccuggacagcggcugcggguccugggacugcgugaugacgagcuaccaguaccucaucauccagaacaccaccugggaggaccacugccaguucucccgccccagccccaucggcuaccuggggcugcucagccagcggacccgcgacaucuacaucucccggcgccggcgcggcacguucaccuggacccugagcgacuccgagggcaacgagacccccgggggcuacugccugacgcgguggaugcucaucgaggccgagcugaagugcuucgggaacaccgccguggcgaagugcaacgagaagcacgacgaggaguucugcgacaugcugcgccucuucgacuucaacaagcaggccaucgagcggcugaagaccccggcccagaugagcauccagcugaucaacaaggccgucaacgcccucaucaacgaccagcugaucaugaagaaccaccuccgcgacaucaugugcauccccuacugcaacuacuccaaguacugguaccugaaccacaccgugacgggcaagaccagccugccccggugcuggcugguguccaacgggagcuaccucaacgagacccacuucuccgacgacaucgagcagcaggcggacaacaugaucaccgagaugcugcagaaggaguacaucgaccgccagggcaagacgccgcugggccucgucgaccuguucguguucagcaccuccuucuaccugaucagcaucuuccuccaccuggugaagauccccacccaccggcacgucaucgggaagcccugccccaagccgcaccgccugaaccacaugggcaucugcuccugcgggcuguacaagcaccccggcgugcccgugaaguggaagcgguga

SEQ ID NO: 4364 - RNA, 1473 nt, Artificial Sequence
  derived and/or modified protein sequence (opt1) from LASV(ISTH2046-NIG-2012;Clade II)__AIT17510__GPCstabilized
augggccagaucaucaccuucuuccaggaggugccccacgucaucgaggaggugaugaacaucgugcugaucgcccucagccugcuggccauccucaaggggaucuacaacgucgcgaccugcggccuguucgggcugguguccuuccuccugcugugcggccgcagcugcuccacgaccuacaaggggguguacgagcuccagacccuggagcuggacauggccagccucaacaugaccaugccgcuguccugcacgaagaacaacagccaccacuacaucauggucggcaacgagaccggccuggagcucacccugaccaacacguccaucaucaaccacaaguucugcaaccugagcgacgcccacaagaagaaccucuacgaccacgcccugauguccaucaucagcaccuuccaccuguccauccccaacuucaaccaguacgaggccaugagcugcgacuucaacgggggcaagaucuccgugcaguacaaccucagccacaccuacgcgguggacgccgccaaccacugcgggaccaucgccaacggcguccugcagacguucaugcggauggcguggggcggguccuacaucgcccuggacagcggcugcggguccugggacugcaucaugaccagcuaccaguaccucaucauccagaacaccaccugggaggaccacugccaguucucccgccccagccccaucggcuaccuggggcugcucagccagcggacgaaggacaucuacaucucccgccggcgccggggcaccuucaccuggacccugagcgacuccgagggcaacgagacgcccgggggcuacugccugacccgcuggaugcucaucgaggccgagcugaagugcuucgggaacaccgccguggccaagugcaacgagaagcacgacgaggaguucugcgacaugcugcggcuguucgacuucaacaagcaggcgauccgccggcugaagaccccggcccagaugagcauccagcugaucaacaaggccgugaacgcccucaucaacgaccagcugaucaugaagaaccaccuccgcgacaucaugugcauccccuacugcaacuacuccaaguacugguaccucaaccacacggucaccggcaagaccagccugccccggugcuggcugguguccaacgggagcuaccucaacgagacccacuucuccgacgacaucgagcagcaggccgacaacaugaucacggagcugcugcagaaggaguacaucgaccgccagggcaagaccccgcucggccugguggaccuguucgucuucagcaccuccuucuaccucaucagcaucuuccugcaccuggugaagauccccacccaccggcacgugaucgggaagcccugccccaagccgcaccgccugaaccacaugggcaucugcuccugcgggcucuacaagcaccccggcguccccgugaaguggaagcgguga

SEQ ID NO: 4365 - RNA, 1473 nt, Artificial Sequence
  derived and/or modified protein sequence (opt1) from LASV(ISTH2050-NIG-2012;Clade II)__AIT17514__GPCstabilized
augggccagaucaucaccuucuuccaggaggugccccacgucaucgaggaggugaugaacaucgugcugaucgcccucagccugcuggccguccucaaggggaucuacaacguggcgaccugcggccuguucgggcugguguccuuccuccugcugugcggccgcagcugcuccacgaccuacaagggggucuacgagcuccagacccuggagcuggacauggccagccucaacaugaccaugccgcuguccugcacgaagaacaacagccaccacuacaucauggugggcaacgagaccggccuggagcucacccugaccaacacguccaucaucaaccacaaguucugcaaccugagcgacgcccacaagaagaaccucuacgaccacgcccugauguccaucaucagcaccuuccaccuguccauccccaacuucaaccaguacgaggccaugagcugcgacuucaacgggggcaagaucuccgugcaguacaaccucagccacaccuacgcggucgacgccgccaaccacugcgggaccaucgccaacggcgugcugcagacguucaugcggauggcguggggcggguccuacaucgcccuggacagcggcugcggguccugggacugcaucaugaccagcuaccaguaccucaucauccagaacaccaccugggaggaccacugccaguucucccgccccagccccaucggcuaccuggggcugcucagccagcggacgcgcgacaucuacaucucccggcgccggcgcggcaccuucaccuggacccugagcgacuccgagggcaacgagacgcccgggggcuacugccugacccgguggaugcucaucgaggccgagcugaagugcuucgggaacaccgccguggccaagugcaacgagaagcacgacgaggaguucugcgacaugcugcgccucuucgacuucaacaagcaggcgauccggcgccugaagaccccggcccagaugagcauccagcugaucaacaaggccgucaacgcccucaucaacgaccagcugaucaugaagaaccaccuccgggacaucaugugcauccccuacugcaacuacuccaaguacugguaccugaaccacacggugaccggcaagaccagccugccccgcugcuggcugguguccaacgggagcuaccucaacgagacccacuucuccgacgacaucgagcagcaggccgacaacaugaucacggagcugcugcagaaggaguacaucgaccggcagggcaagaccccgcucggccuggucgaccuguucguguucagcaccuccuucuaccucaucagcaucuuccugcaccuggugaagauccccacccaccgccacgucaucgggaagcccugccccaagccgcaccggcugaaccacaugggcaucugcuccugcgggcucuaccgccaccccggcgugcccgugaaguggaagcgguga

SEQ ID NO: 4366 - RNA, 1473 nt, Artificial Sequence
  derived and/or modified protein sequence (opt1) from LASV(ISTH2057-NIG-2012;Clade II)__AIT17518__GPCstabilized
augggccagaucaucaccuucuuccaggaggugccccacgucaucgaggaggugaugaacaucgugcugaucgcccucagccugcuggccauccucaaggggaucuacaacgucgcgaccugcggccuguucgggcugguguccuuccuccugcugugcggccgcagcugcuccacgaccuacaaggggguguacgagcuccagacccuggagcuggacauggccagccucaacaugaccaugccgcuguccugcacgaagaacaacagccaccacuacaucauggucggcaacgagaccggccuggagcucacccugaccaacacguccaucaucaaccacaaguucugcaaccugagcgacgcccacaagaagaaccucuacgaccacgcccugauguccaucaucagcaccuuccaccuguccauccccaacuucaaccaguacgaggccaugagcugcgacuucaacgggggcaagaucuccgugcaguacaaccucagccacgcguacgccguggacgccgccaaccacugcgggaccaucgcgaacggcguccugcagaccuucaugcggauggccuggggcggguccuacaucgcccuggacagcggcugcggguccugggacugcaucaugacgagcuaccaguaccucaucauccagaacaccaccugggaggaccacugccaguucucccgccccagccccaucggcuaccuggggcugcucagccagcggacccgcgacaucuacaucucccggcgccggcgcggcacguucaccuggacccugagcgacuccgagggcaacgagacccccgggggcuacugccugacgcgguggaugcucaucgaggccgagcugaagugcuucgggaacaccgccguggcgaagugcaacgagaagcacgacgaggaguucugcgacaugcugcgccucuucgacuucaacaagcaggccauccggcgccugaagaccccggcccagaugagcauccagcugaucaacaaggccgugaacgcccucaucaacgaccagcugaucaugaagaaccaccuccgggacaucaugugcauccccuacugcaacuacuccaaguacugguaccugaaccacaccgucacgggcaagaccagccugccccgcugcuggcugguguccaacgggagcuaccucaacgagacccacuucuccgacgacaucgagcagcaggcggacaacaugaucaccgagcugcugcagaaggaguacauggaccggcagggcaagacgccgcucggccugguggaccuguucgucuucagcaccuccuucuaccucaucagcaucuuccugcaccuggugaagauccccacccaccgccacgugaucgggaagcccugccccaagccgcaccggcugaaccacaugggcaucugcuccugcgggcucuacaagcaccccggcguccccgugaaguggaagcgcuga

SEQ ID NO: 4367 - RNA, 1473 nt, Artificial Sequence
  derived and/or modified protein sequence (opt1) from LASV(ISTH2064-NIG-2012;Clade II)__AIT17524__GPCstabilized
augggccagaucaucaccuucuuccaggaggugccccacgucaucgaggaggugaugaacaucgugcugaucgcccucagccugcuggccauccucaaggggaucuacaacgucgcgaccugcggccuguucgggcugguguccuuccuccugcugugcggccgcagcugcuccacgaccuacaaggggguguacgagcuccagacccuggagcuggacauggccagccucaacaugaccaugccgcuguccugcacgaagaacaacagccaccacuacaucauggucggcaacgagaccggccuggagcucacccugaccaacacguccaucaucaaccacaaguucugcaaccugagcgacgcccacaagaagaaccucuacgaccacgcccugauguccaucaucagcaccuuccaccuguccauccccaacuucaaccaguacgaggccaugagcugcgacuucaacgggggcaagaucuccgugcaguacaaccucagccacaccuacgcgaucgacgccgccaaccacugcgggaccaucgccaacggcgugcugcagacguucaugcggauggcguggggcggguccuacaucgcccuggacagcggcugcggguccugggacugcaucaugaccagcuaccaguaccucaucauccagaacaccaccugggaggaccacugccaguucucccgccccagccccaucggcuaccuggggcugcucagccagcggacgcgcgacaucuacaucucccggcgccggcgcggcaccuucaccuggacccugagcgacuccgagggcaacgagacgcccgggggcuacugccugacccgguggaugcucaucgaggccgagcugaagugcuucgggaacaccgccgucgccaagugcaacgagaagcacgacgaggaguucugcgacaugcugcgccucuucgacuucaacaagcaggcgauccggcgccugaagaccccggcccagaugagcauccagcugaucaacaaggccgugaacgcccucaucaacgaccagcugaucaugaagaaccaccuccgggacaucaugugcauccccuacugcaacuacuccaaguacugguaccugaaccacacggugaccggcaagaccagccugccccgcugcuggcuggucuccaacgggagcuaccucaacgagacccacuucuccgacgacaucgagcagcaggccgacaacaugaucacggagaugcugcagaaggaguacauggaccggcagggcaagaccccgcugggccucguggaccuguucguguucagcaccuccuucuaccugaucagcaucuuccuccaccuggucaagauccccacccaccgccacgugaucgggaagcccugccccaagccgcaccggcugaaccacaugggcaucugcuccugcgggcuguacaagcaccccggcgugcccgucaaguggaagcgcuga

SEQ ID NO: 4368 - RNA, 1473 nt, Artificial Sequence
  derived and/or modified protein sequence (opt1) from LASV(ISTH2065-NIG-2012;Clade II)__AIT17528__GPCstabilized
augggccagaucaucaccuucuuccaggaggugccccacgucaucgaggaggugaugaacaucgugcugaucgcccucagccugcuggccaugcucaaggggaucuacaacaucgcgaccugcggccuguucgggcugaucuccuuccuccugcugugcggccgcagcugcuccacgaccuacaagggggucuacgagcuccaggcccuggagcuggacauggccaaccucaacaugaccaugccgcugagcugcaccaagaacaacucccaccacuacaucauggugggcaacgagacgggccuggagcucacccugaccaacaccagcaucaucaaccacaaguucugcaaccuguccgacgcccacaagaagaaccucuacgaccacgcccugaugagcaucaucuccacguuccaccugagcauccccaacuucaaccaguacgaggcgauguccugcgacuucaacgggggcaagaucagcgugcaguacaaccucucccacaccuacgccggggacgccgccaagcacugcggcaccaucgcgaacgggguccugcagaccuucaugcggauggccuggggcggcagcuacaucgcccuggacuccgggugcggcaacugggacugcaucaugacgagcuaccaguaccucaucauccagaacaccaccugggaggaccacugccaguucucccgccccagccccaucggguaccugggccugcucucccagcggacccgcgacaucuacaucagccggcgccggcgcggcacguucaccuggacccugagcgacuccgaggggaacgagaccccgggcggguacugccugacgcgguggaugcucaucgaggccgagcugaagugcuucggcaacaccgccguggcgaagugcaacgagaagcacgacgaggaguucugcgacaugcugcgccucuucgacuucaacaagcaggccauccggcgccugaagacccccgcccagaugagcauccagcugaucaacaaggccgugaacgcccucaucaacgaccagcugaucaugaagaaccaccuccgggacaucaugugcauccccuacugcaacuacuccaaguacugguaccugaaccacagcgucaccgggcgcacgucccugccccggugcuggcuggugagcaacggcuccuaccucaacgagacccaguucagcgacgacaucgagcagcaggcggacaacaugaucaccgagaugcugcagaaggaguacaucgaccgccagggcaagaccccgcuggggcucguggaccuguucgucuucuccacgagcuucuaccugaucuccaucuuccuccaccugaucaagauccccacccaccggcacaucgugggcaagcccugccccaagccgcaccgccugaaccacauggggaucugcagcugcggccuguacaagcaccccgggauccccgugaaguggaagcgguga

SEQ ID NO: 4369 - RNA, 1473 nt, Artificial Sequence
  derived and/or modified protein sequence (opt1) from LASV(ISTH2094-NIG-2012;Clade II)__AIT17538__GPCstabilized
augggccagaucaucaccuucuuccaggaggugccccacgucaucgaggaggugaugaacaucgugcugaucgcccucagccugcuggccauccucaaggggaucuacaacaucgcgaccugcggccuguucgggcugaucuccuuccuccugcugugcggccgcagcugcuccacgaccuacaagggggucuacgagcuccagacccuggagcuggacauggccaaccucaacaugaccaugccgcugagcugcacgaagaacaacucccaccacuacaucauggugggcaacgagaccggccuggagcucacccugaccaacacgagcaucaucaaccacaaguucugcaaccuguccgacgcccacaagaagaaccucuacgaccacgcccugaugagcaucaucuccaccuuccaccugagcauccccaacuucaaccaguacgaggccauguccugcgacuucaacgaggggaagaucagcgugcaguacaaccucucccacagcuacgcgaucgacgccgccggccacugcgggaccaucgccaacggcguccugcagaccuucaugcggauggcguggggcggguccuacaucgcccuggacagcggcugcgggaacugggacugcaucaugacguccuaccaguaccucaucauccagaacaccaccugggaggaccacugccaguucagccgccccucccccaucggcuaccuggggcugcucagccagcggacccgcgacaucuacaucagccggcgccggcgcggcacguucaccuggacccuguccgacagcgagggcaacgaggcccccgggggcuacugccugacccgguggaugcucaucgaggccgagcugaagugcuucgggaacacggccaucgcgaagugcaacgagaagcacgacgaggaguucugcgacaugcugcgccucuucgacuucaacaagcaggccaucaagcggcugaaggccccggcccagauguccauccaccugaucaacaaggccgugaacgcgcucaucaacgaccagcugaucaugaagaaccaccuccgcgacaucaugugcauccccuacugcaacuacagcaaguacugguaccugaaccacaccgugaccggcaagaccucccugcccaagugcuggcuggucagcaacggguccuaccucaacgagacgcacuucagcgacgacaucgagcagcaggccgacaacaugaucaccgagcugcugcagaaggaguacauggaccggcagggcaagaccccgcucggccugguggaccuguucguguucuccaccagcuucuaccucaucuccaucuuccugcaccuggucaagauccccacgcaccgccacaucguggggcggcccugccccaagccgcaccgccugaaccacaugggcaucugcagcugcgggcucuacaagcaccccggcgugcccgucaaguggaagcgguga

SEQ ID NO: 4370 - RNA, 1473 nt, Artificial Sequence
  derived and/or modified protein sequence (opt1) from LASV(ISTH2129-NIG-2012;Clade II)__AIT17544__GPCstabilized
augggccagaucaucaccuucuuccaggaggugccccacgucaucgaggaggugaugaacaucgugcugaucgcccucagccugcuggccauccucaaggggaucuacaacgucgcgaccugcggccuguucgggcugguguccuuccuccugcugugcggccgcagcugcuccacgaccuacaaggggguguacgagcuccagacccuggagcuggacaugggcagccucaacaugaccaugccgcuguccugcacgaagaacaacagccaccacuacaucauggucggcaacgagaccgggcuggagcucacccugaccaacacguccaucaucaaccacaaguucugcaaccugagcgacgcccacaagaagaaccucuacgaccacgcccugauguccaucaucagcaccuuccaccuguccauccccaacuucaaccaguacgaggccaugagcugcgacuucaacggcgggaagaucuccgugcaguacaaccucagccacuccuacgccguggacgcggccaaccacugcggcaccaucgccaacgggguccugcagaccuucaugcggauggccuggggcggcagcuacaucgcgcuggacuccgggugcggcagcugggacugcaucaugacguccuaccaguaccucaucauccagaacaccaccugggaggaccacugccaguucagccgccccagccccaucggguaccugggccugcucucccagcggacccgcgacaucuacaucagccggcgccggcgcggcacguucaccuggacccuguccgacagcgaggggaacgagaccccgggcggguacugccugacgcgguggaugcucaucgaggccgagcugaagugcuucggcaacaccgccguggccaagugcaacgagaagcacgacgaggaguucugcgacaugcugcgccucuucgacuucaacaagcaggccauccggcgccugaagacccccgcgcagauguccauccagcugaucaacaaggccgugaacgcccucaucaacgaccagcugaucaugaagaaccaccuccgggacaucaugugcauccccuacugcaacuacagcaaguacugguaccugaaccacaccgucacggggaagaccucccugccccgcugcuggcuggugagcaacggcuccuaccucaacgagacccacuucagcgacgacaucgagcagcaggccgacaacaugaucaccgagcugcugcagaaggaguacauggaccggcagggcaagacgccgcucgggcugguggaccuguucgucuucuccaccagcuucuaccucaucuccaucuuccugcaccuggugaagauccccacccaccgccacaucaucggcaagcccugccccaagccgcaccggcugaaccacauggggaucugcagcugcggccucuacaagcaccccggggugcccgucaaguggaagcgcuga

SEQ ID NO: 4371 - RNA, 1473 nt, Artificial Sequence
  derived and/or modified protein sequence (opt1) from LASV(ISTH2217-NIG-2012;Clade II)__AIT17548__GPCstabilized
augggccagaucaucaccuucuuccaggaggugccccacgucaucgaggaggugaugaacaucgugcugaucgcccucagccugcuggccauccucaaggggaucuacaacgucgcgaccugcggccuguucgggcugguguccuuccucuuccugugcggccgcagcugcuccacgaccuacaaggggguguacgagcugcagacccucgagcuggacauggccagccugaacaugaccaugccgcucuccugcacgaagaacaacagccaccacuacaucauggucggcaacgagaccggccuggagcugacccucaccaacacguccaucaucaaccacaaguucugcaaccugagcgacgcccacaagcggaaccuguacgaccacgcccucauguccaucaucagcaccuuccaccuguccauccccaacuucaaccaguacgaggccaugagcugcgacuucaacgggggcaagaucuccgugcaguacaaccugagccacgcguacgccggggacgccgccaagcacugcggcaccaucgcgaacggggugcuccagaccuucaugcgcauggccuggggcggcuccuacaucgcccuggacagcgggugcggcuccugggacugcaucaugacgagcuaccaguaccugaucauccagaacaccaccugggaggaccacugccaguucucccggcccagccccaucggguaccucggccugcugagccagcgcacccgggacaucuacaucucccgccggcgccggggcacguucaccuggacccucagcgacuccgaggggaacgagaccccgggcggguacugccugacgcgcuggaugcugaucgaggccgagcucaagugcuucggcaacaccgccgucgcgaagugcaacgagaagcacgacgaggaguucugcgacaugcugcggcuguucgacuucaacaagcaggccauccgccggcuccgcacccccgcccagaugagcauccagcugaucaacaaggccgugaacgcccugaucaacgaccagcucaucaugaagaaccaccuccgggacaucaugugcauccccuacugcaacuacuccaaguacugguaccugaaccacaccgugacggggaagaccagccugcccaagugcuggcuggucuccaacggcagcuaccugaacgagacccacuucuccgacgacaucgagcagcaggcggacaacaugaucaccgagaugcuccagaaggaguacaucgaccgccagggcaagacgccgcuggggcugguggaccucuucguguucagcaccuccuucuaccugaucagcaucuuccugcaccucgucaagauccccacccaccggcacgugaucggcaagcccugccccaagccgcaccgccugaaccacauggggaucugcuccugcggccuguacaagcaccccggggugcccgucaaguggaagcgguga

SEQ ID NO: 4372 - RNA, 1473 nt, Artificial Sequence
  derived and/or modified protein sequence (opt1) from LASV(ISTH2271-NIG-2012;Clade II)__AIT17552__GPCstabilized
augggccagaucaucaccuucuuccaggaggugccccacgucaucgaggaggugaugaacaucgugcugaucgcccucagccugcuggccauccucaaggggaucuacaacgucgcgaccugcggccuguucgggcugguguccuuccuccugcugugcggccgcagcugcuccacgaccuacaaggggguguacgagcuccagacccuggagcuggacauggccagccucaacaugaccaugccgcuguccugcacgaagaacaacagccaccacuacaucauggucggcaacgagaccggccuggagcucacccugaccaacacguccaucaucaaccacaaguucugcaaccugagcgacgcccacaagaagaaccucuacgaccacgcccugauguccaucaucagcaccuuccaccuguccauccccaacuucaaccaguacgaggccaugagcugcgacuucaacgggggcaagaucuccgugcaguacaaccucagccacgcguacgccgugaacgccgccaaccacugcgggaccaucgcgaacggcguccugcagaccuucaugcggauggccuggggcggguccuacaucgcccuggacagcggcugcggguccugggacugcaucaugacgagcuaccaguaccucaucauccagaacaccaccugggaggaccacugccaguucucccgccccagccccaucggcuaccuggggcugcucagccagcggacccgcgacaucuacaucucccggcgccggcgcggcacguucaccuggacccugagcgacuccgagggcaacgagacccccgggggcuacugccugacgcgguggaugcucaucgaggccgagcugaagugcuucgggaacaccgccguggcgaagugcaacgagaagcacgacgaggaguucugcgacaugcugcgccucuucgacuucaacaagcaggccauccggcgccugaagaccccggcccagaugagcauccagcugaucaacaaggccgugaacgcccucaucaacgaccagcugaucaugaagaaccaccuccgggacaucaugugcauccccuacugcaacuacuccaaguacugguaccugaaccacaccgucacgggcaagaccagccugccccgcugcuggcugguguccaacgggagcuaccucaacgagacccacuucuccgacgacaucgagcagcaggcggacaacaugaucaccgagcugcugcagaaggaguacauggaccggcagggcaagacgccgcucggccugguggaccuguucgucuucagcaccuccuucuaccucaucagcaucuuccugcaccuggugaagauccccacccaccgccacgugaucgggaagcccugccccaagccgcaccggcugaaccacaugggcaucugcuccugcgggcucuacaagcaccccggcguccccgugaaguggaagaaguga

SEQ ID NO: 4373 - RNA, 1473 nt, Artificial Sequence
  derived and/or modified protein sequence (opt1) from LASV(ISTH2304-NIG-2012;Clade II)__AIT17556__GPCstabilized
augggccagaucaucaccuucuuccaggaggugccccacgucaucgaggaggugaugaacaucgugcugaucgcccucagccugcuggccauccucaaggggaucuacaacgucgcgaccugcggccuguucgggcugguguccuuccuccugcugugcggccgcagcugcuccacgaccuacaaggggguguacgagcuccagacccuggagcuggacauggccagccucaacaugaccaugccgcuguccugcacgaagaacaacagccaccacuacaucauggucggcaacgagaccggccuggagcucacccugaccaacacguccaucaucaaccacaaguucugcaaccugagcgacgcccacaagaagaaccucuacgaccacgcccugauguccaucaucagcaccuuccaccuguccauccccaacuucaaccaguacgaggccaugagcugcgacuucaacgggggcaagaucuccgugcaguacaaccucagccacaccuacgcgguggacgccgccaaccacugcgggaccaucgccaacggcguccugcagacguucaugcggauggcguggggcggguccuacaucgcccuggacagcggcugcggguccugggacugcaucaugaccagcuaccaguaccucaucauccagaacaccaccugggaggaccacugccaguucucccgccccagccccaucggcuaccuggggcugcucagccagcggacgcgcgacaucuacaucucccggcgccggcgcggcaccuucaccuggacccugagcgacuccgagggcaacgagacgcccgggggcuacugccugacccgguggaugcucaucgaggccgagcugaagugcuucgggaacaccgccguggccaagugcaacgagaagcacgacgaggaguucugcgacaugcugcgccucuucgacuucaacaagcaggcgauccggcgccugaagaccccggcccagaugagcauccagcugaucaacaaggccgugaacgcccucaucaacgaccagcugaucaugaagaaccaccuccgggacaucaugugcauccccuacugcaacuacuccaaguacugguaccugaaccacacgaucaccggcaagaccagccugccccgcugcuggcuggucuccaacgggagcuaccucaacgagacccacuucuccgacgacaucgagcagcaggccgacaacaugaucacggagcugcugcagaaggaguacaucgaccggcagggcaagaccccgcucggccugguggaccuguucguguucagcaccuccuucuaccucaucagcaucuuccugcaccuggucaagauccccacccaccgccacaucacggggaagcccugccccaagccgcaccggcugaaccacaugggcaucugcuccugcgggcucuacaagcaccccggcgugcccgugcgcuggaagcgguga

SEQ ID NO: 4374 - RNA, 1473 nt, Artificial Sequence
  derived and/or modified protein sequence (opt1) from LASV(ISTH2312-NIG-2012;Clade II)__AIT17560__GPCstabilized
augggccagaucaucaccuucuuccaggaggugccccacgucaucgaggaggugaugaacaucgugcugaucgcccucagccugcuggccguccucaaggggaucuacaacguggcgaccugcggccuguucgggcugguguccuuccuccugcugugcggccgcagcugcuccacgaccuacaagggggucuacgagcuccagacccuggagcuggacauggccagccucaacaugaccaugccgcuguccugcacgaccaacaacagccaccacuacaucauggugggcaacgagaccggccuggagcucacccugacgaacaccuccaucaucaaccacaaguucugcaaccugagcgacgcccacaagaagaaccucuacgaccacgcccugauguccaucaucagcaccuuccaccuguccauccccaacuucaaccaguacgaggccaugagcugcgacuucaacgggggcaagaucuccgugcaguacaaccucagccacgcguacgccggggaggccgccaaccacugcggcaccaucgcgaacgggguccugcagacguucaugcggauggccuggggcggcuccuacaucgcccuggacagcgggugcggcuccugggacugcaucaugaccagcuacaaguaccucaucauccagaacaccaccuggggcgaccacugccaguucucccgccccagccccaucggguaccugggccugcucagccagcggacgcgcgacaucuacaucucccggcgccggcgcgggaccuucaccuggacccugagcgacuccgagggcaacgagacgcccgggggcuacugccugacccgguggaugcucaucgaggccgagcugaagugcuucgggaacaccgccguggcgaagugcaacgagaagcacgacgaggaguucugcgacaugcugcgccucuucgacuucaacaagcaggccauccggaagcugaagaccccggcccagaugagcauccagcugaucaacaaggccgugaacgcccucaucaacgaccagcugaucaugaagaaccaccuccgcgacaucaugugcauccccuacugcaacuacucccgguacugguaccugaaccacacggucaccggccgcaccagccugccccggugcuggcugguguccaacggcagcuaccucaacgagacccacuucuccgacgacaucgagcagcaggcggacaacaugaucacggagcugcugcagaaggaguacaucgaccgccaggggaagaccccgcucggccugguggaccuguucgucuucagcaccuccuucuaccucaucagcaucuuccugcaccuggugaagauccccacccaccggcacaucaucgggaagcccugccccaagccgcaccgccugaaccacaugggcaucugcuccugcgggcucuacaagcaccccggcgugcccgucaaguggaagcgguga

SEQ ID NO: 4375 - RNA, 1473 nt, Artificial Sequence
  derived and/or modified protein sequence (opt1) from LASV(ISTH2316-NIG-2012;Clade II)__AIT17564__GPCstabilized
augggccagaucaucaccuucuuccaggaggugccccacgucaucgaggaggugaugaacaucgugcugaucgcccucagccugcuggccauccucaaggggaucuacaacgucgcgaccugcggccuguucgggcugcucuccuuccugcugcucugcggccgcagcugcuccacgaccuacaaggggguguacgagcugcagacccuggagcucgacauggccagccugaacaugaccaugccgcuguccugcacgaagaacaacagccaccacuacaucauggugggcaacgagaccggccucgagcugacccugaccaacacguccaucaucaaccacaaguucugcaaccucagcgacgcccacaagaaggaccuguacgaccacgcccugauguccaucaucagcaccuuccaccucuccauccccaacuucaaccaguacgaggccaugagcugcgacuucaacgggggcaagaucuccguccaguacaaccugagccacgcguacgccguggacgccgccaagcacugcgggaccaucgcgaacggcgugcugcagaccuucaugcggauggccuggggcggguccuacaucgcccucgacagcggcugcggguccugggacugcaucaugacgagcuaccaguaccugaucauccagaacaccuccugggaggaccacugccaguucagccgccccagccccaucggcuaccuggggcuccugucccagcggacccgcgacaucuacaucagccggcgccggcgcggcaccuucacguggacccuguccgacagcgagggcaacgagacccccgggggcuacugccucacccgguggaugcugaucgaggccgagcugaagugcuucgggaacacggccgucgcgaagugcaacgagaagcacgacgaggaguucugcgacaugcuccgccuguucgacuucaacaagcaggccaucaagcggcugaagaccccggcccagauguccauccagcucaucaacaaggccgugaacgcccugaucaacgaccagcugaucaugaagaaccaccuccgcgacaucaugugcauccccuacugcaacuacagcaaguacugguaccugaaccacaccgugaccggcaagacgucccugccccggugcuggcucgucagcaacggguccuaccugaacgagacccacuucagcgacgacaucgagcagcaggcggacaacaugaucaccgagcugcuccagaaggaguacaucgaccgccagggcaagaccccgcugggccugguggaccucuucguguucuccacgagcuucuaccugaucuccaucuuccugcaccuggucaagauccccacccaccggcacgugaucgggaagcccugccccaagccgcaccgccucaaccacaugggcaucugcagcugcgggcuguacaagcaccccggcgugcccgucaaguggaagcgguga

SEQ ID NO: 4376 - RNA, 1473 nt, Artificial Sequence
  derived and/or modified protein sequence (opt1) from LASV(ISTH2358-NIG-2012;Clade II)__AIT17572__GPCstabilized
augggccagaucaucaccuucuuccaggaggugccccacgucaucgaggaggugaugaacaucgugcugaucgcccucagccugcuggccauccucaaggggaucuacaacgucgcgaccugcggccuguucgggcugguguccuuccuccugcugugcggccgcagcugcuccacgaccuacaaggggguguacgagcuccagacccuggagcuggacauggccaaccucaacaugaccaugccgcugagcugcacgaagaacaacucccaccacuacaucauggucggcaacgagaccggccuggagcucacccugaccaacacgagcaucaucaaccacaaguucugcaaccuguccgacgcccacaagaagaaccucuacgaccacgcccugaugagcaucaucuccaccuuccaccugagcauccccaacuucaaccaguacgaggccauguccugcgacuucaacgggggcaagaucagcgugcaguacaaccucucccacaacuacgcgguggacgccgccaaccacugcgggaccaucgccaacggcguccugcagaccuucaugcggauggcguggggcgggagcuacaucgcccuggacuccggcugcgggaacugggacugcaucaugacgagcuaccaguaccucaucauccagaacaccaccugggaggaccacugccaguucucccgccccagccccaucggcuaccuggggcugcucucccagcggacccgcgacaucuacaucagccggcgccggcgcggcacguucaccuggacccugagcgacuccgagggcaacgacaugcccgggggcuacugccugacccgguggaugcucaucgaggccgagcugaagugcuucgggaacacggccguggccaagugcaacgagaagcacgacgaggaguucugcgacaugcugcgccucuucgacuucaacaagcaggcgauccggcgccugaagaccccggcccagaugaacauccagcugaucaacaaggccgugaacgcccucaucaacgaccagcugaucaugaagaaccaccuccgggacaucaugugcauccccuacugcaacuacagcaaguacugguaccugaaccacaccgucaccggcaagacgucccugccccgcugcuggcuggugagcaacggguccuaccucaacgagacccacuucagcgacgacaucgagcagcaggccgacaacaugaucaccgagcugcugcagaaggaguacauggaccggcagggcaagaccccgcucggccugguggaccuguucgucuucuccacgagcuucuaccucaucuccaucuuccugcaccuggugaagauccccacccaccgccacaucaucgggaagcccugccccaagccgcaccggcugaaccacaugggcaucugcagcugcgggcucuacaagcaccccggcgugcccgucaaguggaagcgcuga

SEQ ID NO: 4377 - RNA, 1473 nt, Artificial Sequence
  derived and/or modified protein sequence (opt1) from LASV(ISTH2376-NIG-2012;Clade II)__AIT17576__GPCstabilized
augggccagaucaucaccuucuuccaggaggugccccacgucaucgaggaggugaugaacaucgugcugaucgcccucagccugcuggccauccucaaggggaucuacaacgucgcgaccugcggccuguucgggcugguguccuuccuccugcugugcggccgcagcugcuccacgaccuacaaggggguguacgagcuccagacccuggagcuggacauggccagccucaacaugaccaugccgcuguccugcacgaagaacaacagccaccacuacaucauggucggcaacgagaccggccuggagcucacccugaccaacacguccaucaucaaccacaaguucugcaaccugagcgacgcccacaagaagaaccucuacgaccacgcccugauguccaucaucagcaccuuccaccuguccauccccaacuucaaccaguacgaggccaugagcugcgacuucaacgggggcaagaucuccgugcaguacaaccucagccacaccuacgcgguggacgccgccaaccacugcgggaccaucgccaacggcguccugcagacguucaugcggauggcguggggcggguccuacaucgcccuggacagcggcugcgggaacugggacugcaucaugaccuccuaccaguaccucaucauccagaacaccaccugggaggaccacugccaguucagccgccccucccccaucggcuaccuggggcugcucagccagcggacgcgcgacaucuacaucagccggcgccggcgcggcaccuucaccuggacccuguccgacagcgagggcaacgagacgcccgggggcuacugccugacccgguggaugcucaucgaggccgagcugaagugcuucgggaacaccgccguggccaagugcaacgagaagcacgacgaggaguucugcgacaugcugcgccucuucgacuucaacaagcaggcgaucucccggcugaagaccccggcccagaugagcauccagcugaucaacaaggccgugaacgcccucaucaacgaccagcugaucaugaagaaccaccuccgcgacaucaugugcauccccuacugcaacuacuccaaguacugguaccugaaccacacggucaccggcaagaccagccugccccggugcuggcugguguccaacgggagcuaccucaacgagacccacuucuccgacgacaucgagcagcaggccgacaacaugaucacggagaugcugcagaaggaguacaucgaccgccagggcaagaccccgcugggccucguggaccuguucgucuucagcaccuccuucuaccugaucagcaucuuccuccaccuggugaagauccccacccaccggcacaucacggggaagcccugccccaagccgcaccgccugaaccacaugggcaucugcuccugcgggcuguacaagcaccccggcgugcccgucaaguggaagcgguga

SEQ ID NO: 4378 - RNA, 1473 nt, Artificial Sequence
  derived and/or modified protein sequence (opt1) from LASV(Lassa virus/H.sapiens-wt/NGA/2015/ISTH_0543;Clade II)__AVO03639__GPCstabilized
augggccagaucaucaccuucuuccaggaggugccccacgucaucgaggaggugaugaacaucgugcugaucgcccucagccugcuggccauccucaaggggaucuacaacgucgcgaccugcggccuguucgggcugguguccuuccuccugcugugcggccgcagcugcuccacgaccuacaaggggguguacgagcuccagacccuggagcuggacauggccaaccucaacaugaccaugccgcugagcugcacgaagaacaacucccaccacuacaucauggucggcaacgagaccggccuggagcucacccugaccaacacgagcaucaucaaccacaaguucugcaaccuguccgacgcccacaagaagaaccucuacgaccacgcccugaugagcaucaucuccaccuuccaccugagcauccccaacuucaaccaguacgaggccauguccugcgacuucaacgggggcaagaucagcgugcaguacaaccucucccacaccuacgcgguggacgccgccaaccacugcgggaccaucgccaacggcguccugcagacguucaugcggauggcguggggcgggagcuacaucgcccuggacuccggcugcgggagcugggacugcaucaugaccuccuaccaguaccucgugauccagaacaccaccugggaggaccacugccaguucagccgccccucccccaucggcuaccuggggcugcucagccagcggacgcgcgacaucuacaucagccggcgccggcgcggcaccuucaccuggacccuguccgacagcgagggcaacgagacgcccgggggcuacugccugacccgguggaugcucaucgaggccgagcugaagugcuucgggaacaccgccguggccaagugcaacgagaagcacgacgaggaguucugcgacaugcugcgccucuucgacuucaacaagcaggcgauccggcgccugaagaccccggcccagauguccauccagcugaucaacaaggccgucaacgcccucaucaacgaccagcugaucaugaagaaccaccuccgggacaucaugugcauccccuacugcaacuacagcaaguacugguaccugaaccacacggugaccggcaagaccucccugccccgcugcuggcuggugagcaacggguccuaccucaacgagacccacuucagcgacgacaucgagcagcaggccgacaacaugaucacggagcugcugcagaaggaguacaucgaccggcagggcaagaccccgcucggccuggucgaccuguucguguucuccaccagcuucuaccucaucuccaucuuccugcaccuggugaagauccccacccaccgccacaucacggggaagcccugccccaagccgcaccggcugaaccacaugggcaucugcagcugcgggcucuacaagcaccccggcguccccgugaaguggaagcgcuga

SEQ ID NO: 4379 - RNA, 1473 nt, Artificial Sequence
  derived and/or modified protein sequence (opt1) from LASV(Lassa virus/H.sapiens-wt/NGA/2015/ISTH_0547;Clade II)__AVO03583__GPCstabilized
augggccagaucaucaccuucuuccaggaggugccccacgucaucgaggaggugaugaacaucgugcugaucgcccucagccugcuggccauccucaaggggaucuacaacgucgcgaccugcggccuguucgggcugguguccuuccuccugcugugcggccgcagcugcuccacgaccuacaaggggguguacgagcuccagacccuggagcuggacauggccagccucaacaugaccaugccgcuguccugcacgaagaacaacagccaccacuacaucauggucggcaacgagaccggccuggagcucacccugaccaacacguccaucaucaaccacaaguucugcaaccugagcgacgcccacaagaagaaccucuacgaccacgcccugauguccaucaucagcaccuuccaccuguccauccccaacuucaaccaguacgaggccaugagcugcgacuucaacgggggcaagaucuccgugcaguacaaccucagccacaccuacgcgguggacgccgccaaccacugcgggaccaucgccaacggcguccugcagacguucaugcggauggcguggggcggguccuacaucgcccuggacagcggcugcggguccugggacugcaucaugaccagcuaccaguaccucaucauccagaacaccaccugggaggaccacugccaguucucccgccccagccccaucggcuaccuggggcugcucagccagcggacgcgcgacaucuacaucucccggcgccggcgcggcaccuucaccuggacccugagcgacuccgagggcaacgagacgcccgggggcuacugccugacccgguggaugcucaucgaggccgagcugaagugcuucgggaacaccgccguggccaagugcaacgagaagcacgacgaggaguucugcgacaugcugcgccucuucgacuucaacaagcaggcgauccggcgccugaagaccccggcccagaugagcauccagcugaucaacaaggccgugaacgcccucaucaacgaccagcugaucaugaagaaccaccuccgggacaucaugugcauccccuacugcaacuacuccaaguacugguaccugaaccacacggucaccggcaagaccagccugccccgcugcuggcugguguccaacgggagcuaccucaacgagacccacuucuccgacgacaucgagcagcaggccgacaacaugaucacggagcugcugcagaaggaguacaucgagcggcagggcaagaccccgcucggccugguggaccuguucgucuucagcaccuccuucuaccucaucagcaucuuccugcaccuggugaagauccccacccaccgccacaucacggggaagcccugccccaagccgcaccggcugaaccacaugggcaucugcuccugcgggcucuacaagcaccccggcgugcccgucaaguggaagcgcuga

SEQ ID NO: 4380 - RNA, 1473 nt, Artificial Sequence
  derived and/or modified protein sequence (opt1) from LASV(Lassa virus/H.sapiens-wt/NGA/2015/ISTH_0574;Clade II)__AVO03657__GPCstabilized
augggccagaucaucaccuucuuccaggaggugccccacgucaucgaggaggugaugaacaucgugcugaucgcccucagccugcuggccauccucaaggggaucuacaacgucgcgaccugcggccuguucgggcugguggccuuccuccugcugugcggccgcuccugcagcacgaccuacaaggggguguacgagcuccagacccuggagcuggacauggccucccucaacaugaccaugccgcugagcugcacgaagaacaacucccaccacuacaucauggucggcaacgagaccggccuggagcucacccugaccaacacgagcaucaucaaccacaaguucugcaaccuguccgacgcccacaagaagaaccucuacgaccacgcccugaugagcaucaucuccaccuuccaccugagcauccccaacuucaaccaguacgaggcgauguccugcgacuucaacgggggcaagaucagcgugcaguacaaccucucccacaccuacgccguggacgccgccaaccacugcgggaccaucacgaacggcguccugcagaccuucaugcggauggcguggggcgggagcuacaucgcccuggacuccggcugcgggagcugggacugcaucaugaccuccuaccaguaccucaucauccagaacaccacgugggaggaccacugccaguucagccgccccucccccaucggcuaccuggggcugcucagccagcggacccgcgacaucuacaucagccggcgccggcgcggcaccuucaccuggacgcuguccgacagcgagggcaacgagacccccgggggcuacugccugacccgguggaugcucaucgaggccgagcugaagugcuucgggaacaccgccguggccaagugcaacgagaagcacgacgaggaguucugcgacaugcugcgccucuucgacuucaacaagcaggcgauccggcgccugaagacgccggcccagauguccauccagcugaucaacaaggccgugaacgcccucaucaacgaccagcugaucaugaagaaccaccuccgggacaucaugugcauccccuacugcaacuacagcaaguacugguaccugaaccacaccgucaccggccgcaccucccugccccggugcuggcuggugagcaacggguccuaccucaacgagacgcacuucagcgacgacaucgagcagcaggccgacaacaugaucaccgagcugcugcagaaggaguacauggaccgccagggcaagaccccgcucggccugguggaccuguucgucuucuccaccagcuucuaccucaucuccaucuuccugcaccugaucaagauccccacgcaccggcacgugaucgggaagcccugccccaagccgcaccgccugaaccacaugggcaucugcagcugcgggcucuacaagcaccccggcgugcccgucaaguggaagcgguga

SEQ ID NO: 4381 - RNA, 1473 nt, Artificial Sequence
  derived and/or modified protein sequence (opt1) from LASV(Lassa virus/H.sapiens-wt/NGA/2015/ISTH_0681;Clade II)__AVO03617__GPCstabilized
augggccagaucaucaccuucuuccaggaggugccccacgucaucgaggaggugaugaacaucgugcugaucgcccucagccugcuggccauccucaaggggaucuacaacgucgcgaccugcggccuguucgggcugguguccuuccuccugcugugcggccgcagcugcuccacgaccuacaaggggguguacgagcuccagacccuggagcuggacauggccagccucaacaugaccaugccgcuguccugcacgaagaacaacagccaccacuacaucauggucggcaacgagaccggccuggagcucacccugaccaacacguccaucaucaaccacaaguucugcaaccugagcgacgcccacaagaagaaccucuacgaccacgcccugauguccaucaucagcaccuuccaccuguccauccccaacuucaaccaguacgaggccaugagcugcgacuucaacgggggcaagaucuccgugcaguacaaccucagccacaccuacgcggagggggccgccaaccacugcggcaccaucgccaacggggugcugcagacguucaugcggauggcguggggcggcuccuacaucgcccuggacagcgggugcggcuccugggacugcaucaugaccagcuaccaguaccucaucauccagaacaccaccugggaggaccacugccaguucucccgccccagccccaucggguaccugggccugcucagccagcggacgcgcgacaucuacaucucccggcgccggcgcggcaccuucaccuggacccugagcgacuccgaggggaacgagacgccgggcggguacugccugacccgguggaugcucaucgaggccgagcugaagugcuucggcaacaccgccgucgccaagugcaacgagaagcacgacgaggaguucugcgacaugcugcgccucuucgacuucaacaagcaggcgaucaugcggcugaagacccccgcccagaugagcauccagcugaucaacaaggccgugaacgcccucaucaacgaccagcugaucaugaagaaccaccuccgcgacaucaugugcauccccuacugcaacuacuccaaguacugguaccugaaccacacggugaccgggaagaccagccugccccggugcuggcuggucuccaacggcagcuaccucaacgagacccacuucuccgacgacaucgagcagcaggccgacaacaugaucacggagaugcugcagaaggaguacauggaccgccagggcaagaccccgcuggggcucguggaccuguucguguucagcaccuccuucuaccugaucagcaucuuccuccaccuggucaagauccccacccaccggcacgugaucggcaagcccugccccaagccgcaccgccugaaccacauggggaucugcuccugcggccuguacaagcaccccggggugcccgucaaguggaagcgguga

SEQ ID NO: 4382 - RNA, 1473 nt, Artificial Sequence
  derived and/or modified protein sequence (opt1) from LASV(Lassa virus/H.sapiens-wt/NGA/2015/ISTH_0682;Clade II)__AVO03625__GPCstabilized
augggccagaucaucaccuucuuccaggaggugccccacgucaucgaggaggugaugaacaucgugcugaucgcccucagccugcuggccauccucaaggggaucuacaacgucgcgaccugcggccuguucgggcugguguccuuccuccugcugugcggccgcagcugcuccacgaccuacaaggggguguacgagcuccagacccuggagcuggacauggccagccucaacaugaccaugccgcuguccugcacgaagaacaacagccaccacuacaucauggucggcaacgagaccggccuggagcucacccugaccaacacguccaucaucaaccacaaguucugcaaccugagcgacgcccacaagaagaaccucuacgaccacgcccugauguccaucaucagcaccuuccaccuguccauccccaacuucaaccaguacgaggccaugagcugcgacuucaacgggggcaagaucuccgugcaguacaaccucagccacgcguacgccguggacgccgccaaccacugcgggaccaucgcgaacggcguccugcagaccuucaugcggauggccuggggcggguccuacaucgcccuggacagcggcugcggguccugggacugcaucaugacgagcuaccacuaccucaucauccagaacaccaccugggaggaccacugccaguucucccgccccagccccaucggcuaccuggggcugcucagccagcggacccgcgacaucuacaucucccggcgccggcgcggcacguucaccuggacccugagcgacuccgagggcaacgagacccccgggggcuacugccugacgcgguggaugcucaucgaggccgagcugaagugcuucgggaacaccgccguggcgaagugcaacgagaagcacgacgaggaguucugcgacaugcugcgccucuucgacuucaacaagcaggccauccggcgccugaagaccccggcccagaugagcauccagcugaucaacaaggccgugaacgcccucaucaacgaccagcugaucaugaagaaccaccuccgggacaucaugugcauccccuacugcaacuacuccaaguacugguaccugaaccacaccgucacgggcaagaccagccugccccgcugcuggcugguguccaacgggagcuaccucaacgagacccacuucuccgacgacaucgagcagcaggcggacaacaugaucaccgagcugcugcagaaggaguacaucgaccggcagggcaagacgccgcucggccugguggaccuguucgucuucagcaccuccuucuaccucaucagcaucuuccugcaccuggugaagauccccacccaccgccacgugaucgggaagcccugccccaagccgcaccggcugaaccacaugggcaucugcuccugcgggcucuacaagcaccccggcguccccgugaaguggaagcgcuga

SEQ ID NO: 4383 - RNA, 1473 nt, Artificial Sequence
  derived and/or modified protein sequence (opt1) from LASV(Lassa virus/H.sapiens-wt/NGA/2015/ISTH_0687;Clade II)__AVO03581__GPCstabilized
augggccagaucaucaccuucuuccaggaggugccccacgucaucgaggaggugaugaacaucgugcugaucgcccucagccugcuggccauccucaaggggaucuacaacgucgcgaccugcggccuguucgggcugguguccuuccuccugcugugcggccgcagcugcuccacgaccuacaaggggguguacgagcuccagacccuggagcuggacaugaccaaccucaacaugacgaugccgcugagcugcaccaagaacaacucccaccacuacaucauggucggcaacgagaccggccuggagcucacccugacgaacaccagcaucaucaaccacaaguucugcaaccuguccgacgcccacaagaagaaccucuacaaccacgcccugaugagcaucaucuccaccuuccaccugagcauccccaacuucaaccaguacgaggccauguccugcgacuucaacgggggcaagaucagcgugcaguacaaccucucccacaccuacgccguggacgcggccaaccacugcgggacggucgccaacggcgugcugcagaccuucaugcggauggccuggggcgggagcuacaucgcgcuggacuccggcugcgggggcugggacugcaucaugaccagcuaccaguaccucaucauccagaacaccacgugggaggaccacugccaguucucccgccccagccccaucggguaccugggccugcucucccagcggacccgcgacaucuacaucagccggcgccggcgcggcaccuucaccuggacgcugagcgacuccgaggggaacgagaccccgggcggguacugccugacccgguggaugcucaucgaggccgagcugaagugcuucggcaacaccgccguggccaagugcaacgagaagcacgacgaggaguucugcgacaugcugcgccucuucgacuucaacaagcaggccauccggaagcugaaggcgcccgcccagaugagcauccagcugaucaacaaggccgucaacgcccucaucaacgaccagcugaucaugaagaaccaccuccgcgacaucaugugcauccccuacugcaacuacuccaaguacugguaccugaaccacacggugaccgggaagaccagccugcccaagugcuggcugguguccaacggcagcuaccucaacgagacccacuucuccgacgacaucgagcagcaggccgacaacaugaucacggagcugcugcagaaggaguacauggaccggcagggcaagaccccgcucgggcuggucgaccuguucguguucagcaccuccuucuaccucaucagcaucuuccugcaccuggugaagauccccacccaccgccacaucaucggcaagcccugccccaagccgcaccggcugaaccacauggggaucugcuccugcggccucuacaagcaccccgggguccccgugaaguggaagcgcuga

SEQ ID NO: 4384 - RNA, 1473 nt, Artificial Sequence
  derived and/or modified protein sequence (opt1) from LASV(Lassa virus/H.sapiens-wt/NGA/2015/ISTH_0736;Clade II)__AVO03573__GPCstabilized
augggccagaucaucaccuucuuccaggaggugccccacgucaucgaggaggugaugaacaucgugcugaucgcccucagccugcuggccguccucaaggggaucuacaacguggcgaccugcggccuguucgggcugguguccuuccuccugcugugcggccgcagcugcuccacgaccuacaagggggucuacgagcuccagacccuggagcuggacauggccagccucaacaugaccaugccgcuguccugcacgaagaacaacagccaccacuacaucauggugggcaacgagaccggccuggagcucacccugaccaacacguccaucaucaaccacaaguucugcaaccugagcgacgcccacaagaagaaccucuacgaccacgcccugauguccaucaucagcaccuuccaccuguccauccccaacuucaaccaguacgaggccaugagcugcgacuucaacgggggcaagaucuccgugcaguacaaccucagccacacccacgcggucgacgccgccaaccacugcgggaccaucgccaacggcgugcugcagacguucaugcggauggcguggggcggguccuacaucgcccuggacagcggcugcggguccugggacugcaucaugaccagcuaccaguaccucaucauccagaacaccaccugggaggaccacugccaguucucccgccccagccccaucggcuaccuggggcugcucagccagcggacgcgcgacaucuacaucucccggcgccggcgcggcaccuucaccuggacccugagcgacuccgagggcaacgagacgcccgggggcuacugccugacccgguggaugcucaucgaggccgagcugaagugcuucgggaacaccgccguggccaagugcaacgagaagcacgacgaggaguucugcgacaugcugcgccucuucgacuucaacaagcaggcgauccggcgccugaagaccccggcccagaugagcauccagcugaucaacaaggccgucaacgcccucaucaacgaccagcugaucaugaagaaccaccuccgggacaucaugugcauccccuacugcaacuacucccgcuacugguaccugaaccacacggugaccggcaagaccagccugccccggugcuggcugguguccaacgggagcuaccucaacgagacccacuucuccgacgacaucgagcagcaggccgacaacaugaucacggagcugcugcagaaggaguacaucgaccgccagggccggaccccgcucggccuggucgaccuguucguguucagcaccuccuucuaccucaucagcaucuuccugcaccuggugaagauccccacccaccgccacgucaucgggaagcccugccccaagccgcaccggcugaaccacaugggcaucugcuccugcgggcucuacaagcaccccggcgugcccgugaaguggaagcgcuga

SEQ ID NO: 4385 - RNA, 1473 nt, Artificial Sequence
  derived and/or modified protein sequence (opt1) from LASV(Lassa virus/H.sapiens-wt/NGA/2015/ISTH_0789;Clade II)__AVO03551__GPCstabilized
augggccagaucgugaccuucuuccaggaggucccccacgugaucgaggagaucaugaacaucgugcugaucacccucagccugcuggccauccucaagggggucuacaaccuggccacgugcggccugaucgggcucaucaccuuccuguuccugugcggccgcuccugcagcaccaucuacaagggguccuaccaguuccagacccucgagcugaacauggagacgcugaacaugaccaugccgcucagcugcaccaagaacuccagccaccacuacauccggguguccaacgagaccggccuggagcugacgcucaccaacaccagcaucaucaaccacaaguucugcaaccuguccgacgcgcacaagaagaaccuguacgaccacacccucaugagcaucaucuccacguuccaccugagcauccccaacuucaaccaguacgaggccauguccugcgacuucaacggcgggaagaucagcgugcaguacaaccugucccacagcuacgccgucgacgccgccaaccacugcggcaccguggcgaacggggugcuccagaccuucaugcgcauggccuggggcggguccuacaucgcccuggacagcggcugcggcaacugggacugcaucaugaccuccuaccaguaccugaucauccagaacacgaccugggaggaccacugccaguucagccggcccagccccaucggguaccucggccugcugucccagcgcacccgggacaucuacaucagccgccggcgccgggggaccuucacguggacccucuccgacagcgagggcaaggagaccccgggcggguacugccugacccgcuggaugcugaucgaggccgagcucaagugcuucggcaacacggcggucgccaagugcaacgagaagcacgacgaggaguucugcgacaugcugcggcuguucgacuucaacaagcaggccauccagcgccucaaggcccccgcccagauguccauccagcugaucaacaaggcggugaacgcccugaucaacgaccagcucaucaugaagaaccaccuccgggacaucaugugcauccccuacugcaacuacagcaaguacugguaccugaaccacaccuccaccgggcgcaccagccugcccaagugcuggcugguguccaacggcagcuaccugaacgagacgcacuucuccgacgacaucgagcagcaggccgacaacaugaucaccgagaugcuccagaaggaguacaucgaccggcaggggaagaccccgcugggccuggucgaccucuucguguucagcaccuccuucuaccugaucagcaucuuccugcaccucgugaagauccccacgcaccgccacaucgucggcaaguccugccccaagccccaccggcugaaccacauggggaucugcagcugcggccuguacaagcgcccgggggugcccgugaaguggaagcgguga

SEQ ID NO: 4386 - RNA, 1473 nt, Artificial Sequence
  derived and/or modified protein sequence (opt1) from LASV(Lassa virus/H.sapiens-wt/NGA/2015/ISTH_0821;Clade II)__AVO03641__GPCstabilized
augggccagaucaucaccuucuuccaggaggugccccacgucaucgaggaggugaugaacaucgugcugaucgcccucagccugcuggccauccucaaggggaucuacaacgucgcgaccugcggccuguucgggcugguguccuuccuccugcugugcggccgcagcugcuccacgaccuacaaggggguguacgagcuccagacccuggagcuggacauggccagccucaacaugaccaugccgcuguccugcacgaagaacaacagccaccacuacaucauggucggcaacgagaccggccuggagcucacccugaccaacacguccaucaucaaccacaaguucugcaaccugagcgacgcccacaagaagaaccucuacgaccacacccugauguccaucaucagcaccuuccaccuguccauccccaacuucaaccaguacgaggccaugagcugcgacuucaacgggggcaagaucuccgugcaguacaaccucagccacaccuacgccguggacgcggccaaccacugcgggacgaucgccaacggcguccugcagaccuucaugcggauggccuggggcggguccuacaucgcgcuggacagcggcugcgggaacugggacugcaucaugaccuccuaccaguaccucaucauccagaacaccacgugggaggaccacugccaguucagccgccccucccccaucggcuaccuggggcugcucagccagcggacccgcgacaucuacaucagccggcgccggcgcggcaccuucaccuggacgcuguccgacagcgagggcaacgagacccccgggggcuacugccugacccgguggaugcucaucgaggccgagcugaagugcuucgggaacaccgccguggccaagugcaacgagaagcacgacgaggaguucugcgacaugcugcgccucuucgacuucaacaagcaggccaucucccggcugaagacgccggcgcagaugagcauccagcugaucaacaaggccgugaacgcccucaucaacgaccagcugaucaugaagaaccaccuccgcgacaucaugugcauccccuacugcaacuacuccaaguacugguaccugaaccacaccgucaccggcaagaccagccugccccggugcuggcugguguccaacgggagcuaccucaacgagacgcacuucuccgacgacaucgagcagcaggccgacaacaugaucaccgagaugcugcagaaggaguacaucgaccgccagggcaagaccccgcugggccucguggaccuguucgucuucagcaccuccuucuaccugaucagcaucuuccuccaccuggugaagauccccacgcaccggcacgugaucgggaagcccugccccaagccgcaccgccugaaccacaugggcaucugcuccugcgggcuguacaagcaccccggcguccccgugaaguggaagcgguga

SEQ ID NO: 4387 - RNA, 1473 nt, Artificial Sequence
  derived and/or modified protein sequence (opt1) from LASV(Lassa virus/H.sapiens-wt/NGA/2015/ISTH_0831;Clade II)__AVO03545__GPCstabilized
augggccagaucgugaccuucuuccaggaggucccccacgugaucgaggagaucaugaacaucgugcugaucacccucagccugcuggccauccucaagggggucuacaaccuggccacgugcggccugaucgggcucaucaccuuccuguuccugugcggccgcuccugcagcaugaccuacaagggguccuaccagcucgagacccuggagcugaacauggagacgcucaacaugaccaugccgcugagcugcaccaagaacaccucccaccacuacauccgggugggcaacgagacgggccuggagcucacccugaccaacaccagcaucaucaaccacaaguucugcaaccuguccgacgcgcacaagaagaaccucuacgaccacagccugauguccaucgugagcacguuccaccuguccauccccaacuucaaccaguacgaggccaugagcugcgacuucaacgggggcaagaucuccauccaguacaaccucagccacgccuacgccggggacgccgcgaagcacugcggcacccuggccaacgggguccugcagaccuucaugcgcauggccuggggcggcuccuacaucgcccucgacagcgggugcggcaacugggacugcaucaugaccuccuaccaguaccugaucauccagaacacgaccugggacgaccacugccaguucagccggcccucccccaucggguaccugggccuccugagccagcgcacccgggagaucuacaucagccgccggcgccggggcaccuucacguggacccuguccgacagcgaggggaacgaggcgccgggcggguacugccucacccgcuggaugcugaucgaggccgagcugaagugcuucggcaacaccgccguggccaagugcaacgagaagcacgacgaggaguucugcgacaugcuccggcuguucgacuucaacaagcaggccauccagcgccugaagacgcccgcgcagauguccauccagcucaucaacaaggccgugaacgcccugaucaacgaccagcugaucaugaagaaccaccuccgggacaucaugugcauccccuacugcaacuacagcaaguacugguaccugaaccacaccaccaccgggcgcacgucccugccccggugcuggcucgucagcaacggcuccuaccugaacgagacccacuucagcgacgacaucgagcagcaggccgacaacaugaucaccgagaugcugcagaaggaguacaucgaccgccagggcaagaccccgcucgggcugguggaccuguucguguucuccacgagcuucuaccucaucuccaucuuccugcaccuggucaagauccccacccaccggcacaucgugggcaagagcugccccaagccccaccgccugaaccacauggggaucugcuccugcggccucuacaagcagccgggggugcccguccgguggaagcgcuga

SEQ ID NO: 4388 - RNA, 1473 nt, Artificial Sequence
  derived and/or modified protein sequence (opt1) from LASV(Lassa virus/H.sapiens-wt/NGA/2016/ISTH_0009;Clade II)__AVO03571__GPCstabilized
augggccagaucaucaccuucuuccaggaggugccccacgucaucgaggaggugaugaacaucgugcugaucgcccucagccugcuggccauccucaaggggaucuacaacgucgcgaccugcggccugcuggggcucguguccuuccugcugcucugcggccgcagcugcuccacgaccuacaaggggguguacgagcugcagacccuggagcucgacauggccagccugaacaugaccaugccgcuguccugcacgaagaacaacagccaccacuacaucauggucggcaacgagaccggccucgagcugacccugaccaacacguccaucaucaaccacaaguucugcaaccucagcgacgcccacaagaagaaccuguacgaccacgcccugauguccaucaucagcaccuuccaccucuccauccccaacuucaaccaguacgaggccaugagcugcgacuucaacgggggccggaucuccgugcaguacaaccugagccacuccuacgcgguggacgccgccaaccacugcgggaccaucgccaacggcguccugcagaccuucaugcgcauggcguggggcgggagcuacaucgcccucgacuccggcugcgggagcugggacugcaucaugacguccuaccaguaccugaucauccagaacaccaccugggaggaccacugccaguucagccggcccagccccaucggcuaccuggggcuccugucccagcgcacccgggacaucuacaucagccgccggcgccggggcacguucaccuggacccuguccgacagcgagggcaacgagacccccgggggcuacugccucacgcgcuggaugcugaucgaggccgagcugaagugcuucgggaacaccgccguggccaagugcaacgagaagcacgacgaggaguucugcgacaugcuccggcuguucgacuucaacaagcaggcgauccgccggcugaagaccccggcccagauguccauccagcucaucaacaaggccgugaacgcccugaucaacgaccagcugaucaugaagaaccaccuccgcgacaucaugugcauccccuacugcaacuacagcaaguacugguaccugaaccacaccgucacgggcaagaccucccugccccggugcuggcucgugagcaacggguccuaccugaacgagacccacuucagcgacgacaucgagcagcaggccgacaacaugaucaccgagcugcuccagaaggaguacaucgaccgccagggcaagacgccgcugggccugguggaccucuucgucuucuccaccagcuucuaccugaucuccaucuuccugcaccuggugaagauccccacccaccggcacaucaccgggaagcccugccccaagccgcaccgccucaaccacaugggcaucugcagcugcgggcuguacaaccaccccggcgugcccgucaaguggaagcgguga

SEQ ID NO: 4389 - RNA, 1473 nt, Artificial Sequence
  derived and/or modified protein sequence (opt1) from LASV(Lassa virus/H.sapiens-wt/NGA/2016/ISTH_0017;Clade II)__AVO03567__GPCstabilized
augggccagaucaucaccuucuuccaggaggugccccacgucaucgaggaggugaugaacaucgugcugaucgcccucagccugcuggccauccucaaggggaucuacaacgucgcgaccugcggccuguucgggcugguguccuuccuccugcugugcggccgcagcugcuccacgaccuacaaggggguguacgagcuccagacccuggagcuggacauggccagccucaacaugaccaugccgcuguccugcacgaagaacaacagccaccacuacaucauggucggcaacgagaccggccuggagcucacccugaccaacacguccaucaucaaccacaaguucugcaaccugagcgacgcccacaagaagaaccucuacgaccacgcccugauguccaucaucagcaccuuccaccuguccauccccaacuucaaccaguacgaggccaugagcugcgacuucaacgggggcaagaucuccgugcaguacaaccucagccacaccuacgcgaucgacgccgccaaccacugcgggaccaucgccaacggcgugcugcagacguucaugcggauggcguggggcggguccuacaucgcccuggacagcggcugcggguccugggacugcaucaugaccagcuaccaguaccucaucauccagaacaccaccugggaggaccacugccaguucucccgccccagccccaucggcuaccuggggcugcucagccagcggacgcgcgacaucuacaucucccggcgccggcgcggcaccuucaccuggacccugagcgacuccgagggcaacgagacgcccgggggcuacugccugacccgguggaugcucaucgaggccgagcugaagugcuucgggaacaccgccgucgccaagugcaacgagaagcacgacgaggaguucugcgacaugcugcgccucuucgacuucaacaagcaggcgauccggcgccugaagaccccggcccagaugagcauccagcugaucaacaaggccgugaacgcccucaucaacgaccagcugaucaugaagaaccaccuccgggacaucaugugcauccccuacugcaacuacuccaaguacugguaccugaaccacacggugaccggcaagaccagccugccccgcugcuggcuggucuccaacgggagcuaccucaacgagacccacuucuccgacgacaucgagcagcaggccgacaacaugaucacggagcugcugcagaaggaguacauggaccggcagggcaagaccccgcucggccugguggaccuguucguguucagcaccuccuucuaccucaucagcaucuuccugcaccugguccgcauccccacccaccggcacgugaucgggaagcccugccccaagccgcaccgccugaaccacaugggcaucugcuccugcgggcucuacaagcaccccggcgugcccgucaaguggaagcgguga

SEQ ID NO: 4390 - RNA, 1473 nt, Artificial Sequence
  derived and/or modified protein sequence (opt1) from LASV(Lassa virus/H.sapiens-wt/NGA/2016/ISTH_0035;Clade II)__AVO03619__GPCstabilized
augggccagaucaucaccuucuuccaggaggugccccacgucaucgaggaggugaugaacaucgugcugaucgcccucagccugcuggccauccucaaggggaucuacaacgucgcgaccugcggccuguucgggcugguguccuuccuccugcugugcggccgcagcugcuccaugacguacaaggggguguacgagcuccagacccuggagcuggacauggccagccucaacaugaccaugccgcuguccugcaccaagaacaacagccaccacuacaucauggucggcaacgagacgggccuggagcucacccugaccaacaccuccaucaucaaccacaaguucugcaaccugagcgacgcccacaagaagaaccucuacgaccacgcccugauguccaucaucagcacguuccaccuguccauccccaacuucaaccaguacgaggccaugagcugcgacuucaacgggggcaagaucuccgugcaguacaaccucagccacaccuacgcgguggacgccgccaaccacugcgggaccaucgccaacggcguccugcagaccuucaugcggauggcguggggcggguccuacaucgcccuggacagcggcugcggguccugggacugcaucaugacgagcuaccaguaccucaucauccagaacaccaccugggaggaccacugccaguucucccgccccagccccaucggcuaccuggggcugcucagccagcggacccgcgacaucuacaucucccggcgccggcgcggcacguucaccuggacccugagcgacuccgagggcaacgagacccccgggggcuacugccugacgcgguggaugcucaucgaggccgagcugaagugcuucgggaacaccgccguggccaagugcaacgagaagcacgacgaggaguucugcgacaugcugcgccucuucgacuucaacaagcaggcgauccggcgccugaagaccccggcccagaugagcauccagcugaucaacaaggccgugaacgcccucaucaacgaccagcugaucaugaagaaccaccuccgggacaucaugugcauccccuacugcaacuacuccaaguacugguaccugaaccacaccaucacgggcaagaccagccugccccgcugcuggcuggucuccaacgggagcuaccucaacgagacccacuucuccgacgacaucgagcagcaggccgacaacaugaucaccgagcugcugcagaaggaguacauggaccggcagggcaagacgccgcucggccugguggaccuguucguguucagcaccuccuucuaccucaucagcaucuuccugcaccuggucaagauccccacccaccgccacgugaucgggaagcccugccccaagccgcaccggcugaaccacaugggcaucugcuccugcgggcucuacaagcaccccggcgugcccgucaaguggaagcgcuga

SEQ ID NO: 4391 - RNA, 1473 nt, Artificial Sequence
  derived and/or modified protein sequence (opt1) from LASV(Lassa virus/H.sapiens-wt/NGA/2016/ISTH_0104;Clade II)__AVO03631__GPCstabilized
augggccaggugaucaccuucuuccaggaggucccccacgugaucgaggaggugaugaacaucguccugaucgcccucagccugcuggccauccucaaggggaucuacaacguggcgaccugcggccuguucgggcugaucuccuuccuccugcugugcggccgcagcugcuccacgaccuacaaggggguguacgagcuccagacccuggagcugaacaugcagaaccucaacaugaccaugccgcugagcugcacgaagaacuccagccaccacuacaucauggucggcaacgagaccggccuggagcucacccugaccaacacguccaucaucaaccacaaguucugcaaccugagcgacgcccacaagaagaaccucuacgaccacgcccugauguccaucaucagcaccuuccaccuguccauccccaacuucaaccaguacgaggccaugagcugcgacuucaacgggggcaagaucuccgugcaguacaaccucagccacaccuacgccaucgacgcggccaaccacugcgggaccguggccaacggcguccugcagacguucaugcggauggccuggggcggguccuacaucgcgcuggacagcggcugcgggaacugggacugcaucaugaccuccuaccaguaccucaucauccagaacaccaccugggaggaccacugccaguucagccgccccucccccaucggcuaccuggggcugcucagccagcggacgcgcgacaucuacaucagccggcgccggcgcggcaccuucaccuggacccuguccgacagcgagggcaacgaggcccccgggggcuacugccugacgcgguggaugcucaucgaggccgagcugaagugcuucgggaacaccgccguggccaagugcaacgagaagcacgacgaggaguucugcgacaugcugcgccucuucgacuucaacaagcaggcgaucaagcggcugaagaccccggcccagauguccauccagcugaucaacaaggccgugaacgcccucaucaacgaccagcugaucaugaagaaccaccuccgcgacaucaugugcauccccuacugcaacuacagcaaguacugguaccugaaccacaccgucacgggccggaccucccugccccgcugcuggcuggugagcaacggguccuaccucaacgacacccaguucagcgacgacaucgagcagcaggccgacaacaugaucaccgagaugcugcagaaggaguacauggaccggcagggcaagacgccgcugggccucguggaccuguucgucuucuccaccagcuucuaccugaucuccaucuuccuccaccuggugaagauccccacccaccgccacaucguggggcggcccugccccaagccgcaccgccugaaccacaugggcaucugcagcugcgggcuguacaagcaccccggcguccccgugaaguggaagcgguga

SEQ ID NO: 4392 - RNA, 1476 nt, Artificial Sequence
  derived and/or modified protein sequence (opt1) from LASV(Lassa virus/H.sapiens-wt/NGA/2016/ISTH_0133;Clade II)__AVO03635__GPCstabilized
augggccagaucaucaccuucuuccaggaggugccccacgucaucgaggaggugaugaacaucgugcugaucgcccucagccugcuggccguccucaaggcgaucuacaacguggcgaccugcgggguguucggccugaucuccuuccugcuccugugcgggcgcagcugcuccacgaccuacaagggcgucuacgagcugcagacccucgagcuggacauggccaaccugaacaugaccaugccgcucagcugcacgaagaacaacucccaccacuacaucaugguggggaacgagaccggccuggagcugacccucaccaacacgagcaucaucaaccacaaguucugcaaccuguccgacgcccacaagaagaaccuguacgaccacagccucauguccaucaucagcaccuuccaccuguccauccccaacuucaaccaguacgaggccaugagcugcgacuucaacggcgggaagaucuccgugcaguacaaccugagccacuccuacgccgucgacgccgccaagcacugcggcaccaucgccaacggggugcuccagaccuucaugcggauggcguggggcgggagcuacaucgcccuggacuccggcaagugcggcugggacugcaucaugacgagcuaccaguaccugaucauccagaacaccaccugggaggaccacugccaguucucccgccccagccccaucggguaccucggccugcugagccagcggacccgcgacaucuacaucucccggcgccuccggcgcacguucaccuggacccugagcgacuccgaggggaacgacgccccgggcggcuacugccugacccgguggaugcucaucgaggccgagcugaagugcuucgggaacacggccaucgcgaagugcaacgagaagcacgacgaggaguucugcgacaugcugcgccucuucgacuucaaccggcaggccaucaagcgccugaagaccgagccccagaugagcauccagcugaucaacaaggccgugaacgcccucaucaacgaccagcugaucaugaagaaccaccuccgggacaucaugggcugccccuacugcaacuacuccaaguacugguaccugaaccacaccaucaccgggaagacgagccugccccgcugcuggcuggucuccaacggcagcuaccucaacgagacccacuucuccgacgacaucgagcagcaggccgacaacaugaucaccgagcugcugcagaaggaguacauggaccggcaggggaagaccccgcucggccugguggaccuguucguguucagcacguccuucuaccucaucagcaucuuccugcaccuggucaagauccccacccaccgccacaucgugggcaagcccugccccaagccgcaccggcugaaccacauggggaucugcuccugcggccucuacaagcaccccggggugcccgucaaguggaagcgccaguga

SEQ ID NO: 4393 - RNA, 1473 nt, Artificial Sequence
  derived and/or modified protein sequence (opt1) from LASV(Lassa virus/H.sapiens-wt/NGA/2016/ISTH_0141;Clade II)__AVO03649__GPCstabilized
augggccagaucaucaccuucuuccaggaggugccccacgucaucgaggaggugaugaacaucgugcugaucacccucagccugcuggccauccucaaggggaucuacaacgucgccacgugcggccuguucgggcugguguccuuccuccugcugugcggccgcagcugcuccaccaucuacaaggggguguacgagcuccagacccuggagcuggacauggcgagccucaacaugaccaugccgcuguccugcacgaagaacaacagccaccacuacaucauggucggcaacgagaccggccuggagcucacccugaccaacacguccaucaucaaccacaaguucugcaaccugagcgacgcccacaagaagaaccucuacgaccacgcccugauguccaucaucagcaccuuccaccuguccauccccaacuucaaccaguacgaggccaugagcugcgacuucaacgggggcaagaucuccgugcaguacaaccucagccacaccuacgccguggacgcggccgagcacugcgggaccaucgccaacggcguccugcagacguucaugcggauggccuggggcggguccuacaucgcgcuggacagcggcugcggguccugggacugcaucaugaccagcuaccaguaccucaucauccagaacaccaccugggaggaccacugccaguucucccgccccagccccaucggcuaccuggggcugcucagccagcggacgcgcgacaucuacaucucccggcgccggcgcggcaccuucaccuggacccugagcgacuccgagggcaacgagacgcccgggggcuacugccugacccgguggaugcucaucgaggccgagcugaagugcuucgggaacaccgccguggccaagugcaacgagaagcacgacgaggaguucugcgacaugcugcgccucuucgacuucaacaagcaggccauccggcgccugaagaccccggcgcagaugagcauccagcugaucaacaaggccgugaacgcccucaucaacgaccagcugaucaugaagaaccaccuccgggacaucaugugcauccccuacugcaacuacuccaaguacugguaccugaaccacacggucaccggcaagaccagccugccccgcugcuggcugguguccaacgggagcuaccucaacgagacccgguucuccgacgacaucgagcagcaggccgacaacaugaucacggagcugcugcagaaggaguacaucgaccgccagggcaagaccccgcucggccugguggaccuguucgucuucagcaccuccuucuaccucaucagcaucuuccugcaccuggugaagauccccacccaccggcacaucaucgggaagcccugccccaagccgcaccgccugaaccacaugggcaucugcuccugcgggcucuacaagcaccccggcauccccgugaaguggaagcgguga

SEQ ID NO: 4394 - RNA, 1473 nt, Artificial Sequence
  derived and/or modified protein sequence (opt1) from LASV(Lassa virus/H.sapiens-wt/NGA/2016/ISTH_0146;Clade II)__AVO03633__GPCstabilized
augggccagaucaucaccuucuuccaggaggugccccacgucaucgaggaggugaugaacaucgugcugaucgcccucagccugcuggccauccucaaggggaucuacaacgucgcgaccugcggccuguucgggcugguguccuuccuccugcugugcggccgcagcugcuccacgaccuacaaggggguguacgagcuccagacccuggagcuggacauggccagccucaacaugaccaugccgcuguccugcacgaagaacaacagccaccacuacaucauggucggcaacgagaccggccuggagcucacccugaccaacacguccaucaucaaccacaaguucugcaaccugagcgacgcccacaagaagaaccucuacgaccacgcccugauguccaucaucagcaccuuccaccuguccauccccaacuucaaccaguacgaggccaugagcugcgacuucaacgggggcaagaucuccgugcaguacaaccucagccacaccuacgcgguggacgccgccaaccacugcgggaccaucgccaacggcguccugcagacguucaugcggauggcguggggcggguccuacaucgcccuggacagcggcugcggguccugggacugcaucaugaccagcuaccaguaccucaucauccagaacaccaccugggaggaccacugccaguucucccgccccagccccaucggcuaccuggggcugcucagccagcggacgcgcgacaucuacaucucccggcgccggcgcggcaccuucaccuggacccugagcgacuccgagggcaacgagacgcccgggggcuacugccugacccgguggaugcucaucgaggccgagcugaagugcuucgggaacaccgccguggccaagugcaacgagaagcacgacgaggaguucugcgacaugcugcgccucuucgacuucaacaagcaggcgauccggcgccugaagaccccggcccagaugagcauccagcugaucaacaaggccgugaacgcccucaucaacgaccagcugaucaugaagaaccaccuccgggacaucaugugcauccccuacugcaacuacuccaaguacugguaccugaaccacacggucaccggcaagaccagccugccccgcugcuggcugguguccaacgggagcuaccucaacgagacccacuucuccgacgacaucgagcagcaggccgacaacaugaucacggagcugcugcagaaggaguacauggaccggcagggcaagaccccgcucggccugguggaccuguucgucuucagcaccuccuucuaccucaucagcaucuuccugcaccuggugaagauccccacccaccgccacgugaucgggaagcccugccccaagccgcaccggcugaaccacaugggcaucugcuccugcgggcucuacaagcaccccggcguccccgugaaguggaagcgcuga

SEQ ID NO: 4395 - RNA, 1473 nt, Artificial Sequence
  derived and/or modified protein sequence (opt1) from LASV(Lassa virus/H.sapiens-wt/NGA/2016/ISTH_0187;Clade II)__AVO03549__GPCstabilized
augggccagaucgugaccuucuuccaggaggucccccacgugaucgaggaggugaugaacaucguccugaucgcccucagcgugcuggccauccugaaggggcucuacaacuucgcgaccugcggccugaucgggcuggugacguuccuccugcuguccggccgcagcugcuccauggucuacaaggggguguacgagcuccagacccuggagcugaacauggagacccucaacaugaccaugccgcugagcugcacgaagaacaacucccaccacuacauccgggugggcaacgacaccggccuggagcucacccugaccaacaacacgcugcucaaccacaaguucugcaaccugagcgacgcccacaagaagaaccuguacgaccacgcccucauguccaucaucagcaccuuccaccuguccauccccaacuucaaccaguacgaggccaugagcugcgacuucaacgggggccgcaucaccguccaguacaaccugucccacagcuacgccguggacgcggccaaccacugcgggaccguggccaacggcguccuccagacguucaugcggauggccuggggcggguccuacaucgcgcuggacagccgcugcggcaacugggacugcaucaugaccuccuaccaguaccugaucauccagaacaccaccugggaggaccacugccaguucagccggcccucccccaucggguaccucggccugcugagccagcgcacgcgggacaucuacaucucccgccggcgccgggggaccuucaccuggacccucagcgacagcgagggcaacgagacgccgggcggguacugccugacccgcuggaugcugaucgaggccgagcucaagugcuucggcaacaccgccguggccaagugcaacgagaagcacgacgaggaguucugcgacaugcugcggcuguucgacuucaacaagcaggccauccgccggcucaaggcgcccgcccagauguccauccagcugaucaacaaggccgugaacgcccugaucaacgaccagcucaucaugaagaaccaccuccgcgacaucaugugcauccccuacugcaacuacagcaaguacugguaccugaaccacaccuccacggggaagaccagccugccccggugcuggcuggucuccaacggcagcuaccugaacgagacccacuucuccgacgacaucgagcagcaggccgacaacaugaucaccgagaugcuccagaaggaguaccuggaccgccaggggaagacgccgcugggccucguggacaucuucguguucagcaccuccuucuaccugaucagcaucuuccugcaccugaucaagauccccacccaccggcacaucgucggcaagcccugccccaagccgcaccgccucaaccacauggggaucugcuccugcggccuguacaagcagcccggggugcccgugcgguggaagcgcuga

SEQ ID NO: 4396 - RNA, 1473 nt, Artificial Sequence
  derived and/or modified protein sequence (opt1) from LASV(Lassa virus/H.sapiens-wt/NGA/2016/ISTH_0199;Clade II)__AVO03653__GPCstabilized
augggccagaucaucaccuucuuccaggaggugccccacgucaucgaggaggugaugaacaucgugcugaucgcccucagccugcuggccauccucaaggggaucuacaacgucgcgaccugcggccuguucgggcugguguccuuccuccugcugugcggccgcagcugcuccacgaccuacaaggggguguacgagcuccagacccuggagcuggacauggccagccucaacaugaccaugccgcuguccugcacgaagaacaacagccaccacuacaucauggucggcaacgagaccggccuggagcucacccugaccaacacguccaucaucaaccacaaguucugcaaccugagcgacgcccacaagaagaaccucuacgaccacgcccugauguccaucaucagcaccuuccaccuguccauccccaacuucaaccaguacgaggccaugagcugcgacuucaacgggggcaagaucuccgugcaguacaaccucagccacaccuacgcgguggacgccgccaaccacugcgggaccaucgccaacggcguccugcagacguucaugcggauggcguggggcggguccuacaucgcccuggacagcggcugcgggaacugggacugcaucaugaccuccuaccaguaccucaucauccagaacaccaccugggaggaccacugccaguucagccgccccucccccaucggcuaccuggggcugcucagccagcggacgcgcgacaucuacaucagccggcgccggcgcggcaccuucaccuggacccuguccgacagcgagggcaacgagacgcccgggggcuacugccugacccgguggaugcucaucgaggccgagcugaagugcuucgggaacaccgccguggccaagugcaacgagaagcacgacgaggaguucugcgacaugcugcgccucuucgacuucaacaagcaggcgaucucccggcugaagaccccggcccagaugagcauccagcugaucaacaaggccgugaacgcccucaucaacgaccagcugaucaugaagaaccaccuccgcgacaucaugugcauccccuacugcaacuacuccaaguacugguaccugaaccacacggucaccggcaagaccagccugccccggugcuggcugguguccaacgggagcuaccucaacgagacccacuucuccgacgacaucgagcagcaggccgacaacaugaucacggagaugcugcagaaggaguacaucgaccgccagggcaagaccccgcugggccucguggaccuguucgucuucagcaccuccuucuaccugaucagcaucuuccuccaccuggugaagauccccacccaccggcacgugaucgggaagcccugccccaagccgcaccgccugaaccacaugggcaucugcuccugcgggcuguacaagcaccccggcguccccgugaaguggaagcgguga

SEQ ID NO: 4397 - RNA, 1473 nt, Artificial Sequence
  derived and/or modified protein sequence (opt1) from LASV(Lassa virus/H.sapiens-wt/NGA/2016/ISTH_0419;Clade II)__AVO03539__GPCstabilized
augggccagaucgugaccuucuuccaggaggucccccacgugaucgaggaggugaugaacaucguccugaucgcccucagccugcuggccauccucaaggggaucuacaacuucgcgaccugcggccugaucgggcugaucacguuccucuuccugugcggccgcuccugcagcgccaucuacaagggguccuaccagcugcagaccaucgagcucaacauggagacccugaacaugaccaugccgcugagcugcacgaagaacuccagccaccacuacauccgggugggcaacgagaccggccucgagcugacccugaccaacaucuccaucaucgaccacaaguucugcaaccucagcgacgcccacaagaagaaccuguacgaccacgcccugauguccaucaucagcacguuccaccucuccauccccaacuucaaccaguacgaggccaugagcugcgacuucaacgggggcaagaucuccgugcaguacaaccugagccacaccuacgcggucgacgccgccaaccacugcgggaccguggccaacggcgugcugcagaccuucaugcgcauggcguggggcggguccuacaucgcccucgacagcggcugcgggaacugggacugcaucaugacguccuaccaguaccugaucauccagaacaccaccugggaggaccacugccaguucagccggcccucccccaucggcuaccuggggcuccugagccagcgcacccgggacaucuacaucagccgccggcgccggggcacguucaccuggacccuguccgacagcgagggcaaggagacccccgggggcuacugccucacgcgcuggaugcugaucgaggccgagcugaagugcuucgggaacaccgccgucgccaagugcaacgagaagcacgacgaggaguucugcgacaugcuccggcuguucgacuucaacaagcaggcgauccagcgccugaaggccccggcccagauguccauccagcucaucaacaaggccgugaacgcccugaucaacgaccagcugaucaugaagaaccaccuccgggacaucaugugcauccccuacugcaacuacagcaaguacugguaccugaaccacaccuccaccggccgcacgagccugccccggugcuggcucguguccaacgggagcuaccugaacgagacccacuucuccgacgacaucgagcagcaggcggacaacaugaucaccgagaugcugcagaaggaguacaucgaccgccagggcaagaccccgcucggccuggucgaccuguucguguucagcacguccuucuaccucaucagcaucuuccugcaccugaucaagauccccacccaccggcacaucguggggaaguccugccccaagccccaccgccucaaccacaugggcaucugcagcugcgggcuguacaagcagccgggcguccccgugaaguggaagcgguga

SEQ ID NO: 4398 - RNA, 1473 nt, Artificial Sequence
  derived and/or modified protein sequence (opt1) from LASV(Lassa virus/H.sapiens-wt/NGA/2016/ISTH_0447;Clade II)__AVO03559__GPCstabilized
augggccagaucaucaccuucuuccaggaggugccccacgucaucgaggaggugaugaacaucgugcugaucgcccucagccugcuggccauccucaaggggaucuacaacaucgcgaccugcggccuguucgggcuggucuccuuccuccugcugugcggccgcagcugcuccacgaccuacaaggggguguacgagcuccagacccuggagcuggacauggccagccucaacaugaccaugccgcuguccugcacgaagaacaacagccaccacuacaucauggugggcaacgagaccggccuggagcucacccugaccaacacguccaucaucaaccacaaguucugcaaccugagcgacgcccacaagaagaaccucuacgaccacacccugauguccaucaucagcaccuuccaccuguccauccccaacuucaaccaguacgaggccaugagcugcgacuucaacgggggcaagaucuccguccaguacaaccucagccacgccuacgcgguggacgccgccaaccacugcgggaccaucgccaacggcgugcugcagacguucaugcggauggcguggggcggguccuacaucgcccuggacagcggcugcgggaacugggacugcaucaugaccuccuaccaguaccucaucauccagaacaccaccugggaggaccacugccaguucagccgccccucccccaucggcuaccuggggcugcucagccagcggacgcgcgacaucuacaucagccggcgccggcgcggcaccuucaccuggacccuguccgacagcgagggcaacgagacgcccgggggcuacugccugacccgguggaugcucaucgaggccgagcugaagugcuucgggaacaccgccgucgccaagugcaacgagaagcacgacgaggaguucugcgacaugcugcgccucuucgacuucaacaagcaggcgauccggcgccugaagaccccggcccagauguccauccagcugaucaacaaggccgugaacgcccucaucaacgaccagcugaucaugaagaaccaccuccgggacaucaugugcauccccuacugcaacuacagcaaguacugguaccugaaccacacggugaccggcaagaccucccugccccgcugcuggcuggucagcaacggguccuaccucaacgagacccacuucagcgacgacaucgagcagcaggccgacaacaugaucacggagcugcugcagaaggaguacaucgaccggcagggcaagaccccgcucggccugguggaccuguucguguucuccaccagcuucuaccucaucuccaucuuccugcaccuggucaagauccccacccaccgccacgugguggggaagcccugccccaagccgcaccggcugaaccacaugggcaucugcagcugcgggcucuacaagcaccccggcguccccgugaaguggaagcgcuga

SEQ ID NO: 4399 - RNA, 1473 nt, Artificial Sequence
  derived and/or modified protein sequence (opt1) from LASV(Lassa virus/H.sapiens-wt/NGA/2016/ISTH_0543;Clade II)__AVO03595__GPCstabilized
augggccagaucaucaccuucuuccaggaggugccccacgucaucgaggaggugaugaacaucgugcugaucgcccucagccugcuggccauccucaaggggaucuacaacaucgcgaccugcggccuguucgggcugaucuccuuccuccugcugugcggccgcagcugcuccacgaccuacaagggggucuacgagcuccagacccuggagcuggacauggccaaccucaacaugaccaugccgcugagcugcacgaagaacaacucccaccacuacaucauggugggcaacgagaccggccuggagcucacccugaccaacacgagcaucaucaaccacaaguucugcaaccuguccgacgcccacaagaagaaccucuacgaccacgcccugaugagcaucaucuccaccuuccaccugagcauccccaacuucaaccaguacgaggccauguccugcgacuucaacgggggcaagaucagcgugcaguacaaccucucccacagcuacgcggucgacgccgccgggcacugcggcaccaucgccaacggggugcugcagaccuucaugcggauggcguggggcggcuccuacaucgcccuggacagcgggugcggcaacugggacugcaucaugacguccuaccaguaccucgugauccagaacaccaccugggaggaccacugccaguucagccgccccucccccaucggguaccugggccugcucagccagcggacccgcgacaucuacaucagccggcgccggcgcggcacguucaccuggacccuguccgacagcgaggggaacgaggccccgggcggguacugccugacccgguggaugcucaucgaggccgagcugaagugcuucggcaacacggccaucgcgaagugcaacgagaagcacgacgaggaguucugcgacaugcugcgccucuucgacuucaacaagcaggccauccggcgccugaaggcccccgcccagauguccauccagcugaucaacaaggccgucaacgcgcucaucaacgaccagcugaucaugaagaaccaccuccgggacaucaugugcauccccuacugcaacuacagcaaguacugguaccugaaccacaccgugaccgggaagaccucccugcccaagugcuggcuggugagcaacggcuccuaccucaacgagacgcacuucagcgacgacaucgagcagcaggccgacaacaugaucaccgagcugcugcagaaggaguacauggaccgccagggcaagaccccgcucgggcuggucgaccuguucguguucuccaccagcuucuaccucaucuccaucuuccugcaccuggugaagauccccacgcaccggcacaucgucggccgccccugccccaagccgcaccggcugaaccacauggggaucugcagcugcggccucuacaagcaccccggggugcccgugaaguggaagcgcuga

SEQ ID NO: 4400 - RNA, 1473 nt, Artificial Sequence
  derived and/or modified protein sequence (opt1) from LASV(Lassa virus/H.sapiens-wt/NGA/2016/ISTH_0565;Clade II)__AVO03637__GPCstabilized
augggccagaucgugaccuucuuccaggaggucccccacgugaucgaggaggugaugaacaucguccugaucgcccucagccugcuggccauccucaaggggaucuacaacguggcgaccugcggccuguucgggcugaucuccuuccuccugcugugcggccgcagcugcuccacgaccuacaaggggguguacgagcuccagacccuggagcuggacauggccaaccucaacaugaccaugccgcugagcugcacgaagaacuccagccaccacuacaucauggucggcaacgagaccggccuggagcucacccugaccaacacguccaucaucaaccacaaguucugcaaccugagcgacgcccacaagaagaaccucuacgaccacgcccugauguccaucaucagcaccuuccaccuguccauccccaacuucaaccaguacgaggccaugagcugcgacuucaacgggggcaagaucuccgugcaguacaaccucagccacaccuacgcgguggacgccgccaaccacugcgggaccaucgccaacggcguccugcagacguucaugcggauggcguggggcggguccuacaucgcccuggacagcggcugcgggaacugggacugcaucaugaccuccuaccaguaccucaucauccagaacaccaccugggaggaccacugccaguucagccgccccucccccaucggcuaccuggggcugcucagccagcggacgcgcgacaucuacaucagccggcgccggcgcggcaccuucaccuggacccuguccgacagcgagggcaacgaggcccccgggggcuacugccugacgcgguggaugcucaucgaggccgagcugaagugcuucgggaacaccgccaucgcgaagugcaacgagaagcacgacgaggaguucugcgacaugcugcgccucuucgacuucaacaagcaggccaucaagcggcugaaguccccggcccagaugagcauccagcugaucaacaaggccgugaacgcccucaucaacgaccagcugaucaugaagaaccaccuccgcgacaucaugugcauccccuacugcaacuacucccgguacugguaccugaaccacaccgugaccggcaagacgagccugccccgcugcuggcugaucuccaacgggagcuaccucaacgagacccacuucuccgacgacaucgagcagcaggcggacaacaugaucaccgagcugcugcagaaggaguacauggaccggcagggcaagaccccgcucggccuggucgaccuguucguguucagcacguccuucuaccucaucagcaucuuccugcaccuggugaagauccccacccaccgccacaucgucgggcggcccugccccaagccgcaccgccugaaccacaugggcaucugcuccugcgggcucuacaagcaccccggcgugcccgugaaguggaagcgguga

SEQ ID NO: 4401 - RNA, 1473 nt, Artificial Sequence
  derived and/or modified protein sequence (opt1) from LASV(Lassa virus/H.sapiens-wt/NGA/2016/ISTH_0572;Clade II)__AVO03611__GPCstabilized
augggccagaucaucaccuucuuccaggaggugccccacgucaucgaggaggugaugaacaucgugcugaucgcccucagccugcuggccauccucaaggggaucuacaacgucgcgaccugcggccuguucgggcugguggccuuccuccugcugugcggccgcuccugcagcacgaccuacaaggggguguacgagcuccagacccuggagcuggacauggccucccucaacaugaccaugccgcugagcugcacgaagaacaacucccaccacuacaucauggucggcaacgagaccggccuggagcucacccugaccaacacgagcaucaucaaccacaaguucugcaaccuguccgacgcccacaagaagaaccucuacgaccacgcccugaugagcaucaucuccaccuuccaccugagcauccccaacuucaaccagcacgaggcgauguccugcgacuucaacgggggcaagaucagcgugcaguacaaccucucccacaccuacgccguggacgccgccaaccacugcgggaccaucgcgaacggcguccugcagacguucaugcggauggccuggggcgggagcuacaucgcccuggacuccggcugcgggagcugggacugcaucaugaccuccuaccaguaccucaucauccagaacaccaccugggaggaccacugccaguucagccgccccucccccaucggcuaccuggggcugcucagccagcggacgcgcgacaucuacaucagccggcgccggcgcggcaccuucaccuggacccuguccgacagcgagggcaacgagacgcccgggggcuacugccugacccgguggaugcucaucgaggccgagcugaagugcuucgggaacaccgccguggcgaagugcaacgagaagcacgacgaggaguucugcgacaugcugcgccucuucgacuucaacaagcaggccauccggcgccugaagaccccggcccagauguccauccagcugaucaacaaggccgugaacgcccucaucaacgaccagcugaucaugaagaaccaccuccgggacaucaugugcauccccuacugcaacuacagcaaguacugguaccugaaccacacggucaccggccgcaccucccugccccggugcuggcuggugagcaacggguccuaccucaacgagacccacuucagcgacgacaucgagcagcaggcggacaacaugaucacggagcugcugcagaaggaguacauggaccgccagggcaagaccccgcucggccugguggaccuguucgucuucuccaccagcuucuaccucaucuccaucuuccugcaccugaucaagauccccacccaccggcacgugaucgggaagcccugccccaagccgcaccgccugaaccacaugggcaucugcagcugcgggcucuacaagcaccccggcgugcccgucaaguggaagcgguga

SEQ ID NO: 4402 - RNA, 1473 nt, Artificial Sequence
  derived and/or modified protein sequence (opt1) from LASV(Lassa virus/H.sapiens-wt/NGA/2016/ISTH_0610;Clade II)__AVO03585__GPCstabilized
augggccagaucaucaccuucuuccaggaggugccccacgucaucgaggaggugaugaacaucgugcugaucgcccucagccugcuggccauccucaagggggucuacaacguggcgaccugcggccuguucgggcugguguccuuccuccugcugugcggccgcagcugcuccacgaccuacaagggggucuacgagcuccagacccuggagcuggacauggccagccucaacaugaccaugccgcuguccugcacgaagaacaacagccaccacuacaucauggugggcaacgagaccggccuggagcucacccugaccaacacguccaucaucaaccacaaguucugcaaccugagcgacgcccacaagaagaaccucuacgaccacgcccugauguccaucaucagcaccuuccaccuguccauccccaacuucaaccaguacgaggccaugagcugcgacuucaacgggggcaagaucuccgugcaguacaaccucagccacaccuacgcggucgacgccgccaaccacugcgggaccaucgccaacggcgugcugcagacguucaugcggauggcguggggcggguccuacaucgcccuggacagcggcugcggguccugggacugcaucaugaccagcuaccaguaccucaucauccagaacaccaccugggaggaccacugccaguucucccgccccagccccaucggcuaccuggggcugcucagccagcggacgcgcgacaucuacaucucccggcgccggcgcggcaccuucaccuggacccugagcgacuccgagggcaacgagacgcccgggggcuacugccugacccgguggaugcucaucgaggccgagcugaagugcuucgggaacaccgccguggccaagugcaacgagaagcacgacgaggaguucugcgacaugcugcgccucuucgacuucaacaagcaggcgauccggcgccugaaggccccggcccagaugagcauccagcugaucaacaaggccgucaacgcccucaucaacgaccagcugaucaugaagaaccaccuccgggacaucaugugcauccccuacugcaacuacuccaaguacugguaccugaaccacaccgugacgggccgcaccagccugccccggugcuggcugguguccaacgggagcuaccucaacgagacccacuucuccgacgacaucgagcagcaggcggacaacaugaucaccgagcugcugcagaaggaguacaucgaccgccagggcaagacgccgcucggccuggucgaccuguucguguucagcaccuccuucuaccucaucagcaucuuccugcaccuggugaagauccccacccaccggcacaucaucgggaagcccugccccaagccgcaccgccugaaccacaugggcaucugcuccugcgggcucuacaagcaccccggcguccccgugaaguggaagcgguga

SEQ ID NO: 4403 - RNA, 1473 nt, Artificial Sequence
  derived and/or modified protein sequence (opt1) from LASV(Lassa virus/H.sapiens-wt/NGA/2016/ISTH_0621;Clade II)__AVO03543__GPCstabilized
augggccagaucgugaccuucuuccaggagaucccccacgucguggaggagaucaugaacaucgugcugaucacccucagccugcuggccauccucaaggggcuguacaacuucgccacgugcggccugaucgggcucaucaccuuccuguuccugugcggccgcuccugcagcaccaucuacaagggguccuaccagcuccaggcgcuggagcugaacauggagacccucaacaugacgaugccgcugagcugcaccaagaacaacucccaccacuacauccgggucggcaacgagaccggccuggagcucacccugacgaacaccagcaucaucgaccacaaguucugcaaccuguccgacgcccacaagcgcaaccucuacgaccacacccugaugagcaucaucuccaccuuccaccugagcauccccaacuucaaccaguacgaggccauguccugcgacuucaacgggggcaagaucagcgugcaguacaaccucucccacagcuacgccggggacgccgcgcggcacugcggcacgguggccaacgggguccugcagaccuucaugcgcauggccuggggcggcuccuacaucgcccuggacagcgggugcggcaacugggacugcaucaugaccuccuaccaguaccucaucauccagaacaccacgugggagaaccacugccaguucagccggcccucccccaucggguaccugggccugcucagccagcgcacccgggacaucuacaucagccgccggcgccggggcaccuucaccuggacgcuguccgacagcgaggggaaggagaccccgggcggguacugccugacccgcuggaugcucaucgaggcggagcugaagugcuucggcaacaccgccguggccaagugcaacgagaagcacgacgaggaguucugcgacaugcugcggcuguucgacuucaacaagcaggccauccagcgccugaagacgcccgcccagauguccauccagcugaucaacaaggcggugaacgcccucaucaacgaccagcugaucaugaagaaccaccuccgggacaucaugugcauccccuacugcaacuacagcaaguacugguaccucaaccacaccaccaccgggaagacgucccugcccaagugcuggcuggucagcaacggcuccuaccucaacgagacccacuucagcgacgacaucgagcagcaggccgacaacaugaucaccgagaugcugcagaaggaguacaucgaccgccagggcaagaccccgcuggggcucguggaccuguucguguucuccacgagcuucuaccugaucuccaucuuccuccaccugaucaagauccccacccaccggcacaucgucggcaagagcugccccaagccccaccgccugaaccacauggggaucugcuccugcggccuguacaagcagccgggggugcucgugaaguggaagcgguga

SEQ ID NO: 4404 - RNA, 1473 nt, Artificial Sequence
  derived and/or modified protein sequence (opt1) from LASV(Lassa virus/H.sapiens-wt/NGA/2016/ISTH_0701;Clade II)__AVO03629__GPCstabilized
augggccagaucaucaccuucuuccaggaggugccccacgucaucgaggaggugaugaacaucgugcugaucgcccucagccugcuggccauccucaaggggaucuacaacgucgcgaccugcggccuguucgggcugguguccuuccuccugcugugcggccgcagcugcuccacgaccuacaaggggguguacgagcuccagacccuggagcuggacauggccagccucaacaugaccaugccgcuguccugcacgaagaacaacagccaccacuacaucauggucggcaacgagaccggccuggagcucacccugaccaacacguccaucaucgggcacaaguucugcaaccugagcgacgcccacaagaagaaccucuacgaccacgcccugauguccaucaucagcaccuuccaccuguccauccccaacuucaaccaguacgaggccaugagcugcgacuucaacggcgggaagaucuccgugcaguacaaccucagccacgcguacgccguggacgccgccaaccacugcggcaccaucgcgaacgggguccugcagaccuucaugcggauggccuggggcggcuccuacaucgcccuggacagcgggugcggcuccugggacugcaucaugacgagcuaccaguaccucaucauccagaacaccaccugggaggaccacugccaguucucccgccccagccccaucggguaccugggccugcucagccagcggacccgcgacaucuacaucucccggcgccggcgcggcacguucaccuggacccugagcgacuccgaggggaacgagaccccgggcggguacugccugacgcgguggaugcucaucgaggccgagcugaagugcuucggcaacaccgccguggcgaagugcaacgagaagcacgacgaggaguucugcgacaugcugcgccucuucgacuucaacaagcaggccauccggcgccugaagacccccgcccagaugagcauccagcugaucaacaaggccgugaacgcccucaucaacgaccagcugaucaugaagaaccaccuccgggacaucaugugcauccccuacugcaacuacuccaaguacugguaccugaaccacaccgucacggggaagaccagccugccccgcugcuggcugguguccaacggcagcuaccucaacgagacccacuucuccgacgacaucgagcagcaggcggacaacaugaucaccgagcugcugcagaaggaguacaucgaccggcagggcaagacgccgcucgggcugguggaccuguucgucuucagcaccuccuucuaccucaucagcaucuuccugcaccuggugaagauccccacccaccgccacgugaucggcaagcccugccccaagccgcaccggcugaaccacauggggaucugcuccugcggccucuacaagcaccccgggguccccgugaaguggaagcgcuga

SEQ ID NO: 4405 - RNA, 1473 nt, Artificial Sequence
  derived and/or modified protein sequence (opt1) from LASV(Lassa virus/H.sapiens-wt/NGA/2016/ISTH_0702;Clade II)__AVO03557__GPCstabilized
augggccagaucaucaccuucuuccaggaggugccccacgucaucgaggaggugaugaacaucgugcugaucgcccucagccugcuggccguccucaaggggaucuacaacguggcgaccugcggccuguucgggcugguggccuuccuccugcugugcggccgcuccugcagcacgaccuacaagggggucuacgagcuccagacccuggagcuggacauggccaaccucaacaugaccaugccgcuguccugcacgaagaacaacagccaccacuacaucauggugggcaacgagaccggccuggagcucacccugaccaacacguccaucaucaaccacaaguucugcaaccugagcgacgcccacaagaagaaccucuacgaccacgcccugauguccaucaucagcaccuuccaccuguccauccccaacuucaaccaguacgaggcgaugagcugcgacuucaacgggggcaagaucuccgugcaguacaaccucagccacaccuacgccgucgacgccgccaaccacugcgggaccaucgcgaacggcgugcugcagacguucaugcggauggccuggggcggguccuacaucgcccuggacagcggcugcggguccugggacugcaucaugaccagcuaccaguaccucaucauccagaacaccaccugggaggaccacugccaguucucccgccccagccccaucggcuaccuggggcugcucucccagcggacgcgcgacaucuacaucagccggcgccggcgcggcaccuucaccuggacccugagcgacuccgagggcaacgagacgcccgggggcuacugccugacccgguggaugcucaucgaggccgagcugaagugcuucgggaacaccgccguggcgaagugcaacgagaagcacgacgaggaguucugcgacaugcugcgccucuucgacuucaacaagcaggccauccggcgccugaagaccccggcccagaugagcauccagcugaucaacaaggccgucaacgcccucaucaacgaccagcugaucaugaagaaccaccuccgggacaucaugugcauccccuacugcaacuacuccaaguacugguaccugaaccacacggugaccggccgcaccagccugccccggugcuggcugguguccaacgggagcuaccucaacgagacccacuucuccgacgacaucgagcagcaggcggacaacaugaucacggagcugcugcagaaggaguacauggaccgccagggcaagaccccgcucggccuggucgaccuguucguguucagcaccuccuucuaccucaucagcaucuuccugcaccugaucaagauccccacccaccggcacgugaucgggaagcccugccccaagccgcaccgccugaaccacaugggcaucugcuccugcgggcucuacaagcaccccggcguccccgugaaguggaagcgguga

SEQ ID NO: 4406 - RNA, 1473 nt, Artificial Sequence
  derived and/or modified protein sequence (opt1) from LASV(Lassa virus/H.sapiens-wt/NGA/2016/ISTH_0703;Clade II)__AVO03597__GPCstabilized
augggccagaucaucaccuucuuccaggaggugccccacgucaucgaggaggugaugaacaucgugcugaucgcccucagccugcuggccauccucaaggggaucuacaacgucgcgaccugcggccuguucgggcugguguccuuccuccugcugugcggccgcagcugcuccacgaccuacaaggggguguacgagcuccagacccuggagcuggacauggccagccucaacaugaccaugccgcuguccugcacgaagaacaacagccaccacuacaucauggucggcaacgagaccggccuggagcucacccugaccaacacguccaucaucaaccacaaguucugcaaccugagcgacgcccacaagaagaaccucuacgaccacgcccugauguccaucaucagcaccuuccaccuguccauccccaacuucaaccaguacgaggccaugagcugcgacuucaacgggggcaagaucuccgugcaguacaaccucagccacaccuacgcgguggacgccgccucccacugcgggaccaucgccaacggcguccugcagacguucaugcggauggcguggggcgggagcuacaucgcccuggacuccggcugcgggagcugggacugcaucaugaccuccuaccaguaccucaucauccagaacaccaccugggaggaccacugccaguucagccgccccagccccaucggcuaccuggggcugcucucccagcggacgcgcgacaucuacaucagccggcgccggcgcggcaccuucaccuggacccuguccgacagcgagggcaacgagacgcccgggggcuacugccugacccgguggaugcucaucgaggccgagcugaagugcuucgggaacaccgccguggccaagugcaacgagaagcacgacgaggaguucugcgacaugcugcgccucuucgacuucaacaagcaggcgauccggcgccugaagaccccggcccagauguccauccagcugaucaacaaggccgugaacgcccucaucaacgaccagcugaucaugaagaaccaccuccgggacaucaugugcauccccuacugcaacuacagcaaguacugguaccugaaccacacggucaccggccgcaccucccugccccggugcuggcuggugagcaacggguccuaccucaacgagacccacuucagcgacgacaucgagcagcaggccgacaacaugaucacggagcugcugcagaaggaguacaucgagcgccagggcaagaccccgcucggccugguggaccuguucgucuucuccaccagcuucuaccucaucuccaucuuccugcaccugaucaagauccccacccaccggcacgugaucgggaagcccugccccaagccgcaccgccugaaccacaugggcaucugcagcugcgggcucuacaagcaccccggcgugcccgucaaguggaagcgguga

SEQ ID NO: 4407 - RNA, 1473 nt, Artificial Sequence
  derived and/or modified protein sequence (opt1) from LASV(Lassa virus/H.sapiens-wt/NGA/2016/ISTH_0717;Clade II)__AVO03547__GPCstabilized
augggccagaucgugaccuucuuccaggaggucccccacgugaucgaggaggugaugaacaucguccugaucgcccucagcauccuggccauccugaaggggcucuacaacguggcgaccugcggccugaucgggcuggugacguuccuccugcuguccggccgcagcugcuccaugaucuacaagggggucuacgagcuccagacccuggagcugaacauggagacccucaacaugaccaugccgcugagcugcacgaagaacaacucccaccacuacaucauggugggcaacgagaccggccuggagcucacccugaccaacacgagccugcucaaccacaaguucugcaaccuguccgacgcccacaagaagaaccuguacgaccacacccucaugagcaucaucuccaccuuccaccugagcauccccaacuucaaccaguacgaggccauguccugcgacuucaacgggggcaagaucaccgugcaguacaaccugagccacacguacgccgucgacgccgugaaccacugcgggacccucgcgaacggcauccugcagaccuucaugcggauggccuggggcggguccuacaucgcccuggacagccgcugcggcuccugggacugcaucaugaccagcuaccaguaccucaucauccagaacacgaccugggaggaccacugccaguucucccggcccagccccaucggguaccugggccugcucucccagcgcacccgggacaucuacaucagccgccggcgccgggggaccuucacguggacccugagcgacuccgagggcaacgagaccccgggcggguacugccugacccgcuggaugcucaucgaggccgagcugaagugcuucggcaacacggcgguggccaagugcaacgagaagcacgacgaggaguucugcgacaugcugcggcuguucgacuucaacaagcaggccauccgccggcugaaggcccccgcccagaugagcauccagcugaucaacaaggcggucaacgcccucaucaacgaccagcugaucaugaagaaccaccuccgcgacaucaugugcauccccuacugcaacuacuccaaguacugguaccucaaccacaccagcaccgggcggaccucccugccccgcugcuggcuggugagcaacggcuccuaccucaacgagacgcacuucagcgacgacaucgagcagcaggccgacaacaugaucaccgagaugcugcagaaggaguaccuggaccggcaggggaagaccccgcucggccugguggaccuguucgucuucuccaccagcuucuaccugaucuccaucuuccuccaccugaucaagauccccacgcaccgccacaucgugggcaagcccugccccaagccgcaccggcugaaccacauggggaucugcagcugcggccucuacaagcagcccggggugcccguccgcuggaagcgguga

SEQ ID NO: 4408 - RNA, 1473 nt, Artificial Sequence
  derived and/or modified protein sequence (opt1) from LASV(Lassa virus/H.sapiens-wt/NGA/2016/ISTH_0753;Clade II)__AVO03609__GPCstabilized
augggccagaucaucaccuucuuccaggaggugccccacgucaucgaggaggugaugaacaucgugcugaucgcccucagccugcuggccauccucaaggggaucuacaacgucgcgaccugcggccuguucgggcugguguccuuccuccugcugugcggccgcagcugcuccacgaccuacaaggggguguacgagcuccagacccuggagcuggacauggccagccucaacaugaccaugccgcuguccugcacgaagaacaacagccaccacuacaucauggucggcaacgagaccggccuggagcucacccugaccaacacguccaucaucaaccacaaguucugcaaccugagcgacgcccacaagaagaaccucuacgaccacgcccugauguccaucaucagcaccuuccaccuguccauccccaacuucaaccaguacgaggccaugagcugcgacuucaacgggggcaagaucuccgugcaguacaaccucagccacaccuacgcgguggacgccgccaaccacugcgggaccaucgccaacggcguccugcagacguucaugcggauggcguggggcggguccuacaucgcccuggacagcggcugcgggaacugggacugcaucaugaccuccuaccaguaccucaucauccagaacaccaccugggaggaccacugccaguucagccgccccucccccaucggcuaccuggggcugcucagccagcggacgcgcgacaucuacaucagccggcgccggcgcggcaccuucaccuggacccuguccgacagcgagggcaacgagacgcccgggggcuacugccugacccgguggaugcucaucgaggccgagcugaagugcuucgggaacaccgccguggccaagugcaacgagaagcacgacgaggaguucugcgacaugcugcgccucuucgacuucaacaagcaggcgaucucccggcugaagaccccggcccagaugagcauccagcugaucaacaaggccgugaacgcccucaucaacgaccagcugaucaugaagaaccaccuccgcgacaucaugugcauccccuacugcaacuacuccaaguacugguaccugaaccacacggucaccggccggaccagccugccccgcugcuggcugguguccaacgggagcuaccucaacgagacccacuucuccgacgacaucgagcagcaggccgacaacaugaucacggagcugcugcagaaggaguacauggaccggcagggcaagaccccgcucggccugguggaccuguucgucuucagcaccuccuucuaccucaucagcaucuuccugcaccuggugaagauccccacccaccgccacgugaucgggaagcccugccccaagccgcaccggcugaaccacaugggcaucugcuccugcgggcucuacaagcaccccggcguccccgugaaguggaagcgcuga

SEQ ID NO: 4409 - RNA, 1473 nt, Artificial Sequence
  derived and/or modified protein sequence (opt1) from LASV(Lassa virus/H.sapiens-wt/NGA/2016/ISTH_0759;Clade II)__AVO03593__GPCstabilized
augggccagaucaucaccuucuuccaggaggugccccacgucaucgaggaggugaugaacaucgugcugaucgcccucagccugcuggccauccucaaggggaucuacaacgucgcgaccugcggccuguucgggcugguguccuuccuccugcugugcggccgcagcugcuccacgaccuacaaggggguguacgagcuccagacccuggagcuggacauggccagccucaacaugaccaugccgcuguccugcacgaagaacaacagccaccacuacaucauggucggcaacgagaccggccuggagcucacccugaccaacacguccaucaucaaccacaaguucugcaaccugagcgacgcccacaagaagaaccucuacgaccacacccugauguccaucaucagcaccuuccaccuguccauccccaacuucaaccaguacgaggccaugagcugcgacuucaacgggggcaagaucuccgugcaguacaaccucagccacaccuacgccguggacgcggccaaccacugcgggacgaucgccaacggcguccugcagaccuucaugcggauggccuggggcggguccuacaucgcgcuggacagcggcugcggguccugggacugcaucaugaccagcuaccaguaccucaucauccagaacaccuccugggaggaccacugccaguucagccgccccagccccaucggcuaccuggggcugcucucccagcggacgcgcgacaucuacaucagccggcgccggcgcggcaccuucaccuggacccuguccgacagcgagggcaacgagacgcccgggggcuacugccugacccgguggaugcucaucgaggccgagcugaagugcuucgggaacaccgccguggccaagugcaacgagaagcacgacgaggaguucugcgacaugcugcgccucuucgacuucaacaagcaggccauccggcgccugaagaccccggcgcagauguccauccagcugaucaacaaggccgugaacgcccucaucaacgaccagcugaucaugaagaaccaccuccgggacaucaugugcauccccuacugcaacuacagcaaguacugguaccugaaccacacggucaccggcaagaccucccugccccgcugcuggcuggugagcaacggguccuaccucaacgagacccacuucagcgacgacaucgagcagcaggccgacaacaugaucacggagcugcugcagaaggaguacaucgaccggcagggcaagaccccgcucggccugguggaccuguucgucuucuccaccagcuucuaccucaucuccaucuuccugcaccuggugaagauccccacccaccgccacgugaucgggaagcccugccccaagccgcaccggcugaaccacaugggcaucugcagcugcgggcucuacaagcaccccggcguccccgugaaguggaagcgcuga

SEQ ID NO: 4410 - RNA, 1473 nt, Artificial Sequence
  derived and/or modified protein sequence (opt1) from LASV(Lassa virus/H.sapiens-wt/NGA/2016/ISTH_0777;Clade II)__AVO03615__GPCstabilized
augggccagaucaucaccuucuuccaggaggugccccacgucaucgaggaggugaugaacaucgugcugaucgcccucagccugcuggccauccucaaggggaucuacaacgucgcgaccugcggccugcuggggcucaucuccuuccugcugcucugcggccgcagcugcuccacgaccuacaaggggguguacgagcugcagacccuggagcucgacauggccaaccugaacaugaccaugccgcugagcugcacgaagaacuccagccaccacuacaucauggugggcaacgagaccggccucgagcugacccugaccaacacguccaucaucaaccacaaguucugcaaccucagcgacgcccacaagaagaaccuguacgaccacgcccugauguccaucaucagcaccuuccaccucuccauccccaacuucaaccaguacgaggccaugagcugcgacuucaacgggggcaagaucuccguccaguacaaccugagccacgcguacgccguggacgccgccaaccacugcgggaccaucgcgaacggcgugcugcagaccuucaugcggauggccuggggcggguccuacaucgcccucgacagcggcugcgggaacugggacugcaucaugacguccuaccaguaccugaucauccagaacaccaccugggaggaccacugccaguucagccgccccucccccaucggcuaccuggggcuccugagccagcggacccgcgacaucuacaucagccggcgccggcgcggcacguucaccuggacccuguccgacagcgagggcaacgaggcccccgggggcuacugccucacccgguggaugcugaucgaggccgagcugaagugcuucgggaacacggcgaucgccaagugcaacgagaagcacgacgaggaguucugcgacaugcuccgccuguucgacuucaacaagcaggccauccggcgccugaagaccccggcccagauguccauccagcucaucaacaaggccgucaacgcgcugaucaacgaccagcugaucaugaagaaccaccuccgggacaucaugugcauccccuacugcaacuacagcaaguacugguaccugaaccacaccgugaccggcaagacgucccugccccgcugcuggcucaucagcaacggguccuaccugaacgagacccacuucagcgacgacaucgagcagcaggccgacaacaugaucaccgagcugcuccagaaggaguacauggaccggcagggcaagaccccgcugggccugguggaccucuucgucuucuccacgagcuucuaccugaucuccaucuuccugcaccuggugaagauccccacccaccgccacaucguggggaagcccugccccaagccgcaccggcucaaccacaugggcaucugcagcugcgggcuguacaagcaccccggcguccccgugaaguggaagcgcuga

SEQ ID NO: 4411 - RNA, 1473 nt, Artificial Sequence
  derived and/or modified protein sequence (opt1) from LASV(Lassa virus/H.sapiens-wt/NGA/2016/ISTH_0779;Clade II)__AVO03655__GPCstabilized
augggccagaucaucaccuucuuccaggaggugccccacgucguggaggaggugaugaacgucgugcugaucgcccucagccugcuggccauccucaaggggaucuacaacaucgcgaccugcggccuguucgggcugaucuccuuccuccugcugugcggccgcagcugcuccacgaccuacaaggggguguacgagcuccagacccuggagcuggacauggccaaccucaacaugaccaugccgcugagcugcacgaagaacaacucccaccacuacaucauggucggcaacgagaccggccuggagcucacccugaccaacacgagcaucaucaaccacaaguucugcaaccuguccgacgcccacaagaagaaccucuacgaccacacccugaugagcaucaucuccaccuuccaccugagcauccccaacuucaaccaguacgaggccauguccugcgacuucaacgggggcaagaucagcgugcaguacaaccucucccacggguacgccguggacgcggccaaccacugcggcaccaucgccaacgggguccugcagacguucaugcggauggccuggggcggcagcuacaucgcgcuggacuccgggugcggcaacugggacugcaucaugaccagcuaccaguaccucgugauccagaacaccaccugggaggaccacugccaguucucccgccccagccccaucggguaccugggccugcucucccagcggacgcgcgacaucuacaucagccggcgccggcgcggcaccuucaccuggacccugagcgacuccgaggggaacgacgccccgggcggguacugccugacgcgguggaugcucaucgaggccgagcugaagugcuucggcaacaccgccaucgccaagugcaacgagaagcacgacgaggaguucugcgacaugcugcgccucuucgacuucaaccggcaggcgaucaagcgccugaagacccccgcccagaugagcauccagcugaucaacaaggccgugaacgcccucaucaacgaccagcugaucaugaagaaccaccuccgggacaucaugugcauccccuacugcaacuacuccaaguacugguaccugaacaacaccgucacgggcaagagcucccugcccaagugcuggcuggugagcaacggguccuaccucaacgagacccacuucagcgacgacaucgagcagcaggccgacaacaugaucaccgagaugcugcagaaggaguacaucgaccgccagggcaagaccccgcuggggcucguggaccuguucgucuucuccacgagcuucuaccugaucuccaucuuccuccaccuggugcggauccccacccaccgccacaucaccggcaagcccugccccaagccgcaccggcugaaccacauggggaucugcagcugcggccuguacaagcagcccggggugcccgucaaguggaagcgcuga

SEQ ID NO: 4412 - RNA, 1473 nt, Artificial Sequence
  derived and/or modified protein sequence (opt1) from LASV(Lassa virus/H.sapiens-wt/NGA/2016/ISTH_0917;Clade II)__AVO03535__GPCstabilized
augggccagaucgugaccuucuuccaggaggucccccacgugaucgaggagaucaugaacaucgugcugaucacccucagccugcuggccauccucaagggggucuacaaccuggccacgugcggccugaucgggcucaucaccuuccuguuccugugcggccgcuccugcagcaugaccuacaaggggaacuaccagcucgagacccuggagcugaacauggagaugcucaacaugacgaugccgcuguccugcaccaagaacaacagccaccacuacauccgggugggcaacgagaccggccuggagcucacccugacgaacaccuccaucauccagcacaaguucugcaaccugagcgacgcgcacaagcgcaaccucuacgaccacucccugaugagcaucguguccaccuuccaccugagcauccccaacuucaaccaguacgaggccauguccugcgacuucaacgggggcaagaucagcauccaguacaaccucucccacaccuacgccggggacgccgccaagcacugcggcacgcuggcgaacgggauccugcagaccuucaugcggauggccuggggcggcagcuacaucgcccucgacuccgggugcggcgggugggacugcaucaugaccaacuaccaguaccugaucauccagaacgucaccugggaggaccacugccaguucagccgccccucccccaucggcuaccugggccuccugagccagcggacgcgcgagguguacaucucccggcgccggcgcgggaccuucaccuggacccugagcgacagcgagggcaacgaggcccccgggggcuacugccucacgcgguggaugcugaucgaggcggagcugaagugcuucgggaacaccgccguggccaagugcaacgagaagcacgacgaggaguucugcgacaugcuccgccuguucgacuucaacaagcaggccauccggcgccugaaggccccgacccagauguccauccagcucaucaacaaggcggucaacgcccugaucaacgaccagcugaucaugaagaaccaccuccgggacaucaugugcauccccuacugcaacuacagcaaguacugguaccugaaccacaccaucacgggccgcaccucccugccccggugcuggcucgugagcaacggcuccuaccugaacgagacccacuucagcgacgacaucgagcagcaggccgacaacaugaucaccgagaugcugcagaaggaguacaucgaccgccaggggaagacgccgcucggccugguggaccuguucgucuucuccaccagcuucuaccucaucuccaucuuccugcaccuggugaagauccccacccaccggcacaucgugggcaagagcugccccaagccccaccgccugaaccacauggggaucugcuccugcgggcucuacaagcggccgggcgucagcgugcgcuggaagcgcuga

SEQ ID NO: 4413 - RNA, 1473 nt, Artificial Sequence
  derived and/or modified protein sequence (opt1) from LASV(Lassa virus/H.sapiens-wt/NGA/2016/ISTH_1006;Clade II)__AVO03643__GPCstabilized
augggccagaucaucaccuucuuccaggaggugccccacgucaucgaggaggugaugaacaucgugcugaucgcccucagccugcuggccauccucaaggggaucuacaacgucgcgaccugcggccuguucgggcugguggccuuccuccugcugugcggccgcuccugcagcacgaccuacaaggggguguacgagcuccagacccuggagcuggacauggccucccucaacaugaccaugccgcugagcugcacgaagaacaacucccaccacuacaucauggucggcaacgagaccggccuggagcucacccugaccaacacgagcaucaucaaccacaaguucugcaaccuguccgacgcccacaagaagaaccucuacgaccacgcccugaugagcaucaucuccaccuuccaccugagcauccccaacuucaaccaguacgaggcgauggggugcgacuucaacggcgggaagaucuccgugcaguacaaccucagccacuccuacgccguggacgccgccaaccacugcggcaccaucgcgaacgggguccugcagaccuucaugcggauggccuggggcggcagcuacaucgcccuggacuccgggugcggcagcugggacugcaucaugacguccuaccaguaccucaucauccagaacaccaccugggaggaccacugccaguucagccgccccucccccaucggguaccugggccugcucagccagcggacccgcgacaucuacaucagccggcgccggcgcggcacguucaccuggacccuguccgacagcgaggggaacgagaccccgggcggguacugccugacgcgguggaugcucaucgaggccgagcugaagugcuucggcaacaccgccguggcgaagugcaacgagaagcacgacgaggaguucugcgacaugcugcgccucuucgacuucaacaagcaggccauccggcgccugaagacccccgcccagauguccauccagcugaucaacaaggccgugaacgcccucaucaacgaccagcugaucaugaagaaccaccuccgggacaucaugugcauccccuacugcaacuacagcaaguacugguaccugaaccacaccgucacggggcgcaccucccugccccggugcuggcuggugagcaacggcuccuaccucaacgagacccacuucagcgacgacaucgagcagcaggcggacaacaugaucaccgagcugcugcagaaggaguacauggaccgccagggcaagacgccgcucgggcugguggaccuguucgucuucuccaccagcuucuaccucaucuccaucuuccugcaccugaucaagauccccacccaccggcacgugaucggcaagcccugccccaagccgcaccgccugaaccacauggggaucugcagcugcggccucuacaagcaccccggggugcccgucaaguggaagcgguga

SEQ ID NO: 4414 - RNA, 1473 nt, Artificial Sequence
  derived and/or modified protein sequence (opt1) from LASV(Lassa virus/H.sapiens-wt/NGA/2016/ISTH_1026;Clade II)__AVO03589__GPCstabilized
augggccagaucaucaccuucuuccaggaggugccccacgucaucgaggaggugaugaacaucgugcugaucgcccucagccugcuggccauccucaaggggaucuacaacgucgcgaccugcggccuguucgggcugguguccuuccuccugcugugcggccgcagcugcuccacgaccuacaaggggguguacgagcuccagacccuggagcuggacauggccagccucaacaugaccaugccgcuguccugcacgaagaacaacagccaccacuacaucauggucggcaacgagaccggccuggagcucacccugaccaacacguccaucaucaaccacaaguucugcaaccugagcgacgcccacaagaagaaccucuacgaccacgcccugauguccaucaucagcaccuuccaccuguccauccccaacuucaaccaguacgaggccaugagcugcgacuucaacgggggcaagaucuccgugcaguacaaccucagccacgcguacgccaucgacgccgccucccacugcgggaccaucgcgaacggcgugcugcagaccuucaugcggauggccuggggcgggagcuacaucgcccuggacuccggcugcgggagcugggacugcaucaugacguccuaccaguaccucaucauccagaacaccaccugggaggaccacugccaguucagccgccccagccccaucggcuaccuggggcugcucucccagcggacccgcgacaucuacaucagccggcgccggcgcggcacguucaccuggacccuguccgacagcgagggcaacgagacccccgggggcuacugccugacgcgguggaugcucaucgaggccgagcugaagugcuucgggaacaccgccgucgcgaagugcaacgagaagcacgacgaggaguucugcgacaugcugcgccucuucgacuucaacaagcaggccauccggcgccugaagaccccggcccagauguccauccagcugaucaacaaggccgugaacgcccucaucaacgaccagcugaucaugaagaaccaccuccgggacaucaugugcauccccuacugcaacuacagcaaguacugguaccugaaccacaccgugacgggcaagaccucccugccccgcugcuggcuggucagcaacggguccuaccucaacgagacccacuucagcgacgacaucgagcagcaggcggacaacaugaucaccgagcugcugcagaaggaguaccucgaccggcagggcaagacgccgcugggccugguggaccucuucguguucuccaccagcuucuaccugaucuccaucuuccugcaccuggucaagauccccacccaccgccacgugaucgggcggcccugccccaagccgcaccgccucaaccacaugggcaucugcagcugcgggcuguacaagcaccccggcgugcccgucaaguggaagcgguga

SEQ ID NO: 4415 - RNA, 1473 nt, Artificial Sequence
  derived and/or modified protein sequence (opt1) from LASV(Lassa virus/H.sapiens-wt/NGA/2016/ISTH_1070;Clade II)__AVO03651__GPCstabilized
augggccagaucaucaccuucuuccaggaggugccccacgucaucgaggaggugaugaacaucgugcugaucgcccucagccugcuggccauccucaaggggaucuacaacgucgcgaccugcggccuguucgggcugguguccuuccuccugcugugcggccgcagcugcuccacgaccuacaaggggguguacgagcuccagacccuggagcuggacauggccagccucaacaugaccaugccgcuguccugcacgaagaacaacagccaccacuacaucauggucggcaacgagaccggccuggagcucacccugaccaacacguccaucaucaaccacaaguucugcaaccugagcgacgcccacaagaagaaccucuacgaccacgcccugauguccaucaucagcaccuuccaccuguccauccccaacuucaaccaguacgaggccaugagcugcgacuucaacgggggcaagaucuccgugcaguacaaccucagccacaccuucgcgguggacgccgccaaccacugcgggaccaucgccaacggcguccugcagacguucaugcggauggcguggggcggguccuacaucgcccuggacagcggcugcggguccugggacugcaucaugaccagcuaccaguaccucaucauccagaacaccaccugggaggaccacugccaguucucccgccccagccccaucggcuaccuggggcugcucagccagcggacgcgcgacaucuacaucucccggcgccggcgcggcaccuucaccuggacccugagcgacuccgagggcaacgagacgcccgggggcuacugccugacccgguggaugcucaucgaggccgagcugaagugcuucgggaacaccgccguggccaagugcaacgagaagcacgacgaggaguucugcgacaugcugcgccucuucgacuucaacaagcaggcgauccggcgccugaagaccccggcccagaugagcauccagcugaucaacaaggccgugaacgcccucaucaacgaccagcugaucaugaagaaccaccuccgggacaucaugugcauccccuacugcaacuacuccaaguacugguaccugaaccacacggucaccggcaagaccagccugccccgcugcuggcugguguccaacgggagcuaccucaacgagacccacuucuccgacgacaucgagcagcaggccgacaacaugaucacggagcugcugcagaaggaguacauggaccggcagggcaagaccccgcucggccugguggaccuguucgucuucagcaccuccuucuaccucaucagcaucuuccugcaccuggugaagauccccacccaccgccacaucaucgggaagcccugccccaagccgcaccggcugaaccacaugggcaucugcuccugcgggcucuacaagcaccccggcgugcccgucaaguggaagcgcuga

SEQ ID NO: 4416 - RNA, 1473 nt, Artificial Sequence
  derived and/or modified protein sequence (opt1) from LASV(Lassa virus/H.sapiens-wt/NGA/2016/ISTH_1123;Clade II)__AVO03645__GPCstabilized
augggccagaucaucaccuucuuccaggaggugccccacgucaucgaggaggugaugaacaucgugcugaucgcccucagccugcuggccauccucaaggggaucuacaacgucgcgaccugcggccuguucgggcugguguccuuccuccugcugugcggccgcagcugcuccacgaccuacaaggggguguacgagcuccagacccuggagcuggacaugggcagccucaacaugaccaugccgcuguccugcacgaagaacaacagccaccacuacaucauggucggcaacgagaccgggcuggagcucacccugaccaacacguccaucaucaaccacaaguucugcaaccugagcgacgcccacaagaagaaccucuacgaccacgcccugauguccaucaucagcaccuuccaccuguccauccccaacuucaaccaguacgaggccaugagcugcgacuucaacggcgggaagaucuccgugcaguacaaccucagccacgccuacgcgguggacgccgccaaccacugcggcaccaucgccaacgggguccugcagaccuucaugcggauggcguggggcggcuccuacaucgcccuggacagcgggugcggcuccugggacugcaucaugacgagcuaccaguaccucaucauccagaacaccuccugggaggaccacugccaguucagccgccccagccccaucggguaccugggccugcucucccagcggacccgcgacaucuacaucagccggcgccggcgcggcaccuucacguggacccuguccgacagcgaggggaacgagaccccgggcggguacugccugacccgguggaugcucaucgaggccgagcugaagugcuucggcaacacggccguggccaagugcaacgagaagcacgacgaggaguucugcgacaugcugcgccucuucgacuucaacaagcaggcgauccggcgccugaagacccccgcccagauguccauccagcugaucaacaaggccgugaacgcccucaucaacgaccagcugaucaugaagaaccaccuccgggacaucaugugcauccccuacugcaacuacagcaaguacugguaccugaaccacaccgucaccgggaagacgucccugccccgcugcuggcuggugagcaacggcuccuaccucaacgagacccacuucagcgacgacaucgagcagcaggccgacaacaugaucaccgagcugcugcagaaggaguacaucgaccggcagggcaagaccccgcucgggcugguggaccuguucgucuucuccacgagcuucuaccucaucuccaucuuccugcaccuggugaagauccccacccaccgccacgugaucggcaagcccugccccaagccgcaccggcugaaccacauggggaucugcagcugcggccucuacaagcaccccgggguccccgugaaguggaagcgcuga

SEQ ID NO: 4417 - RNA, 1473 nt, Artificial Sequence
  derived and/or modified protein sequence (opt1) from LASV(Lassa virus/H.sapiens-wt/NGA/2016/ISTH_1150;Clade II)__AVO03627__GPCstabilized
augggccaggugaucaccuucuuccaggagaucccccacgucaucgaggaggugaugaacaucgugcugaucacccucagccugcuggccauccucaaggggaucuacaacgucgccacgugcggccuguucgggcugaucuccuuccuccugcugugcggccgcagcugcuccaccaccuacaaggggguguacgagcuccagacccuggagcuggacauggcgaaccucaacaugacgaugccgcugagcugcaccaagaacuccagccaccacuacaucauggugggcaacgagaccggccuggagcucacccugacgaacaccuccaucaucaaccacaaguucugcaaccugagcgacgcccacaagaagaaccucuacgaccacgcccugauguccaucaucagcaccuuccaccuguccauccccaacuucaaccaguacgaggccaugagcugcgacuucaacgggggcaagaucuccguccaguacaaccucagccacgccuacgcgguggacgccgccaaccacugcgggaccaucgccaacggcgugcugcagacguucaugcggauggcguggggcggguccuacaucgcccuggacagcggcugcgggaacugggacugcaucaugaccuccuaccaguaccucaucauccagaacaccaccugggaggaccacugccaguucagccgccccucccccaucggcuaccuggggcugcucagccagcggacgcgcgacaucuacaucagccggcgccggcgcggcaccuucaccuggacccuguccgacagcgagggcaacgaggcccccgggggcuacugccugacgcgguggaugcucaucgaggccgagcugaagugcuucgggaacaccgccaucgcgaagugcaacgagaagcacgacgaggaguucugcgacaugcugcgccucuucgacuucaacaagcaggccauccggcgccugaagaccccggcccagaaguccauccagcugaucaacaaggccgucaacgcccucaucaacgaccagcugaucaugaagaaccaccuccgggacaucaugugcauccccuacugcaacuacagcaaguacugguaccugaaccacaccgugacgggcaagaccucccugcccaagugcuggcugaucagcaacggguccuaccucaacgagacccacuucagcgacgacaucgagcagcaggcggacaacaugaucaccgagcugcugcagaaggaguacauggaccgccagggcaagacgccgcucggccugguggaccuguucgucuucuccaccagcuucuaccucaucuccaucuuccugcaccuggugaagauccccacccaccggcacaucguggggcgccccugccccaagccgcaccggcugaaccacaugggcaucugcagcugcgggcucuacaagcaccccggcguccccgugaaguggaagcgcuga

SEQ ID NO: 4418 - RNA, 1473 nt, Artificial Sequence
  derived and/or modified protein sequence (opt1) from LASV(Lassa virus/H.sapiens-wt/NGA/2016/ISTH_1174;Clade II)__AVO03555__GPCstabilized
augggccagaucaucaccuucuuccaggaggugccccacgucaucgaggaggugaugaacaucgugcugaucgcccucagccugcuggccauccucaaggggaucuacaacgucgcgaccugcggcuucuucgggcugguguccuuccugcuccugugcggccgcagcugcuccacgaucuacaaggggguguacgagcugcagacccucgagcuggacauggccagccugaacaugaccaugccgcucuccugcaccaagaacaacagccaccacuacaucauggucggcaacgagacgggccuggagcugacccucaccaacaccuccaucaucaaccacaaguucugcaaccugagcgacgcccacaagaagaaccuguacgaccacgcccucauguccaucaucagcacguuccaccuguccaucccccacuucaaccaguacgaggccaugagcugcgacuucaacgggggcaagaucuccgugcaguacaaccugagccacaccuacgcgguggacgccgccaaccacugcgggaccaucgccaacggcguccuccagaccuucaugcggauggcguggggcggguccuacaucgcccuggacagcggcugcggguccugggacugcaucaugacgagcuaccaguaccugaucauccagaacaccaccugggaggaccacugccaguucucccgccccagccccaucggcuaccucgggcugcugagccagcggacccgcgacaucuacaucucccggcgccggcgcggcacguucaccuggacccucagcgacuccgagggcaacgagacccccgggggcuacugccugacgcgguggaugcugaucgaggccgagcucaagugcuucgggaacaccgccguggccaagugcaacgagaagcacgacgaggaguucugcgacaugcugcgccuguucgacuucaacaagcaggcgauccggaagcucaagaccccggcccagaugagcauccagcugaucaacaaggccgugaacgcccugaucaacgaccagcucaucaugaagaaccaccuccgcgacaucaugugcauccccuacugcaacuacuccaaguacugguaccugaaccacaccgucacgggcaagaccagccugccccggugcuggcugguguccaacgggagcuaccugaacgagacccacuucuccgacgacaucgagcagcaggccgacaacaugaucaccgagcuccugcagaaggaguacauggaccgccagggcaagacgccgcugggccucguggaccuguucgucuucagcaccuccuucuaccugaucagcaucuuccuccaccuggugaagauccccacccaccggcacgugaucgggaagcccugccccaagccgcaccgccugaaccacaugggcaucugcuccugcgggcuguacaagcaccccggcguccccgugaaguggaagcgguga

SEQ ID NO: 4419 - RNA, 1473 nt, Artificial Sequence
  derived and/or modified protein sequence (opt1) from LASV(Lassa virus/H.sapiens-wt/NGA/2016/ISTH_1207;Clade II)__AVO03599__GPCstabilized
augggccagaucaucaccuucuuccaggaggugccccacgucaucgaggaggugaugaacaucgugcugaucgcccucagccugcuggccauccucaaggggaucuacaacgucgcgaccugcggccuguucgggcugguguccuuccuccugcugugcggccgcagcugcuccacgaccuacaaggggguguacgagcuccagacccuggagcuggacaugaccagccucaacaugacgaugccgcuguccugcaccaagaacaacagccaccacuacaucauggucggcaacgagaccggccuggagcucacccugacgaacaccuccaucaucaaccacaaguucugcaaccugagcgacgcccacaagaagaaccucuacgaccacgcccugauguccaucaucagcaccuuccaccuguccauccccaacuucaaccaguacgaggccaugagcugcgacuucaacgggggcaagaucuccgugcaguacaaccucagccacaccuacgccguggacgcggccaaccacugcgggacgaucgccaacggcguccugcagaccuucaugcggauggccuggggcggguccuacaucgcgcuggacagcggcugcggguccugggacugcaucaugaccagcuaccaguaccucaucauccagaacaccacgugggaggaccacugccaguucucccgccccagccccaucggcuaccuggggcugcucagccagcggacccgcgacaucuacaucucccggcgccggcgcggcaccuucaccuggacgcugagcgacuccgagggcaacgacacccccgggggcuacugccugacccgguggaugcucaucgaggccgagcugaagugcuucgggaacaccgccguggccaagugcaacgagaagcacgacgaggaguucugcgacaugcugcgccucuucgacuucaacaagcaggccauccggcgccugaagacgccggcgcagaugagcauccagcugaucaacaaggccgugaacgcccucaucaacgaccagcugaucaugaagaaccaccuccgggacaucaugugcauccccuacugcaacuacuccaaguacugguaccugaaccacaccgucaccggcaagaccagccugccccgcugcuggcugguguccaacgggagcuaccucaacgagacgcacuucuccgacgacaucgagcagcaggccgacaacaugaucaccgagcugcugcagaaggaguacaucgaccggcagggcaagaccccgcucggccugguggaccuguucgucuucagcaccuccuucuaccucaucagcaucuuccugcaccuggugaagauccccacgcaccgccacgugaucgggaagcccugccccaagccgcaccggcugaaccacaugggcaucugcuccugcgggcucuacaagcaccccggcguccccgugaaguggaagcgcuga

SEQ ID NO: 4420 - RNA, 1473 nt, Artificial Sequence
  derived and/or modified protein sequence (opt1) from LASV(Lassa virus/H.sapiens-wt/NGA/2016/ISTH_1306;Clade II)__AVO03623__GPCstabilized
augggccagaucaucaccuucuuccaggaggugccccacgucaucgaggaggugaugaacaucgugcugaucgcccucagccugcuggccauccucaaggggaucuacaacgucgcgaccugcggccuguucgggcugguguccuuccuccugcugugcggccgcagcugcuccacgaccuacaaggggguguacgagcuccagacccuggagcuggacauggccagccucaacaugaccaugccgcuguccugcacgaagaacaacagccaccacuacaucauggucggcaacgagaccggccuggagcucacccugaccaacacguccaucaucaaccacaaguucugcaaccugagcgacgcccacaagaagaaccucuacgaccacgcccugauguccaucaucagcaccuuccaccuguccauccccaacuucaaccaguacgaggccaugagcugcgacuucaacgggggcaagaucuccgugcaguacaaccucagccacaccuacgcgguggacgccgccaaccacugcgggaccgucgccaacggcgugcugcagacguucaugcggauggcguggggcggguccuacaucgcccuggacagcggcugcggguccugggacugcaucaugaccagcuaccaguaccucaucauccagaacaccaccugggaggaccacugccaguucucccgccccagccccaucggcuaccuggggcugcucagccagcggacgcgcgacaucuacaucucccggcgccggcgcggcaccuucaccuggacccugagcgacuccgagggcaacgagacgcccgggggcuacugccugacccgguggaugcucaucgaggccgagcugaagugcuucgggaacaccgccguggccaagugcaacgagaagcacgacgaggaguucugcgacaugcugcgccucuucgacuucaacaagcaggcgauccggcgccugaagaccccggcccagaugagcauccagcugaucaacaaggccgucaacgcccucaucaacgaccagcugaucaugaagaaccaccuccgggacaucaugugcauccccuacugcaacuacuccaaguacugguaccugaaccacacggugaccggccgcaccagccugccccggugcuggcugguguccaacgggagcuaccucaacgagacccacuucuccgacgacaucgagcagcaggccgacaacaugaucacggagcugcugcagaaggaguacaucgaccgccagggcaagaccccgcucggccuggucgaccuguucguguucagcaccuccuucuaccucaucagcaucuuccugcaccuggugaagauccccacccaccggcacgucaucgggaagcccugccccaagccgcaccgccugaaccacaugggcaucugcuccugcgggcucuacaagcaccccggcgugcccgugaaguggaagcgguga

SEQ ID NO: 4421 - RNA, 1473 nt, Artificial Sequence
  derived and/or modified protein sequence (opt1) from LASV(Lassa virus/H.sapiens-wt/NGA/2016/ISTH_1311;Clade II)__AVO03575__GPCstabilized
augggccagaucgugaccuucuuccaggaggucccccacgugaucgaggaggugaugaacaucguccugaucgcccucagccugcuggccauccucaaggggaucuacaacguggcgaccugcggccuguucgggcugaucuccuuccuccugcugugcggccgcagcugcuccacgaccuacaaggggguguacgagcuccagacccuggagcuggacauggccaaccucaacaugaccaugccgcugagcugcacgaagaacaacucccaccacuacaucauggucggcaacgagaccggccuggagcucacccugaccaacacgagcaucaucaaccacaaguucugcaaccuguccgacgcccacaagaagaaccucuacgaccacgcccugaugagcaucaucuccaccuuccaccugagcauccccaacuucaaccaguacgaggccauguccugcgacuucaacgggggcaagaucagcgugcaguacaaccucucccacgcguacgccggggacgccgccagccacugcggcaccaucgcgaacggggugcugcagaccuucaugcggauggccuggggcggcuccuacaucgcccuggacagcgggugcggcaacugggacugcaucaugacguccuaccaguaccucaucauccagaacaccaccugggaggaccacugccaguucagccgccccucccccaucggguaccugggccugcucagccagcggacccgcgacaucuacaucagccggcgccggcgcggcacguucaccuggacccuguccgacagcgaggggaacgacgccccgggcggguacugccugacccgguggaugcucaucgaggccgagcugaagugcuucggcaacacggcgaucgccaagugcaacgagaagcacgacgaggaguucugcgacaugcugcgccucuucgacuucaacaagcaggccaucaagcggcugaagacccccgcccagauguccauccagcugaucaacaaggccgucaacgcgcucaucaacgaccagcugaucaugaagaaccaccuccgcgacaucaugugcauccccuacugcaacuacagcaaguacugguaccugaaccacaccaccacggggaagaccucccugcccaagugcuggcugaucagcaacggcuccuaccucaacgagacccacuucagcgacgacaucgagcagcaggccgacaacaugaucaccgagcugcugcagaaggaguaccucgaccggcagggcaagacgccgcuggggcugguggaccucuucguguucuccaccagcuucuaccugaucuccaucuuccugcaccugaucaagauccccacccaccgccacaucgucggccggcccugccccaagccgcaccgccucaaccacauggggaucugcagcugcggccuguacaagcaccccggggugcccgugaaguggaagcgguga

SEQ ID NO: 4422 - RNA, 1473 nt, Artificial Sequence
  derived and/or modified protein sequence (opt1) from LASV(Lassa virus/H.sapiens-wt/NGA/2016/ISTH_1423;Clade II)__AVO03577__GPCstabilized
augggccagaucgugaccuucuuccaggaggucccccacgugaucgaggaggugaugaacaucguccugaucgcccucagccugcuggccauccucaaggggaucuacaacguggcgaccugcggccuguucgggcugguguccuuccuccugcugugcggccgcagcugcuccacgaccuacaagggggucuacgagcuccagacccuggagcuggacauggccaaccucaacaugaccaugccgcugagcugcacgaagaacaacucccaccacuacaucauggugggcaacgagaccggccuggagcucacccugaccaacacgagcaucaucaaccacaaguucugcaaccuguccgacgcccacaagaagaaccucuacgaccacgcccugaugagcaucaucuccaccuuccaccugagcauccccaacuucaaccaguacgaggccauguccugcgacuucaacgggggcaagaucagcgugcaguacaaccucucccacagcuacgcggucgacgccgccaaccacugcgggaccguggccaacggcgugcugcagaccuucaugcggauggcguggggcggguccuacaucgcccuggacagcggcugcggguccugggacugcaucaugacgagcuaccaguaccucaucauccagaacaucaccugggaggaccacugccaguucucccgccccagccccaucggcuaccuggggcugcucagccagcggacccgcgacaucuacaucucccggcgccggcgcggcaccuucacguggacccugagcgacuccgagggcaaggagacccccgggggcuacugccugacccgguggaugcucaucgaggccgagcugaagugcuucgggaacacggccgucgccaagugcaacgagaagcacgacgaggaguucugcgacaugcugcgccucuucgacuucaacaagcaggcgauccggcgccugaagaccccggcccagaugagcauccagcugaucaacaaggccgugaacgcccucaucaacgaccagcugaucaugaagaaccaccuccgggacaucaugugcauccccuacugcaacuacuccaaguacugguaccugaaccacaccgugaccggcaagacgagccugccccgcugcuggcuggucuccaacgggagcuaccucaacgagacccacuucuccgacgacaucgagcagcaggccgacaacaugaucaccgagcugcugcagaaggaguacaucgaccggcagggcaagaccccgcucggccugguggaccuguucguguucagcacguccuucuaccucaucagcaucuuccugcaccuggucaagauccccacccaccgccacauccuggggaagcccugccccaagccgcaccggcucaaccacaugggcaucugcuccugcgggcuguacaagcaccccggcgugcccgugaaguggaagcgcuga

SEQ ID NO: 4423 - RNA, 1473 nt, Artificial Sequence
  derived and/or modified protein sequence (opt1) from LASV(Lassa virus/H.sapiens-wt/NGA/2016/ISTH_1462;Clade II)__AVO03587__GPCstabilized
augggccagaucaucaccuucuuccaggaggugccccacgucaucgaggaggugaugaacaucgugcugaucgcccucagccugcuggccauccucaaggggaucuacaacgucgcgaccugcggccuguucgggcugguguccuuccuccugcugugcggccgcagcugcuccacgaccuacaaggggguguacgagcuccagacccuggagcuggacauggccagccucaacaugaccaugccgcuguccugcacgaagaacaacagccaccacuacaucauggucggcaacgagaccggccuggagcucacccugaccaacacguccaucaucaaccacaaguucugcaaccugagcgacgcccacaagaagaaccucuacgaccacgcccugauguccaucaucagcaccuuccaccuguccauccccaacuucaaccaguacgaggccaugagcugcgacuucaacgggggcaagaucuccgugcaguacaaccucagccacaccuacgcgguggacgccgccaaccacugcgggaccaucgccaacggcguccugcagacguucaugcggauggcguggggcggguccuacaucgcccuggacagcggcugcggguccugggacugcaucaugaccagcuaccaguaccucaucauccagaacaccaccugggaggaccacugccaguucucccgccccagccccaucggcuaccuggggcugcucagccagcggacgcgcgacaucuacaucucccggcgccggcgcggcaccuucaccuggacccugagcgacuccgagggcaacgagacgcccgggggcuacugccugacccgguggaugcucaucgaggccgagcugaagugcuucgggaacaccgccguggccaagugcaacgagaagcacgacgaggaguucugcgacaugcugcgccucuucgacuucaacaagcaggcgauccggcgccugaagaccccggcccagaugagcauccagcugaucaacaaggccgugaacgcccucaucaacgaccagcugaucaugaagaaccaccuccgggacaucaugugcauccccuacugcaacuacuccaaguacugguaccugaaccacacggucaccggccgcaccagccugccccggugcuggcugguguccaacgggagcuaccucaacgagacccacuucuccgacgacaucgagcagcaggccgacaacaugaucacggagcugcugcagaaggaguacaucgagcgccagggcaagaccccgcucggccugguggaccuguucgucuucagcaccuccuucuaccucaucagcaucuuccugcaccugaucaagauccccacccaccggcacgugaucgggaagcccugccccaagccgcaccgccugaaccacaugggcaucugcuccugcgggcucuacaagcaccccggcgugcccgucaaguggaagcgguga

SEQ ID NO: 4424 - RNA, 1473 nt, Artificial Sequence
  derived and/or modified protein sequence (opt1) from LASV(Lassa virus/H.sapiens-wt/NGA/2016/ISTH_1472;Clade II)__AVO03605__GPCstabilized
augggccagaucaucaccuucuuccaggaggugccccacgucaucgaggaggugaugaacaucgugcugaucgcccucagccugcuggccauccucaaggggaucuacaacgucgcgaccugcggccuguucgggcugguguccuuccuccugcugugcggccgcagcugcuccacgaccuacaaggggguguacgagcuccagacccuggagcuggacauggccagccucaacaugaccaugccgcuguccugcacgaagaacaacagccaccacuacaucauggucggcaacgagaccggccuggagcucacccugaccaacacguccaucaucaaccacaaguucugcaaccugagcgacgcccacaagaagaaccucuacgaccacgcccugauguccaucaucagcaccuuccaccuguccauccccaacuucaaccaguacgaggccaugagcugcgacuucaacgggggcaagaucuccgugcaguacaaccucagccacaccuacgcgguggacgccgccaaccacugcgggaccaucgccaacggcguccugcagacguucaugcggauggcguggggcggguccuacaucgcccuggacagcggcugcggguccugggacugcaucaugaccagcuaccaguaccucaucauccagaacaccaccugggaggaccacugccaguucucccgccccagccccaucggcuaccuggggcugcucagccagcggacgcgcgacaucuacaucucccggcgccggcgcggcaccuucaccuggacccugagcgacuccgagggcaacgagacgcccgggggcuacugccugacccgguggaugcucaucgaggccgagcugaagugcuucgggaacaccgccguggccaagugcaacgagaagcacgacgaggaguucugcgacaugcugcgccucuucgacuucaacaagcaggcgauccggcgccugaagaccccggcccagaugagcauccagcugaucaacaaggccgugaacgcccucaucaacgaccagcugaucaugaagaaccaccuccgggacaucaugugcauccccuacugcaacuacuccaaguacugguaccugaaccacacggucaccggccgcaccagccugccccggugcuggcugguguccaacgggagcuaccucaacgagacccacuucuccgacgacaucgagcagcaggccgacaacaugaucacggagcugcugcagaaggaguacaucgaccgccagggcaagaccccgcucggccugguggaccuguucgucuucagcaccuccuucuaccucaucagcaucuuccugcaccugaucaagauccccacccaccggcacgugaucgggaagcccugccccaagccgcaccgccugaaccacaugggcaucugcuccugcgggcucuacaagcaccccggcgugcccgucaaguggaagcgguga

SEQ ID NO: 4425 - RNA, 1473 nt, Artificial Sequence
  derived and/or modified protein sequence (opt1) from LASV(Lassa virus/H.sapiens-wt/NGA/2016/ISTH_1474;Clade II)__AVO03613__GPCstabilized
augggccagaucaucaccuucuuccaggaggugccccacgucaucgaggaggugaugaacaucgugcugaucgcccucagccugcuggccauccucaaggggaucuacaacgucgcgaccugcggccuguucgggcugguguccuuccuccugcugugcggccgcagcugcuccacgaccuacaaggggguguacgagcuccagacccuggagcuggacauggccagccucaacaugaccaugccgcuguccugcacgaagaacaacagccaccacuacaucauggucggcaacgagaccggccuggagcucacccugaccaacacguccaucauccaccacaaguucugcaaccugagcgacgcccacaagaagaaccucuacgaccacgcccugauguccaucaucagcaccuuccaccuguccauccccaacuucaaccaguacgaggccaugagcugcgacuucaacgggggcaagaucuccgugcaguacaaccucagccacaccuacgcgguggacgccgccaaccacugcgggaccaucgccaacggcguccugcagacguucaugcggauggcguggggcggguccuacaucgcccuggacagcggcugcggguccugggacugcaucaugaccagcuaccaguaccucaucauccagaacaccaccugggaggaccacugccaguucucccgccccagccccaucggcuaccuggggcugcucagccagcggacgcgcgacaucuacaucucccggcgccggcgcggcaccuucaccuggacccugagcgacuccgagggcaacgagacgcccgggggcuacugccugacccgguggaugcucaucgaggccgagcugaagugcuucgggaacaccgccguggccaagugcaacgagaagcacgacgaggaguucugcgacaugcugcgccucuucgacuucaacaagcaggcgauccggcgccugaagaccccggcccagaugagcauccagcugaucaacaaggccgugaacgcccucaucaacgaccagcugaucaugaagaaccaccuccgggacaucaugugcauccccuacugcaacuacuccaaguacugguaccugaaccacacggucaccggccgcaccagccugccccggugcuggcugguguccaacgggagcuaccucaacgagacccacuucuccgacgacaucgagcagcaggccgacaacaugaucacggagcugcugcagaaggaguacaucgaccgccagggcaagaccccgcucggccugguggaccuguucgucuucagcaccuccuucuaccucaucagcaucuuccugcaccugaucaagauccccacccaccggcacgugaucgggaagcccugccccaagccgcaccgccugaaccacaugggcaucugcuccugcgggcucuacaagcaccccggcgugcccgucaaguggaagcgguga

SEQ ID NO: 4426 - RNA, 1476 nt, Artificial Sequence
  derived and/or modified protein sequence (opt1) from LASV(Lassa virus/H.sapiens-wt/NGA/2016/ISTH_1496;Clade II)__AVO03579__GPCstabilized
augggccagaucaucaccuucuuccaggaggugccccacgucaucgaggaggugaugaacaucgugcugaucgcccucagccugcuggccauccucaagggggucuacaacguggcgaccugcggccuguucgggcugguguccuuccuccugcugugcggccgcagcugcuccacgaccaucuacaagggggucuacgagcuccagacccuggagcuggacauggccagccucaacaugaccaugccgcuguccugcacgaagaacaacagccaccacuacaucauggugggcaacgagaccggccuggagcucacccugaccaacacguccaucaucaaccacaaguucugcaaccugagcgacgcccacaagaagaaccucuacgaccacgcccugauguccaucaucagcaccuuccaccuguccauccccaacuucaaccaguacgaggccaugagcugcgacuucaacgggggcaagaucuccgugcaguacaaccucagccacgcguacgccgucgacgccgccaaccacugcgggaccaucgcgaacggcgugcugcagaccuucaugcggauggccuggggcggguccuacaucgcccuggacagcggcugccgcuccugggacugcaucaugacgagcuaccaguaccucaucauccagaacaccaccugggaggaccacugccaguucucccggcccagccccaucggguaccugggccugcucagccagcgcacccgggacaucuacaucucccgccggcgccgggggacguucaccuggacccugagcgacuccgagggcaacgagaccccgggcggguacugccugacgcgcuggaugcucaucgaggccgagcugaagugcuucggcaacaccgccguggcgaagugcaacgagaagcacgacgaggaguucugcgacaugcugcggcuguucgacuucaacaagcaggccauccgccggcugaagacccccgcccagaugagcauccagcugaucaacaaggccgucaacgcccucaucaacgaccagcugaucaugaagaaccaccuccgcgacaucaugugcauccccuacugcaacuacuccaaguacugguaccucaaccacaccgugacggggaagaccagccugccccggugcuggcugguguccaacggcagcuaccucaacgagacccacuucuccgacgacaucgagcagcaggcggacaacaugaucaccgagcugcugcagaaggaguacaucgaccgccaggggaagacgccgcucggccuggucgaccuguucguguucagcaccuccuucuaccucaucagcaucuuccugcaccuggugaagauccccacccaccggcacgucaucggcaagcccugccccaagccgcaccgccugaaccacauggggaucugcuccugcggccucuacaagcaccccggggugcccgugaaguggaagcgguga

SEQ ID NO: 4427 - RNA, 1473 nt, Artificial Sequence
  derived and/or modified protein sequence (opt1) from LASV(Lassa virus/H.sapiens-wt/NGA/2016/ISTH_1541;Clade II)__AVO03553__GPCstabilized
augggccagaucgugaccuucuuccaggaggucccccacgugaucgaggagaucaugaacaucgugcugaucacccucagccugcuggccguccucaaggggaucuacaacuucgccacgugcggccugaucgggcugaucaccuuccucuuccugugcggccgcuccugcagcaccaucuacaaggggaacuaccagcugcagacccucgagcugaacauggagacgcugaacaugaccaugccgcucuccugcaccaagaacaacagccaccacuacauccgggugggcaacgagaccggccuggagcugacgcucaccaacguguccaucaucaaccaccgcuucugcaaccugagcgacgcgcacaagcggaaccuguacgaccacacccucauguccaucaucagcaccuuccaccuguccauccccaacuucaaccaguacgaggccaugagcugcgacuucaacgggggcaagaucuccguccaguacaaccugagccacggguacgccguggacgccgccaagcacugcggcacgguggcgaacgggguccuccagaccuucaugcgcauggccuggggcggcuccuacaucgcccuggacagcgggugcggcaacugggacugcaucaugaccuccuaccaguaccugaucauccagaacaccacgugggaggaccacugccaguucagccggcccucccccaucggguaccucggccugcugagccagcgcacccgggacaucuacaucucccgccggcgccggggcaccuucaccuggacgcucagcgacagcgaggggcgcgagaccccgggcggguacugccugacccgguggaugcugaucgaggccgagcucaagugcuucggcaacaccgcgguggccaagugcaacgagaagcacgacgaggaguucugcgacaugcugcgccuguucgacuucaacaagcaggccauccagcggcucaagacgcccgcccagauguccauccagcugaucaacaaggccgugaacgcgcugaucaacgaccagcucaucaugaagaaccaccuccgcgacaucaugugcauccccuacugcaacuacagcaaguacugguaccugaaccacaccaccaccgggaagacgucccugcccaagugcuggcuggucaccaacggcagcuaccugaacgagacccacuucuccgacgacaucgagcagcaggccgacaacaugaucaccgagaugcuccagaaggaguacaucgaccggcagggcaagacgccgcuggggcugguggaccucuucguguucagcaccuccuucuaccugaucagcaucuuccugcaccucaucaagauccccaaccaccgccacaucgucggcaagcccugccccaagccgcaccggcugaaccacauggggaucugcuccugcggcuucuacaagcagcccggggugcccgugcgcuggaagcgguga

SEQ ID NO: 4428 - RNA, 1473 nt, Artificial Sequence
  derived and/or modified protein sequence (opt1) from LASV(Lassa virus/H.sapiens-wt/NGA/2016/ISTH_1546;Clade II)__AVO03537__GPCstabilized
augggccagaucgugaccuucuuccaggagaucccccacgucguggaggagaucaugaacaucgugcugaucacccucagccugcuggccauccucaaggggcuguacaacuucgccacgugcggccugaucgggcucaucaccuuccuguuccugugcggccgcuccugcagcaccaucuacaagggguccuaccagcuccaggcgcuggagcugaacauggagacccucaacaugacgaugccgcugagcugcaccaagaacaacucccaccacuacauccgggucggcaacgagaccggccuggagcucacccugacgaacaccagcaucaucaaccacaaguucugcaaccuguccgacgcccacaagaagaaccucuacgaccacacccugaugagcaucaucuccaccuuccaccugagcauccccaacuucaaccaguacgaggccauguccugcgacuucaacgggggcaagaucagcgugcaguacaaccucucccacagcuacgccggggacgccgcgcgccacugcggcacgguggccaacgggguccugcagaccuucaugcggauggccuggggcggcuccuacaucgcccuggacagcgggugcggcaacugggacugcaucaugaccuccuaccaguaccucaucauccagaacaccacgugggaggaccacugccaguucagccgccccucccccaucggguaccugggccugcucagccagcggacccgcgacaucuacaucagccggcgccggcgcggcaccuucaccuggacgcuguccgacagcgaggggaaggagaccccgggcggguacugccugacccgguggaugcucaucgaggcggagcugaagugcuucggcaacaccgccguggccaagugcaacgagaagcacgacgaggaguucugcgacaugcugcgccucuucgacuucaacaagcaggccauccagcggcugaagacgcccgcccagauguccauccagcugaucaacaaggcggugaacgcccucaucaacgaccagcugaucaugaagaaccaccuccgcgacaucaugugcauccccuacugcaacuacagcaaguacugguaccugaaccacaccaccaccgggaagacgucccugccccggugcuggcuggucagcaacggcuccuaccucaacgagacccacuucagcgacgacaucgagcagcaggccgacaacaugaucaccgagaugcugcagaaggaguacaucgaccgccagggcaagaccccgcuggggcucguggaccuguucguguucuccacgagcuucuaccugaucuccaucuuccuccaccugaucaagauccccacccaccggcacaucgucggcaagagcugccccaagccccaccgccugaaccacauggggaucugcuccugcggccuguacaagcagccgggggugcccgugaaguggaagcgguga

SEQ ID NO: 4429 - RNA, 1473 nt, Artificial Sequence
  derived and/or modified protein sequence (opt1) from LASV(Lassa virus/H.sapiens-wt/NGA/2016/ISTH_1591;Clade II)__AVO03647__GPCstabilized
augggccagaucaucaccuucuuccaggaggugccccacgucaucgaggaggugaugaacaucgugcugaucgcccucagccugcuggccauccucaaggggaucuacaacgucgcgaccugcggccuguucgggcugguguccuuccuccugcugugcggccgcagcugcuccacgaccuacaaggggguguacgagcuccagacccuggagcuggacauggccagccucaacaugaccaugccgcuguccugcacgaagaacaacagccaccacuacaucauggucggcaacgagaccggccuggagcucacccugaccaacacguccaucauccagcacaaguucugcaaccugagcgacgcccacaagaagaaccucuacgaccacgcccugauguccaucgugagcaccuuccaccuguccauccccaacuucaaccaguacgaggccaugagcugcgacuucaacgggggcaagaucaccgugcaguacaaccucucccacagcuacgcgaucgacgccgccaaccacugcgggaccgucgccaacggcgugcugcagacguucaugcggauggcguggggcggguccuacaucgcccuggacagcggcugcggguccugggacugcaucaugaccagcuaccaguaccucaucauccagaacaccaccugggaggaccacugccaguucucccgccccagccccaucggcuaccuggggcugcucagccagcggacgcgcgacaucuacaucucccggcgccggcgcggcaccuucaccuggacccugagcgacuccgagggcaacgagacgcccgggggcuacugccugacccgguggaugcucaucgaggccgagcugaagugcuucgggaacaccgccguggccaagugcaacgagaagcacgacgaggaguucugcgacaugcugcgccucuucgacuucaacaagcaggcgauccggcgccugaaggccccggcccagaugagcauccagcugaucaacaaggccgucaacgcccucaucaacgaccagcugaucaugaagaaccaccuccgggacaucaugugcauccccuacugcaacuacuccaaguacugguaccugaaccacaccgugacgggccgcaccagccugccccggugcuggcugguguccaacgggagcuaccucaacgagacccacuucuccgacgacaucgagcagcaggcggacaacaugaucaccgagcugcugcagaaggaguacauggaccgccagggcaagacgccgcucggccuggucgaccuguucguguucagcaccuccuucuaccucaucagcaucuuccugcaccuggugaagauccccacccaccggcacaucaucgggaagcccugccccaagccgcaccgccugaaccacaugggcgucugcuccugcgggcucuacaagcaccccggcgugcccgugaaguggaagcgguga

SEQ ID NO: 4430 - RNA, 1473 nt, Artificial Sequence
  derived and/or modified protein sequence (opt1) from LASV(Lassa virus/H.sapiens-wt/NGA/2016/ISTH_1604;Clade II)__AVO03541__GPCstabilized
augggccagaucgugaccuucuuccaggaggucccccacgugaucgaggagaucaugaacaucgugcugaucacccucagccugcuggccauccucaagggggucuacaaccuggccacgugcggccugaucgggcucaucaccuuccuguuccugugcggccgcuccugcagcaugaccuacaagggguccuaccagcucgagacccuggagcugaacauggagacgcucaacaugaccaugccgcugagcugcaccaagaacaccucccaccacuacauccgggugggcaacgagacgggccuggagcucacccugaccaacaccagcaucaucaaccacaaguucugcaaccuguccgacgcgcacaagaagaaccucuacgaccacagccugauguccaucgugagcacguuccaccuguccauccccaacuucaaccaguacgaggccaugagcugcgacuucaacgggggcaagaucuccauccaguacaaccucagccacgccuacgccggggacgccgcgaagcacugcggcacccuggccaacgggguccugcagaccuucaugcgcauggccuggggcggcuccuacaucgcccucgacagcgggugcggcaacugggacugcaucaugaccuccuaccaguaccugaucauccagaacacgaccugggaggaccacugccaguucagccggcccucccccaucggguaccugggccuccugagccagcgcacccgggagaucuacaucagccgccggcgccggggcaccuucacguggacccuguccgacagcgaggggaacgaggcgccgggcggguacugccucacccgcuggaugcugaucgaggccgagcugaagugcuucggcaacgccgccguggccaagugcaacgagaagcacgacgaggaguucugcgacaugcuccggcuguucgacuucaacaagcaggcgauccagcgccugaagacccccgcccagauguccauccagcucaucaacaaggccgugaacgcccugaucaacgaccagcugaucaugaagaaccaccuccgggacaucaugugcauccccuacugcaacuacagcaaguacugguaccugaaccacacgaccaccgggcgcaccucccugccccggugcuggcucgucagcaacggcuccuaccugaacgagacgcacuucagcgacgacaucgagcagcaggccgacaacaugaucaccgagaugcugcagaaggaguacaucgaccgccagggcaagaccccgcucgggcugguggaccuguucguguucuccaccagcuucuaccucaucuccaucuuccugcaccuggucaagauccccacgcaccggcacaucgugggcaagagcugccccaagccccaccgccugaaccacauggggaucugcuccugcggccucuacaagcagccgggggugcccguccgguggaagcgcuga

SEQ ID NO: 4431 - RNA, 1473 nt, Artificial Sequence
  derived and/or modified protein sequence (opt1) from LASV(Lassa virus/H.sapiens-wt/NGA/2016/ISTH_1609;Clade II)__AVO03661__GPCstabilized
augggccagaucgugaccuucuuccaggagaucccccacgucaucgaggaggugaugaacaucgugcugaucacccucagccugcuggccguccucaaggggaucuacaacuucgccacgugcggccugaucgggcugaucaccuuccucuuccugugcggccgcuccugcagcaccaucuacaagggguccuaccagcugcagaagcucgagcugaacauggagacccugaacaugacgaugccgcucagcugcaccaagaacuccagccaccacuacauccgggugggcaacgagaccggccuggagcugacccucacgaacaccuccaucaucagccacaaguucugcaaccuguccgacgcgcacaagaagaaccuguacgaccacgcccucaugagcaucaucuccaccuuccaccugagcauccccaacuucaaccaguacgaggccauguccugcgacuucaacgggggcaagaucagcgugcaguacaaccugucccacagcuacgccggggacgccgcgcgccacugcggcacccucgccaacgggguccugcagacguucaugcggauggccuggggcggcuccuacaucgcccuggacagcgggugcggcaacugggacugcaucaugaccuccuaccaguuccucaucauccagaacaccaccugggaggaccacugccaguucagccgccccagccccaugggguaccugggccugcucucccagcggacgcgcgacaucuacaucagccggcgccggcgcggcaccuucaccuggacccuguccgacagcgaggggaaggagacgccgggcggguacugccugacccgguggaugcucaucgaggcggagcugaagugcuucggcaacaccgccguggccaagugcaacgagaagcacgacgaggaguucugcgacaugcugcgccucuucgacuucaacaagcaggccauccagcggcugaagacccccgcccagauguccauccagcugaucaacaaggcggugaacgcccucaucaacgaccagcugaucaugaagaaccaccuccgcgacaucaugugcauccccuacugcaacuacagccaguacugguaccugaaccacacgaucaccgggaagaccucccugcccaagugcuggcuggucagcaacggcuccuaccucaacgagacccacuucagcgacgacaucgagcagcaggccgacaacaugaucacggagaugcugcagaaggaguacaucgaccggcagggcaagaccccgcuggggcucguggaccuguucguguucuccaccagcuucuaccugaucuccaucuuccuccaccugaucaagauccccacccaccgccacaucgucggcaagagcugccccaagccccaccggcugaaccgcauggggaucugcuccugcggccuguacaagcagccgggggugcccgugaaguggaagcgguga

SEQ ID NO: 4432 - RNA, 1473 nt, Artificial Sequence
  derived and/or modified protein sequence (opt1) from LASV(Lassa virus/H.sapiens-wt/NGA/2016/ISTH_1610;Clade II)__AVO03603__GPCstabilized
augggccagaucaucaccuucuuccaggaggugccccacgucaucgaggaggugaugaacaucgugcugaucgcccucagccugcuggccauccucaaggggaucuacaacgucgcgaccugcggccuguucgggcugguguccuuccucuuccugugcggccgcagcugcuccacgaccuacaaggggguguacgagcugcagacccucgagcuggacauggccagccugaacaugaccaugccgcucuccugcacgaagaacaacagccaccacuacaucauggucggcaacgagaccggccuggagcugacccucaccaacacguccaucaucaaccacaaguucugcaaccugagcgacgcccacaagaagaaccuguacgaccacgcccucauguccaucaucagcaccuuccaccuguccauccccaacuucaaccaguacgaggccaugagcugcgacuucaacgggggcaagaucuccgugcaguacaaccugagccacaccuacgcgaucgacgccgccaaccacugcgggaccaucgccaacggcgugcuccagacguucaugcggauggcguggggcggguccuacaucgcccuggacagcggcugcggguccugggacugcaucaugaccagcuaccaguaccugaucauccagaacaccaccugggaggaccacugccaguucucccgccccagccccaucggcuaccucgggcugcugagccagcggacgcgcgacaucuacaucucccggcgccggcgcggcaccuucaccuggacccucagcgacuccgagggcaacgagacgcccgggggcuacugccugacccgguggaugcugaucgaggccgagcucaagugcuucgggaacaccgccgucgccaagugcaacgagaagcacgacgaggaguucugcgacaugcugcgccuguucgacuucaacaagcaggcgauccggcgccucaaggccccggcccagaugaacauccagcugaucaacaaggccgugaacgcccugaucaacgaccagcucaucaugaagaaccaccuccgggacaucaugugcauccccuacugcaacuacagcaaguacugguaccugaaccacaccgugacgggccgcaccucccugccccggugcuggcuggucagcaacggguccuaccugaacgagacccacuucagcgacgacaucgagcagcaggcggacaacaugaucaccgagcuccugcagaaggaguacauggaccgccagggcaagacgccgcugggccucguggaccuguucguguucuccaccagcuucuaccugaucuccaucuuccuccaccugaucaagauccccacccaccggcacaucgucgggaagcccugccccaagccgcaccgccugaaccacaugggcaucugcagcugcgggcuguacaagcaccccggcgugcccgugaaguggaagcgguga

SEQ ID NO: 4433 - RNA, 1473 nt, Artificial Sequence
  derived and/or modified protein sequence (opt1) from LASV(Lassa virus/H.sapiens-wt/NGA/2018/ISTH_0959;Clade II)__AVV65099__GPCstabilized
augggccagaucaucaccuucuuccaggaggugccccacgucaucgaggaggugaugaacaucgugcugaucgcccucagccugcuggccauccucaaggggaucuacaacgucgugaccugcggccuguucgggcugguguccuuccuccugcugugcggccgcagcugcuccacgaccuacaagggggucuacgagcuccagacccuggagcuggacauggcgagccucaacaugaccaugccgcuguccugcacgaagaacaacagccaccacuacaucauggugggcaacgagaccggccuggagcucacccugaccaacacguccaucaucaaccacaaguucugcaaccugagcgacgcccacaagaagaaccucuacgaccacgcccugauguccaucaucagcaccuuccaccuguccauccccaacuucaaccaguacgaggccaugagcugcgacuucaacgggggcaagaucuccgugcaguacaaccucagccacgccuacgcgaucgacgccgccaaccacugcgggaccaucgccaacggcguccugcagaccuucaugcggauggcguggggcggguccuacaucgcccuggacagcggcugcggguccugggacugcaucaugacgagcuaccaguaccucaucauccagaacaccaccugggaggaccacugccaguucucccgccccagccccaucggcuaccuggggcugcucagccagcggacccgcgacaucuacaucucccggcgccggcgcggcacguucaccuggacccugagcgacuccgagggcaacgagacccccgggggcuacugccugacgcgguggaugcucaucgaggccgagcugaagugcuucgggaacaccgccguggccaagugcaacgagaagcacgacgaggaguucugcgacaugcugcgccucuucgacuucaacaagcaggcgauccggcgccugaagaccccggcccagaugagcauccagcugaucaacaaggccgugaacgcccucaucaacgaccagcugaucaugaagaaccaccuccgggacaucaugugcauccccuacugcaacuacuccaaguacugguaccugaaccacaccgucacgggcaagaccagccugccccgcugcuggcugguguccaacgggagcuaccucaacgagacccacuucuccgacgacaucgagcagcaggccgacaacaugaucaccgagcugcugcagaaggaguacaucgaccggcagggcaagacgccgcucggccugguggaccuguucgucuucagcaccuccuucuaccucaucagcaucuuccugcaccuggugaagauccccacccaccgccacgugaucgggaagcccugccccaagccgcaccggcugaaccacaugggcaucugcuccugcgggcucuacaagcaccccggcguccccgugaaguggaagcgcuga

SEQ ID NO: 4434 - RNA, 1473 nt, Artificial Sequence
  derived and/or modified protein sequence (opt1) from LASV(Lassa virus/H.sapiens-wt/NGA/2018/ISTH_1024;Clade II)__AVV65105__GPCstabilized
augggccagaucaucaccuucuuccaggaggugccccacgucaucgaggaggugaugaacaucgugcugaucgcccucagccugcuggccauccucaagggggucuacaacguggcgaccugcggccuguucgggcugguguccuuccuccugcugugcggccgcagcugcuccacgaccuacaagggggucuacgagcuccagacccuggagcuggacauggccaaccucaacaugaccaugccgcugagcugcacgaagaacaacucccaccacuacauccgggugggcaacgagaccggccuggagcucacccugaccaacacgagcaucaucaaccacaaguucugcaaccuguccgacgcccacaagaacaaccucuacgaccacgcccugaugagcaucaucuccaccuuccaccugagcauccccaacuucaaccaguacgaggccauguccugcgacuucaacgggggcaagaucagcgugcaguacaaccucucccacgcguacgccgucgacgccgccaaccacugcgggaccaucgcgaacggcgugcugcagaccuucaugcgcauggccuggggcgggagcuacaucgcccuggacuccggcugcgggagcugggacugcaucaugacguccuaccaguaccucaucauccagaacaccaccugggaggaccacugccaguucagccggcccucccccaucggcuaccuggggcugcucagccagcgcacccgggacaucuacaucagccgccggcgccggggcacguucaccuggacccuguccgacagcgagggcaacgagacccccgggggcuacugccugacgcgcuggaugcucaucgaggccgagcugaagugcuucgggaacaccgccguggcgaagugcaacgagaagcacgacgaggaguucugcgacaugcugcggcuguucgacuucaacaagcaggccauccgccggcugaagaccccggcccagauguccauccagcugaucaacaaggccgucaacgcccucaucaacgaccagcugaucaugaagaaccaccuccgcgacaucaugugcauccccuacugcaacuacagcaaguacugguaccucaaccacaccgugacgggcaagaccucccugccccggugcuggcuggugagcaacgggaccuaccucaacgagacccacuucuccgacgacaucgagcagcaggcggacaacaugaucacggagcugcugcagaaggaguacauggaccgccagggcaagaccccgcucggccuggucgaccuguucguguucagcaccuccuucuaccucaucagcaucuuccugcaccuggugaagauccccacccaccggcacgucaucgggaagcccugccccaagccgcaccgccugaaccacaugggcaucugcuccugcgggcucuacaagcaccccggcgugcccgugaaguggaagcgguga

SEQ ID NO: 4435 - RNA, 1473 nt, Artificial Sequence
  derived and/or modified protein sequence (opt1) from LASV(Lassa virus/H.sapiens-wt/NGA/2018/ISTH_1079;Clade II)__AVV65107__GPCstabilized
augggccagaucaucaccuucuuccaggaggugccccacgucaucgaggaggugaugaacaucgugcugaucgcccucagccugcuggccauccucaaggggaucuacaacgucgcgaccugcggccuguucgggcugguggccuuccuccugcugugcggccgcuccugcagcacgaccuacaaggggguguacgagcuccagacccuggagcuggacauggccucccucaacaugaccaugccgcugagcugcacgaagaacaacucccaccacuacaucauggucggcaacgagaccggccuggagcucacccugaccaacacgagcaucaucaaccacaaguucugcaaccuguccgacgcccacaagaagaaccucuacgaccacgcccugaugagcaucaucuccaccuuccaccugagcauccccaacuucaaccaguacgaggcgauguccugcgacuucaacgggggcaagaucagcgugcaguacaaccucucccacaccuacgccguggacgccgccaaccacugcgggaccaucgcgaacggcguccugcagacguucaugcggauggccuggggcgggagcuacaucgcccuggacuccggcugcgggagcugggacugcaucaugaccuccuaccaguaccucaucauccagaacaccaccugggaggaccacugccaguucagccgccccucccccaucggcuaccuggggcugcucagccagcggacgcgcgacaucuacaucagccggcgccggcgcggcaccuucaccuggacccuguccgacagcgagggcaacgagacgcccgggggcuacugccugacccgguggaugcucaucgaggccgagcugaagugcuucgggaacaccgccguggcgaagugcaacgagaagcacgacgaggaguucugcgacaugcugcgccucuucgacuucaacaagcaggccauccggcgccugaagaccccggcccagauguccauccagcugaucaacaaggccgugaacgcccucaucaacgaccagcugaucaugaagaaccaccuccgggacaucaugugcauccccuacugcaacuacagcaaguacugguaccugaaccacacggucaccggccgcaccucccugccccggugcuggcuggugagcaacggguccuaccucaacgagacccacuucagcgacgacaucgagcagcaggcggacaacaugaucacggagcugcugcagaaggaguacauggaccgccagggcaagaccccgcucggccugguggaccuguucgucuucuccaccagcuucuaccucaucuccaucuuccugcaccugaucaagauccccacccaccggcacgugaucgggaagcccugccccaagccgcaccgccugaaccacaugggcaucugcagcugcgggcucuacaagcaccccggcgugcccgucaaguggaagcgguga

SEQ ID NO: 4436 - RNA, 1473 nt, Artificial Sequence
  derived and/or modified protein sequence (opt1) from LASV(Lassa virus/H.sapiens-wt/NGA/2018/ISTH_1177;Clade II)__AVV65101__GPCstabilized
augggccagaucaucaccuucuuccaggaggugccccacgucaucgaggaggugaugaacaucgugcugaucgcccucagccugcuggccauccucaaggggaucuacaacgucgcgaccugcggccuguucgggcugguguccuuccuccugcugugcggccgcagcugcuccacgaccuacaaggggguguacgagcuccagacccuggagcuggacauggccagccucaacaugaccaugccgcuguccugcacgaagaacaacagccaccacuacauccgggucggcaacgagaccggccuggagcucacccugaccaacacguccaucaucgaccacaaguucugcaaccugagcgacgcccacaagaagaaccucuacgaccacgcccugauguccaucaucagcaccuuccaccuguccauccccaacuucaaccaguacgaggccaugagcugcgacuucaacgggggcaagaucuccgugcaguacaaccucagccacaccuacgcgguggacgccgccaaccacugcgggaccaucgccaacggcguccugcagacguucaugcgcauggcguggggcggguccuacaucgcccuggacagcggcugcggguccugggacugcaucaugaccagcuaccaguaccucaucauccagaacaccaccugggaggaccacugccaguucucccggcccagccccaucggcuaccuggggcugcucagccagcgcacgcgggacaucuacaucucccgccggcgccggggcaccuucaccuggacccugagcgacuccgagggcaacgagacgcccgggggcuacugccugacccgcuggaugcucaucgaggccgagcugaagugcuucgggaacaccgccguggccaagugcaacgagaagcacgacgaggaguucugcgacaugcugcggcuguucgacuucaacaagcaggcgauccgccggcugaagaccccggcccagaugagcauccagcugaucaacaaggccgugaacgcccucaucaacgaccagcugaucaugaagaaccaccuccgcgacaucaugugcauccccuacugcaacuacuccaaguacugguaccucaaccacacgaucaccggccggaccagccugccccgcugcuggcuggucuccaacgggagcuaccucaacgagacccacuucuccgacgacaucgagcagcaggccgacaacaugaucacggagcugcugcagaaggaguacauggaccggcagggcaagaccccgcucggccugguggaccuguucguguucagcaccuccuucuaccucaucagcaucuuccugcaccuggucaagauccccacccaccgccacgugaucgggaagcccugccccaagccgcaccggcugaaccacaugggcaucugcuccugcgggcucuacaagcaccccggcgugcccgucaaguggaagcgcuga

SEQ ID NO: 4437 - RNA, 1473 nt, Artificial Sequence
  derived and/or modified protein sequence (opt1) from LASV(Lassa virus/H.sapiens-wt/NGA/2018/ISTH_1375;Clade II)__AVV65115__GPCstabilized
augggccagaucaucaccuucuuccaggaggugccccacgucaucgaggaggugaugaacaucgugcugaucgcccucagccugcuggccauccucaaggggaucuacaacaucgcgaccugcggccuguucgggcuggucuccuuccuccugcugugcggccgcagcugcuccacgaccuacaaggggguguacgagcuccagacccuggagcuggacauggccagccucaacaugaccaugccgcuguccugcacgaagaacaacagccaccacuacaucauggugggcaacgagaccggccuggagcucacccugaccaacacguccaucaucaaccaccgguucugcaaccugagcgacgcccacaagaagaaccucuacgaccacgcccugauguccaucaucagcaccuuccaccuguccauccccaacuucaaccaguacgaggccaugagcugcgacuucaacgggggcaagaucuccguccaguacaaccucagccacgcguacgccguggacgccgccaaccacugcgggaccaucgcgaacggcgugcugcagaccuucaugcgcauggccuggggcggguccuacaucgcccuggacagcggcugcggguccugggacugcaucaugacgagcuaccaguaccucaucauccagaacaccaccugggaggaccacugccaguucucccggcccagccccaucggcuaccuggggcugcucagccagcgcacccgggacaucuacaucucccgccggcgccggggcacguucaccuggacccugagcgacuccgagggcaacgagacccccgggggcuacugccugacgcgcuggaugcucaucgaggccgagcugaagugcuucgggaacaccgccgucgcgaagugcaacgagaagcacgacgaggaguucugcgacaugcugcggcuguucgacuucaacaagcaggccauccgccggcugaagaccccggcccagaugagcauccagcugaucaacaaggccgugaacgcccucaucaacgaccagcugaucaugaagaaccaccuccgcgacaucaugugcauccccuacugcaacuacuccaaguacugguaccucaaccacaccgugacgggcaagaccagccugccccggugcuggcuggucuccaacgggagcuaccucaacgagacccacuucuccgacgacaucgagcagcaggcggacaacaugaucaccgagcugcugcagaaggaguacaucgaccgccagggcaagacgccgcucggccugguggaccuguucguguucagcaccuccuucuaccucaucagcaucuuccugcaccuggucaagauccccacccaccggcacgugaucgggaagcccugccccaagccgcaccgccugaaccacaugggcaucugcuccugcgggcucuacaagcaccccggcgugcccgucaaguggaagcgguga

SEQ ID NO: 4438 - RNA, 1473 nt, Artificial Sequence
  derived and/or modified protein sequence (opt1) from LASV(Lassa virus/H.sapiens-wt/NGA/2018/ISTH_1381;Clade II)__AVV65111__GPCstabilized
augggccagaucgugaccuucuuccaggaggucccccacgugaucgaggaggugaugaacaucguccugaucgcccucagccugcuggccauccucaaggggaucuacaacguggcgaccugcggccuguucgggcugguguccuuccuccugcugugcggccgcagcugcuccacgaccuacaagggggucuacgagcuccagacccuggagcuggacauggccagccucaacaugaccaugccgcuguccugcacgaagaacaacagccaccacuacaucauggugggcaacgagaccggccuggagcucacccugaccaacacguccaucaucaaccacaaguucugcaaccugagcgacgcccacaagaagaaccucuacgaccacgcccugauguccaucaucagcaccuuccaccuguccauccccaacuucaaccaguacgaggccaugagcugcgacuucaacgggggcaagaucuccgugcaguacaaccucagccacaccuacgcggucgacgccgccaaccacugcgggaccaucgccaacggcgugcugcagacguucaugcggauggcguggggcggguccuacaucgcccuggacagcggcugcggguccugggacugcaucaugaccagcuaccaguaccucaucauccagaacaccaccugggaggaccacugccaguucucccgccccagccccaucggcuaccuggggcugcucagccagcggacgcgcgacaucuacaucucccggcgccggcgcggcaccuucaccuggacccugagcgacuccgagggcaacgagacgcccgggggcuacugccugacccgguggaugcucaucgaggccgagcugaagugcuucgggaacaccgccguggccaagugcaacgagaagcacgacgaggaguucugcgacaugcugcgccucuucgacuucaacaagcaggcgauccggcgccugaagaccccggcccagaugagcauccagcugaucaacaaggccgucaacgcccucaucaacgaccagcugaucaugaagaaccaccuccgggacaucaugugcauccccuacugcaacuacuccaaguacugguaccugaaccacacggugaccggcaagaccagccugccccgcugcuggcugguguccaacgggagcuaccucaacgagacccacuucuccgacgacaucgagcagcaggccgacaacaugaucacggagcugcugcagaaggaguacauggaccggcagggcaagaccccgcucggccuggucgaccuguucguguucagcaccuccuucuaccucaucagcaucuuccugcaccuggugaagauccccacccaccgccacgucguggggaagcccugccccaagccgcaccggcugaaccacaugggcaucugcuccugcgggcucuacaagcaccccggcgugcccguccgcuggaagcgguga

SEQ ID NO: 4439 - RNA, 1473 nt, Artificial Sequence
  derived and/or modified protein sequence (opt1) from LASV(Lassa virus/H.sapiens-wt/NGA/2018/ISTH_1643;Clade II)__AVV65119__GPCstabilized
augggccagaucaucaccuucuuccaggaggugccccacgucaucgaggaggugaugaacaucgugcugaucgcccucagccugcuggccauccucaaggggaucuacaacgucgcgaccugcggccuguucgggcugguguccuuccuccugcugugcggccgcagcugcuccacgaccuacaaggggguguacgagcuccagacccuggagcuggacauggccagccucaacaugaccaugccgcuguccugcacgaagaacaacagccaccacuacaucauggucggcaacgagaccggccuggagcucacccugaccaacacguccaucaucaaccacaaguucugcaaccugagcgacgcccacaagaagaaccucuacgaccacgcccugauguccaucaucagcaccuuccaccuguccauccccaacuucaaccaguacgaggccaugagcugcgacuucaacgggggcaagaucuccgugcaguacaaccucagccacaccuacgcgguggacgccgccaaccacugcgggaccaucgccaacggcguccugcagacguucaugcggauggcguggggcggguccuacaucgcccuggacagcggcugcggguccugggacugcaucaugaccagcuaccaguaccucaucauccagaacaccuccugggaggaccacugccaguucagccgccccagccccaucggcuaccuggggcugcucucccagcggacccgcgacaucuacaucagccggcgccggcgcggcacguucaccuggacccuguccgacagcgagggcaacgagacccccgggggcuacugccugacgcgguggaugcucaucgaggccgagcugaagugcuucgggaacaccgccguggccaagugcaacgagaagcacgacgaggaguucugcgacaugcugcgccucuucgacuucaacaagcaggcgauccggcgccugaagaccccggcccagauguccauccagcugaucaacaaggccgugaacgcccucaucaacgaccagcugaucaugaagaaccaccuccgggacaucaugugcauccccuacugcaacuacagcaaguacugguaccugaaccacaccgucacgggcaagaccucccugccccgcugcuggcuggugagcaacgggaccuaccucaacgagacccacuucuccgacgacaucgagcagcaggccgacaacaugaucacggagcugcugcagaaggaguacaucgaccggcagggcaagaccccgcucggccugguggaccuguucgucuucagcaccuccuucuaccucaucagcaucuuccugcaccuggugaagauccccacccaccgccacgugaucgggaagcccugccccaagccgcaccggcugaaccacaugggcaucugcuccugcgggcucuacaagcaccccggcguccccgugaaguggaagcgcuga

SEQ ID NO: 4440 - RNA, 1473 nt, Artificial Sequence
  derived and/or modified protein sequence (opt1) from LASV(LASV003-NIG-2008;Clade II)__AIT17580__GPCstabilized
augggccagaucaucaccuucuuccaggaggugccccacgucaucgaggaggugaugaacaucgugcugaucgcccucagccugcuggccauccucaaggggaucuacaacgucgcgaccugcggccuguucgggcugguguccuuccuccugcugugcggccgcagcugcuccacgaccuacaaggggguguacgagcuccagacccuggagcuggacauggccagccucaacaugaccaugccgcuguccugcacgaagaacaacagccaccacuacaucauggucggcaacgagaccggccuggagcucacccugaccaacacguccaucaucaaccacaaguucugcaaccugagcgacgcccacaagaagaaccucuacgaccacgcccugauguccaucaucagcaccuuccaccuguccauccccaacuucaaccaguacgaggccaugagcugcgacuucaacgggggcaagaucuccgugcaguacaaccucagccacaccuacgcgguggacgccgccaaccacugcgggaccaucgccaacggcguccugcagacguucaugcggauggcguggggcggguccuacaucgcccuggacagcggcugcggguccugggacugcaucaugaccagcuaccaguaccucaucauccagaacaccaccugggaggaccacugccaguucucccgccccagccccaucggcuaccuggggcugcucagccagcggacgcgcgacaucuacaucucccggcgccggcgcggcaccuucaccuggacccugagcgacuccgagagcaacgagacgccgggcggguacugccugacccgguggaugcucaucgaggccgagcugaagugcuucggcaacaccgccguggccaagugcaacgagaagcacgacgaggaguucugcgacaugcugcgccucuucgacuucaacaagcaggcgauccggcgccugaaggcccccgcccagauguccauccagcugaucaacaaggccgugaacgcccucaucaacgaccagcugaucaugaagaaccaccuccgggacaucaugugcauccccuacugcaacuacagcaaguacugguaccugaaccacaccgucacggggcgcaccucccugccccggugcuggcuggugagcaacggcuccuaccucaacgagacccacuucagcgacgacaucgagcagcaggcggacaacaugaucaccgagcugcugcagaaggaguacauggaccgccaggggaagacgccgcucggccugguggaccuguucgucuucuccaccagcuucuaccucaucuccaucuuccugcaccuggugaagauccccacccaccggcacgugaucggcaagcccugccccaagccgcaccgccugaaccacauggggaucugcagcugcggccucuacaagcaccccgggguccccgugaaguggaagcgguga

SEQ ID NO: 4441 - RNA, 1473 nt, Artificial Sequence
  derived and/or modified protein sequence (opt1) from LASV(LASV006-NIG-2008;Clade II)__AIT17584__GPCstabilized
augggccagaucaucaccuucuuccaggaggugccccaggucaucgaggaggugaugaacaucgugcugaucgcccucagccugcuggccauccucaaggggaucuacaacgucgcgaccugcggccuguucgggcugguguccuuccuccugcugugcggccgcagcugcuccacgaccuacaaggggguguacgagcuccagacccuggagcuggacauggccagccucaacaugaccaugccgcuguccugcacgaagaacaacagccaccacuacaucauggucggcaacgagaccggccuggagcucacccugaccaaccaguccaucaucaaccacaaguucugcaaccugagcgacgcccacaagaagaaccucuacgaccacgcccugauguccaucaucagcacguuccaccuguccauccccaacuucaaccaguacgaggccaugagcugcgacuucaacgggggcaagaucuccgugcaguacaaccucagccacuccuucgcgguggacgccgccaaccacugcgggaccaucgccaacggcguccugcagaccuucaugcggauggcguggggcgggagcuacaucgcccuggacuccggcugcgggagcugggacugcaucaugaccuccuaccaguaccucaucauccagaacacgaccugggaggaccacugccaguucagccgccccagccccaucggcuaccuggggcugcucucccagcggacccgcgacaucuacaucagccggcgccggcgcggcaccuucacguggacccuguccgacagcgagggcaacgagacccccgggggcuacugccugacccgguggaugcucaucgaggccgagcugaagugcuucgggaacacggccguggccaagugcaacgagaagcacgacgaggaguucugcgacaugcugcgccucuucgacuucaacaagcaggcgauccggcgccugaagaccccggcccagauguccauccagcugaucaacaaggccgugaacgcccucaucaacgaccagcugaucaugaagaaccaccuccgggacaucaugugcauccccuacugcaacuacagcaaguacugguaccugaaccacaccaagaccggcaagacgucccugccccgcugcuggcuggucagcaacggguccuaccucaacgagacccacuucagcgacgacaucgagcagcaggccgacaacaugaucaccgagcugcugcagaaggaguacauggaccggcagggcaagaccccgcucggccugguggaccuguucguguucuccacgagcuucuaccucaucuccaucuuccugcaccuggucaagauccccacccaccgccacgugaucgggaagcccugccccaagccgcaccggcugaaccacaugggcaucugcagcugcgggcucuacaagcaccccggcgugcccgucaaguggaagcgcuga

SEQ ID NO: 4442 - RNA, 1473 nt, Artificial Sequence
  derived and/or modified protein sequence (opt1) from LASV(LASV035-NIG-2009;Clade II)__AIT17588__GPCstabilized
augggccagaucaucaccuucuuccaggaggugccccacgucaucgaggaggugaugaacaucgugcugaucgcccucagccugcuggccauccucaaggggaucuacaacgucgcgaccugcggccuguucgggcugguguccuuccuccugcugugcggccgcagcugcuccacgaccuacaaggggguguacgagcuccagacccuggagcuggacauggccagccucaacaugaccaugccgcuguccugcacgaagaacaacagccaccacuacaucauggucggcaacgagaccggccuggagcucacccugaccaacacguccaucaucaaccacaaguucugcaaccugagcgacgcccacaagaagaaccucuacgaccacgcccugauguccaucaucagcaccuuccaccuguccauccccaacuucaaccaguacgaggccaugagcugcgacuucaacgggggcaagaucuccgugcaguacaaccucagccacgcguacgccguggacgccgccaaccacugcgggaccaucgcgaacggcguccugcagaccuucaugcggauggccuggggcggguccuacaucgcccuggacagcggcugcggguccugggacugcaucaugacgagcuaccaguaccucaucauccagaacaccaccugggaggaccacugccaguucucccgccccagccccaucggcuaccuggggcugcucagccagcggacccgcgacaucuacaucucccggcgccggcgcggcacguucaccuggacccugagcgacuccgagggcaacgagacccccgggggcuacugccugacgcgguggaugcucaucgaggccgagcugaagugcuucgggaacaccgccguggcgaagugcaacgagaagcacgacgaggaguucugcgacaugcugcgccucuucgacuucaacaagcaggccauccggcgccugaaggccccggcccagaugagcauccagcugaucaacaaggccgugaacgcgcucaucaacgaccagcugaucaugaagaaccaccuccgggacaucaugugcauccccuacugcaacuacuccaaguacugguaccugaaccacaccgucaccggcaagacgagccugccccgcugcuggcugguguccaacgggagcuaccucaacgagacccacuucuccgacgacaucgagcagcaggccgacaacaugaucaccgagcugcugcagaaggaguacaucgaccggcagggcaagaccccgcucggccugguggaccuguucgucuucagcacguccuucuaccucaucagcaucuuccugcaccuggugaagauccccacccaccgccacgugaucgggaagcccugccccaagccgcaccggcugaaccacaugggcaucugcuccugcgggcucuacaagcaccccggcguccccgugaaguggaagcgcuga

SEQ ID NO: 4443 - RNA, 1473 nt, Artificial Sequence
  derived and/or modified protein sequence (opt1) from LASV(LASV042-NIG-2009;Clade II)__AIT17592__GPCstabilized
augggccagaucaucaccuucuuccaggaggugccccacgucaucgaggaggugaugaacaucgugcugaucgcccucagccugcuggccauccucaaggggaucuacaacgucgcgaccugcggccuguucgggcugguguccuuccuccugcugugcggccgcagcugcuccacgaccuacaaggggguguacgagcuccagacccuggagcuggacauggccagccucaacaugaccaugccgcuguccugcacgaagaacaacagccaccacuacaucauggucggcaacgagaccggccuggagcucacccugaccaacacguccaucaucaaccacaaguucugcaaccugagcgacgcccacaagaagaaccucuacgaccacacccugauguccaucaucagcaccuuccaccuguccauccccaacuucaaccaguacgaggccaugagcugcgacuucaacgggggccggaucuccgugcaguacaaccucagccacgccuacgcgguggacgccgccaaccacugcgggaccaucgccaacggcguccugcagacguucaugcgcauggcguggggcggguccuacaucgcccuggacagcggcugcggguccugggacugcaucaugaccagcuaccaguaccucaucauccagaacaccaccugggaggaccacugccaguucucccggcccagccccaucggcuaccuggggcugcucagccagcgcacgcgggacaucuacaucucccgccggcgccggggcaccuucaccuggacccugagcgacuccgagggcaacgagacgcccgggggcuacugccugacccgcuggaugcucaucgaggccgagcugaagugcuucgggaacaccgccguggccaagugcaacgagaagcacgacgaggaguucugcgacaugcugcggcuguucgacuucaacaagcaggcgauccgccggcugaagaccccggcccagaugagcauccagcugaucaacaaggccgugaacgcccucaucaacgaccagcugaucaugaagaaccaccuccgcgacaucaugugcauccccuacugcaacuacuccaaguacugguaccucaaccacacgaucaccggcaagaccagccugccccggugcuggcuggucuccaacgggagcuaccucaacgagacccacuucuccgacgacaucgagcagcaggccgacaacaugaucacggagcugcugcagaaggaguacaucgaccgccagggcaagaccccgcucggccugguggaccuguucguguucagcaccuccuucuaccucaucagcaucuuccugcaccuggucaagauccccacccaccggcacgugguggggaagcccugccccaagccgcaccgccugaaccacaugggcaucugcuccugcgggcucuacaagcaccccggcguccccgugaaguggaagcgguga

SEQ ID NO: 4444 - RNA, 1473 nt, Artificial Sequence
  derived and/or modified protein sequence (opt1) from LASV(LASV045-NIG-2009;Clade II)__AIT17596__GPCstabilized
augggccagaucaucaccuucuuccaggaggugccccacgucaucgaggaggugaugaacaucgugcugaucgcccucagccugcuggccauccucaaggggaucuacaacgucgcgaccugcggccuguucgggcugguguccuuccuccugcugugcggccgcagcugcuccacgaccuacaaggggguguacgagcuccagacccuggagcuggacauggccagccucaacaugaccaugccgcuguccugcacgaagaacaacagccaccacuacaucauggucggcaacgagaccggccuggagcucacccugaccaacacguccaucaucaaccacaaguucugcaaccugagcgacgcccacaagaagaaccucuacgaccacgcccugauguccaucaucagcaccuuccaccuguccauccccaacuucaaccaguacgaggccaugagcugcgacuucaacgggggcaagaucuccgugcaguacaaccucagccacaccuacgcgguggacgccgccaaccacugcgggaccaucgccaacggcguccugcagacguucaugcggauggcguggggcggguccuacaucgcccuggacagcggcugcggguccugggacugcaucaugaccagcuaccaguaccucaucauccagaacaccuccugggaggaccacugccaguucagccgccccagccccaucggcuaccuggggcugcucucccagcggacccgcgacaucuacaucagccggcgccggcgcggcacguucaccuggacccuguccgacagcgagggcaacgagacccccgggggcuacugccugacgcgguggaugcucaucgaggccgagcugaagugcuucgggaacaccgccguggccaagugcaacgagaagcacgacgaggaguucugcgacaugcugcgccucuucgacuucaacaagcaggcgauccggcgccugaagaccccggcccagauguccauccagcugaucaacaaggccgugaacgcccucaucaacgaccagcugaucaugaagaaccaccuccgggacaucaugugcauccccuacugcaacuacagcaaguacugguaccugaaccacaccgucacgggcaagaccucccugccccgcugcuggcuggugagcaacggguccuaccucaacgagacccacuucagcgacgacaucgagcagcaggccgacaacaugaucaccgagcugcugcagaaggaguacaucgaccggcagggcaagacgccgcucggccugguggaccuguucgucuucuccaccagcuucuaccucaucuccaucuuccugcaccuggugaagauccccacccaccgccacgugaucgggaagcccugccccaagccgcaccggcugaaccacaugggcaucugcagcugcgggcucuacaagcaccccggcguccccgugaaguggaagcgcuga

SEQ ID NO: 4445 - RNA, 1473 nt, Artificial Sequence
  derived and/or modified protein sequence (opt1) from LASV(LASV046-NIG-2009;Clade II)__AIT17600__GPCstabilized
augggccagaucaucaccuucuuccaggaggugccccacgucaucgaggaggugaugaacaucgugcugaucgcccucagccugcuggccauccucaaggggaucuacaacgucgcgaccugcggccuguucgggcugguguccuuccuccugcugugcggccgcagcugcuccacgaccuacaaggggguguacgagcuccagacccuggagcuggacauggccagccucaacaugaccaugccgcuguccugcacgaagaacaacagccaccacuacaucauggucggcaacgagaccggccuggagcucacccugaccaacacguccaucaucaaccacaaguucugcaaccugagcgacgcccacaagaagaaccucuacgaccacgcccugauguccaucaucagcaccuuccaccuguccauccccaacuucaaccaguacgaggccaugagcugcgacuucaacgggggcaagaucuccgugcaguacaaccucagccacgcguacgccggggacgccgccaaccacugcggcaccaucgcgaacggggugcugcagaccuucaugcggauggccuggggcggcuccuacaucgcccuggacagcgggugcggcuccugggacugcaucaugacgagcuaccaguaccucaucauccagaacaccaccugggaggaccacugccaguucucccgccccagccccaucggguaccugggccugcucagccagcggacccgcgacaucuacaucucccggcgccggcgcggcacguucaccuggacccugagcgacuccgaggggaacgagaccccgggcggguacugccugacgcgguggaugcucaucgaggccgagcugaagugcuucggcaacaccgccgucgcgaagugcaacgagaagcacgacgaggaguucugcgacaugcugcgccucuucgacuucaacaagcaggccauccggcgccugaagacccccgcccagaugagcauccagcugaucaacaaggccgugaacgcccucaucaacgaccagcugaucaugaagaaccaccuccgggacaucaugugcauccccuacugcaacuacuccaaguacugguaccugaaccacaccgugacggggaagaccagccugccccgcugcuggcuggucuccaacggcagcuaccucaacgagacccacuucuccgacgacaucgagcagcaggcggacaacaugaucaccgagcugcugcagaaggaguacaucgaccggcagggcaagacgccgcucgggcugguggaccuguucguguucagcaccuccuucuaccucaucagcaucuuccugcaccuggucaagauccccacccaccgccacgugaucggcaagcccugccccaagccgcaccggcugaaccacauggggaucugcuccugcggccucuacaagcaccccggggugcccgucaaguggaagcgcuga

SEQ ID NO: 4446 - RNA, 1473 nt, Artificial Sequence
  derived and/or modified protein sequence (opt1) from LASV(LASV049-NIG-2009;Clade II)__AIT17604__GPCstabilized
augggccagaucaucaccuucuuccaggaggugccccacgucaucgaggaggugaugaacaucgugcugaucgcccucagccugcuggccauccucaaggggaucuacaacgucgcgaccugcggccuguucgggcugguguccuuccuccugcugugcggccgcagcugcuccacgaccuacaaggggguguacgagcuccagacccuggagcuggacaugaccagccucaacaugacgaugccgcuguccugcaccaagaacaacagccaccacuacaucauggucggcaacgagaccggccuggagcucacccugacgaacaccuccaucaucaaccacaaguucugcaaccugagcgacgcccacaagaaggaccucuacgaccacgcccugauguccaucaucagcaccuuccaccuguccauccccaacuucaaccaguacgaggccaugagcugcgacuucaacgggggcaagaucuccgugcaguacaaccucagccacaccuacgccguggacgcggccaagcacugcgggacgaucgccaacggcguccugcagaccuucaugcggauggccuggggcggguccuacaucgcgcuggacagcggcugcggguccugggacugcaucaugaccagcuaccaguaccucaucauccagaacaccacgugggaggaccacugccaguucucccgccccagccccgugggcuaccuggggcugcucagccagcggacccgcgacaucuacaucucccggcgccggcgcggcaccuucaccuggacgcugagcgacuccgagggcaacgagacccccgggggcuacugccugacccgguggaugcucaucgaggccgagcugaagugcuucgggaacaccgccguggccaagugcaacgagaagcacgacgaggaguucugcgacaugcugcgccucuucgacuucaacaagcaggccauccggcgccugaagacgccggcgcagaugagcauccagcugaucaacaaggccgucaacgcccucaucaacgaccagcugaucaugaagaaccaccuccgggacaucaugugcauccccuacugcaacuacuccaaguacugguaccugaaccacaccgugaccggcaagaccagccugccccgcugcuggcugguguccaacgggagcuaccucaacgagacgcacuucuccgacgacaucgagcagcaggccgacaacaugaucaccgagcugcugcagaaggaguaccucgaccggcagggcaagaccccgcugggccuggucgaccucuucguguucagcaccuccuucuaccugaucagcaucuuccugcaccuggugaagauccccacgcaccgccacgucaucgggaagcccugccccaagccgcaccggcucaaccacaugggcaucugcuccugcgggcuguacaagcaccccggcgugcccgugaaguggaagcgcuga

SEQ ID NO: 4447 - RNA, 1473 nt, Artificial Sequence
  derived and/or modified protein sequence (opt1) from LASV(LASV052-NIG-2008;Clade II)__AIT17608__GPCstabilized
augggccagaucaucaccuucuuccaggaggugccccacgucaucgaggaggugaugaacaucgugcugaucgcccucagccugcuggccauccucaaggggaucuacaacgucgcgaccugcggccuguucgggcugguguccuuccuccugcugugcggccgcagcugcuccacgaccuacaaggggguguacgagcuccagacccuggagcuggacauggccagccucaacaugaccaugccgcuguccugcacgaagaacaacagccaccacuacaucauggucggcaacgagaccggccuggagcucacccugaccaacacguccaucaucaaccacaaguucugcaaccugagcgacgcccacaagcggaaccucuacaaccacgcccugauguccaucaucagcaccuuccaccuguccauccccaacuucaaccaguacgaggccaugagcugcgacuucaacgggggcaagaucuccgugcaguacaaccucagccacaccuacgcgguggacgccgccaaccacugcgggaccaucgccaacggcguccugcagacguucaugcgcauggcguggggcggguccuacaucgcccuggacagcggcugcggguccugggacugcaucaugaccagcuaccaguaccucaucauccagaacaccaccugggaggaccacugccaguucucccggcccagccccaucggcuaccuggggcugcucagccagcgcacgcgggacaucuacaucucccgccggcgccggggcaccuucaccuggacccugagcgacuccgagggcaacgagacgcccgggggcuacugccugacccgcuggaugcucaucgaggccgagcugaagugcuucgggaacaccgccguggccaagugcaacgagaagcacgacgaggaguucugcgacaugcugcggcuguucgacuucaacaagcaggcgauccgccggcugaagaccccggcccagaugagcauccagcugaucaacaaggccgugaacgcccucaucaacgaccagcugaucaugaagaaccaccuccgcgacaucaugugcauccccuacugcaacuacuccaaguacugguaccucaaccacacggucaccggcaagaccagccugccccggugcuggcugguguccaacgggagcuaccucaacgagacccacuucuccgacgacaucgagcagcaggccgacaacaugaucacggagcugcugcagaaggaguacaucgaccgccagggcaagaccccgcucggccugguggaccuguucgucuucagcaccuccuucuaccucaucagcaucuuccugcaccuggugaagauccccacccaccggcacaucaucgggaagcccugccccaagccgcaccgccugaaccacaugggcaucugcuccugcgggcucuacaagcaccccggcgugcccgucaaguggcggcgcuga

SEQ ID NO: 4448 - RNA, 1473 nt, Artificial Sequence
  derived and/or modified protein sequence (opt1) from LASV(LASV056-NIG-2008;Clade II)__AIT17612__GPCstabilized
augggccagaucaucaccuucuuccaggaggugccccacgucaucgaggaggugaugaacaucgugcugaucgcccucagccugcuggccauccucaaggggaucuacaacgucgcgaccugcggccuguucgggcugguguccuuccuccugcugugcggccgcagcugcuccacgaccuacaaggggguguacgagcuccagacccuggagcuggacauggccagccucaacaugaccaugccgcuguccugcacgaagaacaacagccaccacuacauccgggucggcaacgagaccggccuggagcucacccugaccaacacguccaucaucaaccacaaguucugcaaccugagcgacgcccacaagaagaaccucuacgaccacucccugaugagcaucaucuccaccuuccaccugagcauccccaacuucaaccaguacgaggccauguccugcgacuucaacgggggcaagaucagcgugcaguacaaccucucccacaccuacgccguggacgcggccaaccacugcgggaccaucgccaacggcguccugcagacguucaugcgcauggccuggggcgggagcuacaucgcgcuggacuccggcugcgggaacugggacugcaucaugaccagcuaccaguaccucaucauccagaacaccaccugggaggaccacugccaguucucccggcccagccccaucggcuaccuggggcugcucagccagcgcacgcgggacaucuacaucucccgccggcgccggggcaccuucaccuggacccugagcgacuccgagggcaacgagacgcccgggggcuacugccugacccgcuggaugcucaucgaggccgagcugaagugcuucgggaacaccgccguggccaagugcaacgagaagcacgacgaggaguucugcgacaugcugcggcuguucgacuucaacaagcaggccauccgccggcugaagaccccggcgcagaugagcauccagcugaucaacaaggccgugaacgcccucaucaacgaccagcugaucaugaagaaccaccuccgcgacaucaugugcauccccuacugcaacuacuccaaguacugguaccucaaccacacggucaccggcaagaccagccugccccggugcuggcugguguccaacgggagcuaccucaacgagacccacuucuccgacgacaucgagcagcaggccgacaacaugaucacggagcugcugcagaaggaguacaucgaccgccagggcaagaccccgcucggccugguggaccuguucgucuucagcaccuccuucuaccucaucagcaucuuccugcaccuggugaagauccccacccaccggcacguggucgggaagcccugccccaagccgcaccgccugaaccacaugggcaucugcuccugcgggcucuacaagcaccccggcgugcccgugaaguggaagcgguga

SEQ ID NO: 4449 - RNA, 1473 nt, Artificial Sequence
  derived and/or modified protein sequence (opt1) from LASV(LASV058-NIG-2008;Clade II)__AIT17616__GPCstabilized
augggccagaucaucaccuucuuccaggaggugccccacgucaucgaggaggugaugaacaucgugcugaucgcccucagccugcuggccauccucaaggggaucuacaacgucgcgaccugcggccuguucgggcugguguccuuccuccugcugugcggccgcagcugcuccacgaccuacaaggggguguacgagcuccagacccuggagcuggacauggccagccucaacaugaccaugccgcuguccugcacgaagaacaacagccaccacuacaucauggucggcaacgagaccggccuggagcucacccugaccaacacguccaucaucaaccacaaguucugcaaccugagcgacgcccacaagaagaaccucuacgaccacgcccugauguccaucaucagcaccuuccaccuguccauccccaacuucaaccaguacgaggccaugagcugcgacuucaacgggggcaagaucuccgugcaguacaaccucagccacgcguacgccguggacgccgccaaccacugcgggaccaucgcgaacggcguccugcagaccuucaugcggauggccuggggcggguccuacaucgcccuggacagcggcugcggguccugggacugcaucaugacgagcuaccaguaccucaucauccagaacaccaccugggaggaccacugccaguucucccgccccagccccaucggcuaccuggggcugcucagccagcggacccgcgacaucuacaucucccggcgccggcgcggcacguucaccuggacccugagcgacuccgagggcaacgagacccccgggggcuacugccugacgcgguggaugcucaucgaggccgagcugaagugcuucgggaacaccgccguggcgaagugcaacgagaagcacgacgaggaguucugcgacaugcugcgccucuucgacuucaacaagcaggccauccggcgccugaagaccccggcccagaugagcauccagcugaucaacaaggccgugaacgcccucaucaacgaccagcugaucaugaagaaccaccuccgggacaucaugugcauccccuacugcaacuacuccaaguacugguaccugaaccacaccgucacgggcaagaccagccugccccgcugcuggcugguguccaacgggagcuaccucaacgagacccacuucuccgacgacaucgagcagcaggcggacaacaugaucaccgagcugcugcagaaggaguacaucgaccggcagggcaagacgccgcucggccugguggaccuguucgucuucagcaccuccuucuaccucaucagcaucuuccugcaccuggugaagauccccacccaccgccacgugaucgggaagcccugccccaagccgcaccggcugaaccacaugggcaucugcuccugcgggcucuacaagcaccccggcguccccgugaaguggaagcgcuga

SEQ ID NO: 4450 - RNA, 1473 nt, Artificial Sequence
  derived and/or modified protein sequence (opt1) from LASV(LASV063-NIG-2009;Clade II)__AIT17620__GPCstabilized
augggccagaucaucaccuucuuccaggaggugccccacgucaucgaggaggugaugaacaucgugcugaucgcccucagccugcuggccauccucaaggggaucuacaacgucgcgaccugcggccuguucgggcugguguccuuccuccugcugugcggccgcagcugcuccacgaccuacaaggggguguacgagcuccagacccuggagcuggacauggccagccucaacaugaccaugccgcuguccugcacgaagaacaacagccaccacuacaucauggucggcaacgagaccggccuggagcucacccugaccaacacguccaucaucagccacaaguucugcaaccuguccgacgcccacaagaagaaccucuacgaccacgcccugaugagcaucaucuccaccuuccaccugagcauccccaacuucaaccaguacgaggccauguccugcgacuucaacgggggcaagaucagcgugcaguacaaccucucccacgcguacgccaucgacgccgccaaccacugcgggaccguggcgaacggcguccugcagaccuucaugcggauggccuggggcgggagcuacaucgcccuggacuccggcugcgggagcugggacugcaucaugacguccuaccaguaccucaucauccagaacaccaccugggaggaccacugccaguucagccgccccagccccaucggcuaccuggggcugcucucccagcggacccgcgacaucuacaucagccggcgccggcgcggcacguucaccuggacccuguccgacagcgagggcaacgagacccccgggggcuacugccugacgcgguggaugcucaucgaggccgagcugaagugcuucgggaacaccgccguggcgaagugcaacgagaagcacgacgaggaguucugcgacaugcugcgccucuucgacuucaacaagcaggccauccggcgccugaaggccccggcccagauguccauccagcugaucaacaaggccgugaacgcgcucaucaacgaccagcugaucaugaagaaccaccuccgggacaucaugugcauccccuacugcaacuacagcaaguacugguaccugaaccacaccgucaccggcaagacgucccugccccgcugcuggcuggugagcaacggguccuaccucaacgagacccacuucagcgacgacaucgagcagcaggccgacaacaugaucaccgagcugcugcagaaggaguacauggaccggcagggcaagaccccgcucggccugguggaccuguucgucuucuccacgagcuucuaccucaucuccaucuuccugcaccuggugaagauccccacccaccgccacgugaucgggaagcccugccccaagccgcaccggcugaaccacaugggcaucugcagcugcgggcucuacaagcaccccggcguccccgugaaguggaagcgcuga

SEQ ID NO: 4451 - RNA, 1473 nt, Artificial Sequence
  derived and/or modified protein sequence (opt1) from LASV(LASV1000-NIG-2009;Clade II)__AIT17782__GPCstabilized
augggccagaucaucaccuucuuccaggaggugccccacgucaucgaggaggugaugaacaucgugcugaucgcccucagccugcuggccauccucaaggggaucuacaacgucgcgaccugcggccuguucgggcugguguccuuccuccugcugugcggccgcagcugcuccacgaccuacaaggggguguacgagcuccagacccuggagcuggacauggccagccucaacaugaccaugccgcuguccugcacgaagaacaacagccaccacuacaucauggucggcaacgagaccggccuggagcucacccugaccaacacguccaucaucaaccacaaguucugcaaccugagcgacgcccacaagaagaaccucuacgaccacgcccugauguccaucaucagcaccuuccaccuguccauccccaacuucaaccaguacgaggccaugagcugcgacuucaacgggggcaagaucuccgugcaguacaaccucagccacaccuacgcgguggacgccgccaaccacugcgggaccaucgccaacggcguccugcagacguucaugcggauggcguggggcggguccuacaucgcccuggacagcggcugcggguccugggacugcaucaugaccagcuaccaguaccucaucauccagaacaccaccugggaggaccacugccaguucucccgccccagccccaucggcuaccuggggcugcucagccagcggacgcgcgacaucuacaucucccggcgccggcgcggcaccuucaccuggacccugagcgacuccgagggcaacgagacgcccgggggcuacugccugacccgguggaugcucaucgaggccgagcugaagugcuucgggaacaccgccguggccaagugcaacgagaagcacgacgaggaguucugcgacaugcugcgccucuucgacuucaacaagcaggcgaucaagcggcugaagaccccggcccagaugagcauccagcugaucaacaaggccgugaacgcccucaucaacgaccagcugaucaugaagaaccaccuccgcgacaucaugugcauccccuacugcaacuacuccaaguacugguaccugaaccacacggucaccggcaagaccagccugccccggugcuggcugguguccaacgggagcuaccucaacgagacccacuucuccgacgacaucgagcagcaggccgacaacaugaucacggagcugcugcagaaggaguacaucgaccgccagggcaagaccccgcucggccugguggaccuguucgucuucagcaccuccuucuaccucaucagcaucuuccugcaccuggugaagauccccacccaccggcacguggucgggaagcccugccccaagccgcaccgccugaaccacaugggcaucugcuccugcgggcucuacaagcaccccggcgugcccgugaaguggaagcgguga

SEQ ID NO: 4452 - RNA, 1473 nt, Artificial Sequence
  derived and/or modified protein sequence (opt1) from LASV(LASV1008-NIG-2009;Clade II)__AIT17786__GPCstabilized
augggccagaucaucaccuucuuccaggaggugccccacgucaucgaggaggugaugaacaucgugcugaucgcccucagccugcuggccauccucaaggggaucuacaacgucgcgaccugcggccuguucgggcugguguccuuccuccugcugugcggccgcagcugcuccacgaccuacaaggggguguacgagcuccagacccuggagcuggacauggccagccucaacaugaccaugccgcuguccugcacgaagaacaacagccaccacuacaucauggucggcaacgagaccggccuggagcucacccugaccaacacguccaucaucaaccacaaguucugcaaccugagcgacgcccacaagaagaaccucuacgaccacgcccugauguccaucaucagcaccuuccaccuguccauccccaacuucaaccaguacgaggccaugagcugcgacuucaacgggggcaagaucuccgugcaguacaaccucagccacgcguacgccaucgacgccgccgaccacugcgggaccaucgcgaacggcgugcugcagaccuucaugcggauggccuggggcggguccuacaucgcccuggacagcggcugcggguccugggacugcaucaugacgagcuaccaguaccucaucauccagaacaccaccugggaggaccacugccaguucucccgccccagccccaucggcuaccuggggcugcucagccagcggacccgcgacaucuacaucucccggcgccggcgcggcacguucaccuggacccugagcgacuccgagggcaacgagacccccgggggcuacugccugacgcgguggaugcucaucgaggccgagcugaagugcuucgggaacaccgccgucgcgaagugcaacgagaagcacgacgaggaguucugcgacaugcugcgccucuucgacuucaacaagcaggccauccggcgccugaagaccccggcccagaugagcauccagcugaucaacaaggccgugaacgcccucaucaacgaccagcugaucaugaagaaccaccuccgggacaucaugugcauccccuacugcaacuacuccaaguacugguaccugaaccacaccgugacgggcaagaccagccugccccgcugcuggcuggucuccaacgggagcuaccucaacgagacccacuucuccgacgacaucgagcagcaggcggacaacaugaucaccgagcugcugcagaaggaguacauggaccggcagggcaagacgccgcucggccugguggaccuguucguguucagcaccuccuucuaccucaucagcaucuuccugcaccuggucaagauccccacccaccgccacaucaccgggaagcccugccccaagccgcaccggcugaaccacaugggcaucugcuccugcgggcucuacaagcaccccggcgugcccgugaaguggaagcgcuga

SEQ ID NO: 4453 - RNA, 1473 nt, Artificial Sequence
  derived and/or modified protein sequence (opt1) from LASV(LASV1011-NIG-2009;Clade II)__AIT17790__GPCstabilized
augggccagaucaucaccuucuuccaggaggugccccacgucaucgaggaggugaugaacaucgugcugaucgcccucagccugcuggccauccucaaggggaucuacaacgucgcgaccugcggccuguucgggcugguguccuuccuccugcugugcggccgcagcugcuccacgaccuacaaggggguguacgagcuccagacccuggagcuggacauggccagccucaacaugaccaugccgcuguccugcacgaagaacaacagccaccacuacaucauggucggcaacgagaccggccuggagcucacccugaccaacacguccaucaucaaccacaaguucugcaaccugagcgacgcccacaagaagaaccucuacgaccacgcccugauguccaucaucagcaccuuccaccuguccauccccaacuucaaccaguacgaggccaugagcugcgacuucaacgggggcaagaucuccgugcaguacaaccucagccacaccuacgcgguggacgccgccaaccacugcgggaccaucgccaacggcguccugcagacguucaugcggauggcguggggcggguccuacaucgcccuggacagcggcugcggguccugggacugcaucaugaccagcuaccaguaccucaucauccagaacaccaccugggaggaccacugccaguucucccgccccagccccaucggcuaccuggggcugcucagccagcggacgcgcgacaucuacaucucccggcgccggcgcggcaccuucaccuggacccugagcgacuccgagggcaacgagacgcccgggggcuacugccugacccgguggaugcucaucgaggccgagcugaagugcuucgggaacaccgccguggccaagugcaacgagaagcacgacgaggaguucugcgacaugcugcgccucuucgacuucaacaagcaggcgauccggcgccugaagaccccggcccagaugagcauccagcugaucaacaaggccgugaacgcccucaucaacgaccagcugaucaugaagaaccaccuccgggacaucaugugcauccccuacugcaacuacuccaaguacugguaccugaaccacacggucaccggcaagaccagccugccccgcugcuggcugguguccaacgggagcuaccucaacgagacccacuucuccgacgacaucgagcagcaggccgacaacaugaucacggagcugcugcagaaggaguacauggaccggcagggcaagaccccgcucggccugguggaccuguucgucuucagcaccuccuucuaccucaucagcaucuuccugcaccuggugaagauccccacccaccgccacaucacggggaagcccugccccaagccgcaccggcugaaccacaugggcaucugcuccugcgggcucuacaagcaccccggcgugcccgucaaguggaagcgcuga

SEQ ID NO: 4454 - RNA, 1473 nt, Artificial Sequence
  derived and/or modified protein sequence (opt1) from LASV(LASV1016-NIG-2009;Clade II)__AIT17798__GPCstabilized
augggccagaucaucaccuucuuccaggaggugccccacgucaucgaggaggugaugaacaucgugcugaucgcccucagccugcuggccauccucaaggggaucuacaacgucgcgaccugcggccuguucgggcugguguccuuccuccugcugugcggccgcagcugcuccacgaccuacaaggggguguacgagcuccagacccuggagcuggacauggccagccucaacaugaccaugccgcuguccugcacgaagaacaacagccaccacuacaucauggucggcaacgagaccggccuggagcucacccugaccaacacguccaucaucaaccacaaguucugcaaccugagcgacgcccacaagaagaaccucuacgaccacgcccugauguccaucaucagcaccuuccaccuguccauccccaacuucaaccaguacgaggccaugagcugcgacuucaacgggggcaagaucuccgugcaguacaaccucagccacaccuacgcgguggacgccgccaaccacugcgggaccaucgccaacggcguccugcagacguucaugcggauggcguggggcggguccuacaucgcccuggacagcggcugcggguccugggacugcaucaugaccagcuaccaguaccucaucauccagaacaccaccugggaggaccacugccaguucucccgccccagccccaucggcuaccuggggcugcucagccagcggacgcgcgacaucuacaucucccggcgccggcgcggcaccuucaccuggacccugagcgacuccgagggcaacgagacgcccgggggcuacugccugacccgguggaugcucaucgaggccgagcugaagugcuucgggaacaccgccguggccaagugcaacgagaagcacgacgaggaguucugcgacaugcugcgccucuucgacuucaacaagcaggcgaucaugcggcugaagaccccggcccagaugagcauccagcugaucaacaaggccgugaacgcccucaucaacgaccagcugaucaugaagaaccaccuccgcgacaucaugugcauccccuacugcaacuacuccaaguacugguaccugaaccacacggucaccggcaagaccagccugccccggugcuggcugguguccaacgggagcuaccucaacgagacccacuucuccgacgacaucgagcagcaggccgacaacaugaucacggagaugcugcagaaggaguaccuggaccgccagggcaagaccccgcucggccugguggaccuguucgucuucagcaccuccuucuaccucaucagcaucuuccugcaccuggugaagauccccacccaccggcacaucaucgggaagcccugccccaagccgcaccgccugaaccacaugggcaucugcuccugcgggcucuacaagcaccccggcgugcccgucaaguggaagcgguga

SEQ ID NO: 4455 - RNA, 1473 nt, Artificial Sequence; identical to SEQ ID NO: 4367
  derived and/or modified protein sequence (opt1) from LASV(LASV221-NIG-2010;Clade II)__AIT17624__GPCstabilized

SEQ ID NO: 4456 - RNA, 1473 nt, Artificial Sequence
  derived and/or modified protein sequence (opt1) from LASV(LASV224-NIG-2010;Clade II)__AIT17626__GPCstabilized
augggccagaucaucaccuucuuccaggaggugccccacgucaucgaggaggugaugaacaucgugcugaucgcccucagccugcuggccauccucaagggggucuacaacguggcgaccugcggccuguucgggcugguguccuuccuccugcugugcggccgcagcugcuccacgaccuacaagggggucuacgagcuccagacccuggagcuggacauggccagccucaacaugaccaugccgcuguccugcacgaagaacaacagccaccacuacaucauggugggcaacgagaccggccuggagcucacccugaccaacacguccaucauccagcacaaguucugcaaccugagcgacgcccacaagaagaaccucuacgaccacgcccugauguccaucaucagcaccuuccaccuguccauccccaacuucaaccaguacgaggccaugagcugcgacuucaacgggggcaagaucaccgugcaguacaaccucucccacagcuacgcgaucgacgccgccaaccacugcgggaccaucgccaacggcguccugcagacguucaugcggauggcguggggcggguccuacaucgcccuggacagcggcugcggguccugggacugcaucaugaccagcuaccaguaccucaucauccagaacaccaccugggaggaccacugccaguucucccgccccagccccaucggcuaccuggggcugcucagccagcggacgcgcgacaucuacaucucccggcgccggcgcggcaccuucaccuggacccugagcgacuccgagggcaacgagacgcccgggggcuacugccugacccgguggaugcucaucgaggccgagcugaagugcuucgggaacaccgccguggccaagugcaacgagaagcacgacgaggaguucugcgacaugcugcgccucuucgacuucaacaagcaggcgauccggcgccugaagaccccggcccagaugagcauccagcugaucaacaaggccgugaacgcccucaucaacgaccagcugaucaugaagaaccaccuccgggacaucaugugcauccccuacugcaacuacuccaaguacugguaccugaaccacacggucaccggccgcaccagccugccccggugcuggcugguguccaacgggagcuaccucaacgagacccacuucuccgacgacaucgagcagcaggccgacaacaugaucacggagcugcugcagaaggaguacauggaccgccagggcaagaccccgcucggccugguggaccuguucgucuucagcaccuccuucuaccucaucagcaucuuccugcaccuggugaagauccccacccaccggcacaucaucgggaagcccugccccaagccgcaccgccugaaccacaugggcgugugcuccugcgggcucuacaagcaccccggcguccccgugaaguggaagcgguga

SEQ ID NO: 4457 - RNA, 1473 nt, Artificial Sequence
  derived and/or modified protein sequence (opt1) from LASV(LASV225-NIG-2010;Clade II)__AIT17630__GPCstabilized
augggccagaucaucaccuucuuccaggaggugccccacgucaucgaggaggugaugaacaucgugcugaucgcccucagccugcuggccauccucaaggggaucuacaacgucgcgaccugcggccuguucgggcugcucuccuuccugcugcucugcggccgcagcugcuccacgaccuacaaggggguguacgagcugcagacccuggagcucgacauggccagccugaacaugaccaugccgcuguccugcacgaagaacaacagccaccacuacaucauggugggcaacgagaccggccucgagcugacccugaccaacacguccaucaucaaccacaaguucugcaaccucagcgacgcccacaagaagaaccuguacgaccacgcccugauguccaucaucagcaccuuccaccucuccauccccaacuucaaccaguacgaggccaugagcugcgacuucaacgggggcaagaucuccguccaguacaaccugagccacgcguacgccguggacgccgccgagcacugcgggaccaucgcgaacggcgugcugcagaccuucaugcggauggccuggggcggguccuacaucgcccucgacagcggcugcggguccugggacugcgucaugacgagcuaccaguaccugaucauccagaacaccuccugggaggaccacugccaguucagccgccccagccccaucggcuaccuggggcuccugucccagcggacccgcgacaucuacaucagccggcgccggcgcggcaccuucacguggacccuguccgacagcgagggcaacgagacccccgggggcuacugccucacccgguggaugcugaucgaggccgagcugaagugcuucgggaacacggccguggcgaagugcaacgagaagcacgacgaggaguucugcgacaugcuccgccuguucgacuucaacaagcaggccauccggcgccugaagaccccggcccagauguccauccagcucaucaacaaggccgugaacgcccugaucaacgaccagcugaucaugaagaaccaccuccgggacaucaugugcauccccuacugcaacuacagcaaguacugguaccugaaccacaccgucaccggcaagacgucccugccccgcugcuggcucgugagcaacggguccuaccugaacgagacccacuucagcgacgacaucgagcagcaggcggacaacaugaucaccgagcugcuccagaaggaguacaucgaccggcagggcaagaccccgcugggccugguggaccucuucgucuucuccacgagcuucuaccugaucuccaucuuccugcaccuggugaagauccccacccaccgccacgugaucgggaagcccugccccaagccgcaccggcucaaccacaugggcaucugcagcugcgggcuguacaagcaccccggcguccccgugaaguggaagcgcuga

SEQ ID NO: 4458 - RNA, 1473 nt, Artificial Sequence
  derived and/or modified protein sequence (opt1) from LASV(LASV229-NIG-2010;Clade II)__AIT17634__GPCstabilized
augggccagaucaucaccuucuuccaggaggugccccacgucaucgaggaggugaugaacaucgugcugaucgcccucagccugcuggccauccucaaggggaucuacaacgucgcgaccugcggccuguucgggcugguguccuuccuccugcugugcggccgcagcugcuccacgaucuacaaggacguguacgagcuccagacccuggagcuggacauggccagccucaacaugaccaugccgcuguccugcaccaagaacaacagccaccacuacaucauggucgggaacgagacgggccuggagcucacccugaccaacaccuccaucaucaaccacaaguucugcaaccugagcgacgcccacaagaagaaccucuacgaccacgcccugauguccaucaucagcacguuccaccuguccauccccaacuucaaccaguacgaggccaugagcugcgacuucaacggcgggaagaucuccgugcaguacaaccucagccacaccuacgcgaucgacgccgccaaccacugcggcaccaucgccaacggggugcugcagaccuucaugcggauggcguggggcggguccuacaucgcccuggacagcggcugcggcuccugggacugcaucaugacgagcuaccaguaccucaucauccagaacaccaccugggaggaccacugccaguucucccgccccagccccaucggguaccugggccugcucagccagcggacccgcgacaucuacaucucccggcgccggcgcgggacguucaccuggacccugagcgacuccgagggcaacgagaccccgggcggguacugccugacgcgguggaugcucaucgaggccgagcugaagugcuucggcaacaccgccgucgccaagugcaacgagaagcacgacgaggaguucugcgacaugcugcgccucuucgacuucaacaagcaggcgauccggcgccugaagacccccgcccagaugagcauccagcugaucaacaaggccgugaacgcccucaucaacgaccagcugaucaugaagaaccaccuccgggacaucaugugcauccccuacugcaacuacucccgcuacugguaccugaaccacaccgugacggggcggaccagccugccccgcugcuggcuggucuccaacggcagcuaccucaacgagacccacuucuccgacgacaucgagcagcaggccgacaacaugaucaccgagcugcugcagaaggaguacauggaccggcaggggaagacgccgcucggccugguggaccuguucguguucagcaccuccuucuaccucaucagcaucuuccugcaccuggucaagauccccacccaccgccacgugaucggcaagcccugccccaagccgcaccggcugaaccacauggggaucugcuccugcggccucuacaaccaccccggggugcccgucaaguggaagcgcuga

SEQ ID NO: 4459 - RNA, 1473 nt, Artificial Sequence
  derived and/or modified protein sequence (opt1) from LASV(LASV237-NIG-2010;Clade II)__AIT17638__GPCstabilized
augggccagaucaucaccuucuuccaggaggugccccacgucaucgaggaggugaugaacaucgugcugaucgcccucagccugcuggccauccucaaggggaucuacaacgucgcgaccugcggccuguucgggcugguguccuuccuccugcugugcggccgcagcugcuccacgaccuacaaggggguguacgagcuccagacccuggagcuggacauggccagccucaacaugaccaugccgcuguccugcacgaagaacaacagccaccacuacaucauggucggcaacgagaccggccuggagcucacccugaccaacacguccaucaucaaccacaaguucugcaaccugagcgacgcccacaagaaggaccucuacgaccacgcccugauguccaucaucagcaccuuccaccuguccauccccaacuucaaccaguacgaggccaugagcugcgacuucaacgggggcaagaucuccgugcaguacaaccucagccacaccuacgcgguggacgccgccaaccacugcgggaccaucgccaacggcguccugcagacguucaugcggauggcguggggcggguccuacaucgcccuggacagcggcugcggguccugggacugcaucaugaccagcuaccaguaccucaucauccagaacaccaccugggaggaccacugccaguucucccgccccagccccaucggcuaccuggggcugcucagccagcggacgcgcgacaucuacaucucccggcgccggcgcggcaccuucaccuggacccugagcgacuccgagggcaacgagacgcccgggggcuacugccugacccgguggaugcucaucgaggccgagcugaagugcuucgggaacaccgccguggccaagugcaacgagaagcacgacgaggaguucugcgacaugcugcgccucuucgacuucaacaagcaggcgauccggcgccugaagaccccggcccagaugagcauccagcugaucaacaaggccgugaacgcccucaucaacgaccagcugaucaugaagaaccaccuccgggacaucaugugcauccccuacugcaacuacuccaaguacugguaccugaaccacacggucaccggcaagaccagccugccccgcugcuggcugguguccaacgggagcuaccucaacgagacccacuucuccgacgacaucgagcagcaggccgacaacaugaucacggagcugcugcagaaggaguacauggaccggcagggcaagaccccgcucggccugguggaccuguucgucuucagcaccuccuucuaccucaucagcaucuuccugcaccugaucaagauccccacccaccgccacaucacggggaagcccugccccaagccgcaccggcugaaccacaugggcaucugcuccugcgggcucuacaagcaccccggcgugcccgugaaguggaagcgcuga

SEQ ID NO: 4460 - RNA, 1473 nt, Artificial Sequence
  derived and/or modified protein sequence (opt1) from LASV(LASV239-NIG-2010;Clade II)__AIT17642__GPCstabilized
augggccagaucaucaccuucuuccaggaggugccccacgucaucgaggaggugaugaacaucgugcugaucgcccucagccugcuggccauccucaagggggucuacaacguggcgaccugcggccuguucgggcugguguccuuccuccugcugugcggccgcagcugcuccacgaccuacaagggggucuacgagcuccagacccuggagcuggacauggccagccucaacaugaccaugccgcuguccugcacgaagaacaacagccaccacuacaucauggugggcaacgacaccggccuggagcucacccugaccaacacguccaucaucaaccacaaguucugcaaccugagcgacgcccacaagaagaaccucuacgaccacgcccugauguccaucaucagcaccuuccaccuguccauccccaacuucaaccaguacgaggccaugagcugcgacuucaacgggggcaagaucuccgugcaguacaaccucagccacgcguacgccgucgacgccgccucccacugcgggaccaucgcgaacggcgugcugcagaccuucaugcggauggccuggggcgggagcuacaucgcccuggacuccggcugcgggagcugggacugcaucaugacguccuaccaguaccucaucauccagaacaccaccugggaggaccacugccaguucagccgccccagccccaucggcuaccuggggcugcucucccagcggacccgcgacaucuacaucagccggcgccggcgcggcacguucaccuggacccuguccgacagcgagggcaacgagacccccgggggcuacugccugacgcgguggaugcucaucgaggccgagcugaagugcuucgggaacaccgccguggcgaagugcaacgagaagcacgacgaggaguucugcgacaugcugcgccucuucgacuucaacaagcaggccauccggcgccugaagaccccggcccagauguccauccagcugaucaacaaggccgucaacgcccucaucaacgaccagcugaucaugaagaaccaccuccgggacaucaugugcauccccuacugcaacuacagcaaguacugguaccugaaccacaccgugacgggcaagaccucccugccccgcugcuggcuggugagcaacggguccuaccucaacgagacccacuucagcgacgacaucgagcagcaggcggacaacaugaucaccgagcugcugcagaaggaguacauggaccggcagggcaagacgccgcucggccuggucgaccuguucguguucuccaccagcuucuaccucaucuccaucuuccugcaccuggugaagauccccacccaccgccacaucaucgggaagcccugccccaagccgcaccggcugaaccacaugggcaucugcagcugcgggcucuacaagcaccccggcguccccgugaaguggaagcgcuga

SEQ ID NO: 4461 - RNA, 1473 nt, Artificial Sequence
  derived and/or modified protein sequence (opt1) from LASV(LASV241-NIG-2011;Clade II)__AIT17646__GPCstabilized
augggccagaucaucaccuucuuccaggaggugccccacgucaucgaggaggugaugaacaucgugcugaucgcccucagccugcuggccauccucaaggggaucuacaacgucgcgaccugcggccuguucgggcugguguccuuccuccugcugugcggccgcagcugcuccacgaccuacaaggggguguacgagcuccagacccuggagcuggacauggccagccucaacaugaccaugccgcuguccugcacgaagaacaacagccaccacuacaucauggucggcaacgagaccggccuggagcucacccugaccaacacguccaucaucaaccacaaguucugcaaccugagcgacgcccacaagaagaaccucuacgaccacgcccugauguccaucaucagcaccuuccaccuguccauccccaacuucaaccaguacgaggccaugagcugcgacuucaacgggggcaagaucuccgugcaguacaaccucagccacgcguacgccguggacgccgccucccacugcgggaccgucgcgaacggcgugcugcagaccuucaugcggauggccuggggcgggagcuacaucgcccuggacuccggcugcgggagcugggacugcaucaugacguccuaccaguaccucaucauccagaacaccaccugggaggaccacugccaguucagccgccccagccccaucggcuaccuggggcugcucucccagcggacccgcgacaucuacaucagccggcgccggcgcggcacguucaccuggacccuguccgacagcgagggcaacgagacccccgggggcuacugccugacgcgguggaugcucaucgaggccgagcugaagugcuucgggaacaccgccguggcgaagugcaacgagaagcacgacgaggaguucugcgacaugcugcgccucuucgacuucaacaagcaggccauccggcgccugaagaccccggcccagauguccauccagcugaucaacaaggccgucaacgcccucaucaacgaccagcugaucaugaagaaccaccuccgggacaucaugugcauccccuacugcaacuacagcaaguacugguaccugaaccacaccgugacgggcaagaccucccugccccgcugcuggcuggugagcaacggguccuaccucaacgagacccacuucagcgacgacaucgagcagcaggcggacaacaugaucaccgagcugcugcagaaggaguacauggaccggcagggcaagacgccgcucggccuggucgaccuguucguguucuccaccagcuucuaccucaucuccaucuuccugcaccuggugaagauccccacccaccgccacgucaucgggaagcccugccccaagccgcaccggcugaaccacaugggcaucugcagcugcgggcucuacaagcaccccggcgugcccgugaaguggaagcgcuga

SEQ ID NO: 4462 - RNA, 1473 nt, Artificial Sequence
  derived and/or modified protein sequence (opt1) from LASV(LASV242-NIG-2010;Clade II)__AIT17650__GPCstabilized
augggccagaucaucaccuucuuccaggaggugccccacgucaucgaggaggugaugaacaucgugcugaucgcccucagccugcuggccauccucaaggggaucuacaacgucgcgaccugcggccuguucgggcugguguccuuccuccugcugugcggccgcagcugcuccacgaccuacaaggggguguacgagcuccagacccuggagcuggacauggccagccucaacaugaccaugccgcuguccugcacgaagaacaacagccaccacuacaucauggucggcaacgagaccggccuggagcucacccugaccaacaucuccaucaucaaccacaaguucugcaaccugagcgacgcccacaagaagaaccucuacgaccacgcccugauguccaucaucagcacguuccaccuguccauccccaacuucaaccaguacgaggccaugagcugcgacuucaacgggggcaagaucuccgugcaguacaaccucagccacaccuacgcgguggacgccgccaaccacugcgggaccaucgccaacggcguccugcagaccuucaugcggauggcguggggcggguccuacaucgcccuggacagcggcugcggguccugggacugcaucaugacgagcuaccaguaccucaucauccagaacaccaccugggaggaccacugccaguucucccgccccagccccaucggcuaccuggggcugcucagccagcggacccgcgacaucuacaucucccggcgccggcgcggcacguucaccuggacccugagcgacuccgagggcaacgagacccccgggggcuacugccugacgcgguggaugcucaucgaggccgagcugaagugcuucgggaacaccgccguggccaagugcaacgagaagcacgacgaggaguucugcgacaugcugcgccucuucgacuucaacaagcaggcgauccggcgccugaaggccccggcccagaugagcauccagcugaucaacaaggccgugaacgcccucaucaacgaccagcugaucaugaagaaccaccuccgggacaucaugugcauccccuacugcaacuacuccaaguacugguaccugaaccacaccgucaccggccgcacgagccugccccggugcuggcugguguccaacgggagcuaccucaacgagacccacuucuccgacgacaucgagcagcaggcggacaacaugaucaccgagcugcugcagaaggaguacaucgaccgccagggcaagaccccgcucggccugguggaccuguucgucuucagcacguccuucuaccucaucagcaucuuccugcaccuggugaagauccccacccaccggcacaucaucgggaagcccugccccaagccgcaccgccugaaccacaugggcaucugcuccugcgggcucuacaagcaccccggcgugcccgucaaguggaagcgguga

SEQ ID NO: 4463 - RNA, 1473 nt, Artificial Sequence
  derived and/or modified protein sequence (opt1) from LASV(LASV246-NIG-2010;Clade II)__AIT17658__GPCstabilized
augggccagaucaucaccuucuuccaggaggugccccacgucaucgaggaggugaugaacaucgugcugaucgcccucagccugcuggccauccucaagggggucuacaacguggcgaccugcggccuguucgggcugguguccuuccuccugcugugcggccgcagcugcuccaucacguacaagggggucuacgagcuccagacccuggagcuggacauggccaaccucaacaugaccaugccgcugagcugcaccaagaacaacucccaccacuacaucauggugggcaacgagacgggccuggagcucacccugaccaacaccagcaucaucaaccacaaguucugcaaccuguccgacgcccacaagaagaaccucuacgaccacgcccugaugagcaucaucuccacguuccaccugagcauccccaacuucaaccaguacgaggccauguccugcgacuucaacgggggcaagaucagcgugcaguacaaccucucccacaccuacgcgggggacgccgccgaccacugcggcaccaucgccaacgggguccugcagaccuucaugcggauggcguggggcggcagcuacaucgcccuggacuccgggugcggcagcugggacugcaucaugacguccuaccaguaccucaucauccagaacaccaccugggaggaccacugccaguucagccgccccucccccaugggguaccugggccugcucagccagcggacccgcgacaucuacaucagccggcgccggcgcggcacguucaccuggacccuguccgacagcgaggggaacgagaccccgggcggguacugccugacgcgguggaugcucaucgaggccgagcugaagugcuucggcaacaccgccguggccaagugcaacgagaagcacgacgaggaguucugcgacaugcugcgccucuucgacuucaacaagcaggcgauccggcgccugaagacccccgcccagauguccauccagcugaucaacaaggccgugaacgcccucaucaacgaccagcugaucaugaagaaccaccuccgggacaucaugugcauccccuacugcaacuacagcaaguacugguaccugaaccacaccaucacggggaagaccucccugccccgcugcuggcuggucagcaacggcuccuaccucaacgagacccacuucagcgacgacaucgagcagcaggccgacaacaugaucaccgagcugcugcagaaggaguacaucgaccggcagggcaagacgccgcucgggcugguggaccuguucguguucuccaccagcuucuaccucaucuccaucuuccugcaccuggucaagauccccacccaccgccacaucaccggcaagcccugccccaagccgcaccggcugaaccacauggggaucugcagcugcggccucuacaagcaccccggggugcccgugcgcuggaagcgguga

SEQ ID NO: 4464 - RNA, 1473 nt, Artificial Sequence
  derived and/or modified protein sequence (opt1) from LASV(LASV251-NIG-2010;Clade II)__AIT17666__GPCstabilized
augggccagaucgugaccuucuuccaggaggucccccacgugaucgaggaggugaugaacaucguccugaucgcccucagccugcuggccauccucaaggggaucuacaacguggcgaccugcggccuguucgggcugguguccuuccuccugcugugcggccgcagcugcuccacgaccuacaagggggucuacgagcuccagacccuggagcuggacauggccagccucaacaugaccaugccgcuguccugcacgaagaacaacagccaccacuacaucauggugggcaacgagaccggccuggagcucacccugaccaacacguccaucaucaaccacaaguucugcaaccugagcgacgcccacaagaagaaccucuacgaccacgcccugauguccaucaucagcaccuuccaccuguccauccccaacuucaaccaguacgaggccaugagcugcgacuucaacgggggcaagaucuccgugcaguacaaccucagccacaccuacgcggucgacgccgccaaccacugcgggaccaucgccaacggcgugcugcagacguucaugcggauggcguggggcggguccuacaucgcccuggacagcggcugcggguccugggacugcaucaugaccagcuaccaguaccucaucauccagaacaccaccugggaggaccacugccaguucucccgccccagccccaucggcuaccuggggcugcucagccagcggacgcgcgacaucuacaucucccggcgccggcgcggcaccuucaccuggacccugagcgacuccgagggcaacgagacgcccgggggcuacugccugacccgguggaugcucaucgaggccgagcugaagugcuucgggaacaccgccguggccaagugcaacgagaagcacgacgaggaguucugcgacaugcugcgccucuucgacuucaacaagcaggcgauccggcgccugaagaccccggcccagaugagcauccagcugaucaacaaggccgucaacgcccucaucaacgaccagcugaucaugaagaaccaccuccgggacaucaugugcauccccuacugcaacuacuccaaguacugguaccugaaccacacggugaccggcaagaccagccugccccgcugcuggcugguguccaacgggagcuaccucaacgagacccacuucuccgacgacaucgagcagcaggccgacaacaugaucacggagcugcugcagaaggaguacauggaccggcagggcaagaccccgcucggccuggucgaccuguucguguucagcaccuccuucuaccucaucagcaucuuccugcaccuggugaagauccccacccaccgccacaucacggggaagcccugccccaagccgcaccggcugaaccacaugggcaucugcuccugcgggcucuacaagcaccccggcguccccgugaaguggaagcgcuga

SEQ ID NO: 4465 - RNA, 1473 nt, Artificial Sequence
  derived and/or modified protein sequence (opt1) from LASV(LASV253-NIG-2011;Clade II)__AIT17670__GPCstabilized
augggccagaucaucaccuucuuccaggaggugccccacgucaucgaggaggugaugaacaucgugcugaucgcccucagccugcuggccauccucaaggggaucuacaacgucgcgaccugcggccuguucgggcugguguccuuccuccugcugugcggccgcagcugcuccacgaccuacaaggggguguacgagcuccagacccuggagcuggacauggccagccucaacaugaccaugccgcuguccugcacgaagaacaacagccaccacuacaucauggucggcaacgagaccggccuggagcucacccugaccaacacguccaucaucaaccacaaguucugcaaccugagcgacgcccacaagaagaaccucuacgaccacgcccugauguccaucaucagcaccuuccaccuguccauccccaacuucaaccaguacgaggccaugagcugcgacuucaacgggggcaagaucuccgugcaguacaaccucagccacaccuacgcgguggacgccgccaaccacugcgggaccaucgccaacggcguccugcagacguucaugcggauggcguggggcggguccuacaucgcccuggacagcggcugcggguccugggacugcaucaugaccagcuaccaguaccucaucauccagaacaccaccugggaggaccacugccaguucucccgccccagccccaucggcuaccuggggcugcucagccagcggacgcgcgacaucuacaucucccggcgccggcgcggcaccuucaccuggacccugagcgacuccgagggcaacgagacgcccgggggcuacugccugacccgguggaugcucaucgaggccgagcugaagugcuucgggaacaccgccguggccaagugcaacgagaagcacgacgaggaguucugcgacaugcugcgccucuucgacuucaacaagcaggcgauccggcgccugaaggccccggcccagaugagcauccagcugaucaacaaggccgugaacgcccucaucaacgaccagcugaucaugaagaaccaccuccgggacaucaugugcauccccuacugcaacuacuccaaguacugguaccugaaccacaccgucacgggccgcaccagccugccccggugcuggcugguguccaacgggagcuaccucaacgagacccacuucuccgacgacaucgagcagcaggcggacaacaugaucaccgagcugcugcagaaggaguacaucgaccgccagggcaagacgccgcucggccugguggaccuguucgucuucagcaccuccuucuaccucaucagcaucuuccugcaccuggugaagauccccacccaccggcacaucaucgggaagcccugccccaagccgcaccgccugaaccacaugggcaucugcuccugcgggcucuacaagcaccccggcgugcccgucaaguggaagcgguga

SEQ ID NO: 4466 - RNA, 1473 nt, Artificial Sequence
  derived and/or modified protein sequence (opt1) from LASV(LASV254-NIG-2011;Clade II)__AIT17674__GPCstabilized
augggccagaucaucaccuucuuccaggaggugccccacgucaucgaggaggugaugaacaucgugcugaucgcccucagccugcuggccauccucaaggggaucuacaacgucgcgaccugcggccuguucgggcugguguccuuccuccugcugugcggccgcagcugcuccacgaccuacaaggggguguacgagcuccagacccuggagcuggacaugaccaaccucaacaugacgaugccgcugagcugcaccaagaacaacucccaccacuacaucauggucggcaacgagaccggccuggagcucacccugacgaacaccagcaucaucaaccacaaguucugcaaccuguccgacgcccacaagaagaaccucuacaaccacgcccugaugagcaucaucuccaccuuccaccugagcauccccaacuucaaccaguacgaggccauguccugcgacuucaacgggggcaagaucagcgugcaguacaaccucucccacagcuacgccguggacgcggccaaccacugcgggaccaucgccaacggcguccugcagacguucaugcggauggccuggggcggguccuacaucgcgcuggacagcggcugcgggaacugggacugcaucaugaccuccuaccaguaccucaucauccagaacaccaccugggaggaccacugccaguucagccgccccucccccaucggcuaccuggggcugcucagccagcggacgcgcgacaucuacaucagccggcgccggcgcggcaccuucaccuggacccuguccgacagcgagggcaacgagacgcccgggggcuacugccugacccgguggaugcucaucgaggccgagcugaagugcuucgggaacaccgccguggccaagugcaacgagaagcacgacgaggaguucugcgacaugcugcgccucuucgacuucaacaagcaggccauccggcgccugaagaccccggcgcaggccaacauccagcugaucaacaaggccgugaacgcccucaucaacgaccagcugaucaugaagaaccaccuccgggacaucaugugcauccccuacugcaacuacuccaaguacugguaccugaaccacacggucaccggcaagaccagccugccccgcugcuggcugguguccaacgggagcuaccucaacgagacccacuucuccgacgacaucgagcagcaggccgacaacaugaucacggagcugcugcagaaggaguacauggaccggcagggcaagaccccgcucggccugguggaccuguucgucuucagcaccuccuucuaccucaucagcaucuuccugcaccuggugaagauccccacccaccgccacgugaucgggaagcccugccccaagccgcaccggcugaaccacaugggcaucugcuccugcgggcucuacaagcaccccggcguccccgugaaguggaagcgcuga

SEQ ID NO: 4467 - RNA, 1473 nt, Artificial Sequence
  derived and/or modified protein sequence (opt1) from LASV(LASV256-NIG-2010;Clade II)__AIT17678__GPCstabilized
augggccagaucaucaccuucuuccaggaggugccccacgucaucgaggaggugaugaacaucgugcugaucacccucagccugcuggccauccucaaggggaucuacaacaucgccacgugcggccuguucgggcuggucuccuuccuccugcugugcggccgcagcugcuccaccaccuacaaggggguguacgagcuccagacccuggagcuggacaugacgagccucaacaugaccaugccgcuguccugcaccaagaacaacagccaccacuacaucauggugggcaacgagaccggccuggagcucacgcugaccaacaccuccaucaucaaccacaaguucugcaaccugagcgacgcgcacaagaagaaccucuacgaccacgcccugauguccaucaucagcaccuuccaccuguccauccccaacuucaaccaguacgaggccaugagcugcgacuucaacgggggcaagaucuccguccaguacaaccucagccacacguacgccguggacgccgcgaaccacugcgggaccaucgccaacggcgugcugcagaccuucaugcggauggccuggggcggguccuacaucgcccuggacagcggcugcggguccugggacugcaucaugaccagcuaccaguaccucaucauccagaacacgaccugggaggaccacugccaguucucccgccccagccccaucggcuaccuggggcugcucagccagcggacccgcgacaucuacaucucccggcgccggcgcggcaccuucacguggacccugagcgacuccgagggcaacgagacccccgggggcuacugccugacccgguggaugcucaucgaggcggagcugaagugcuucgggaacacggccgucgccaagugcaacgagaagcacgacgaggaguucugcgacaugcugcgccucuucgacuucaacaagcaggccauccggcgccugaagaccccggcccagaugagcauccagcugaucaacaaggcggugaacgcccucaucaacgaccagcugaucaugaagaaccaccuccgggacaucaugugcauccccuacugcaacuacuccaaguacugguaccugaaccacaccgugaccggcaagacgagccugccccgcugcuggcuggucuccaacgggagcuaccucaacgagacccacuucuccgacgacaucgagcagcaggccgacaacaugaucaccgagcugcugcagaaggaguacaucgaccggcagggcaagaccccgcucggccugguggaccuguucguguucagcacguccuucuaccucaucagcaucuuccugcaccuggucaagauccccacccaccgccacaucaucgggaagcccugccccaagccgcaccggcugaaccacaugggcaucugcuccugcgggcucuacaagcaccccggcauccccgugaaguggaagcgcuga

SEQ ID NO: 4468 - RNA, 1473 nt, Artificial Sequence
  derived and/or modified protein sequence (opt1) from LASV(LASV267-NIG-2010;Clade II)__AIT17686__GPCstabilized
augggccagaucaucaccuucuuccaggaggugccccacgucaucgaggaggugaugaacaucgugcugaucgcccucagccugcuggccauccucaaggggaucuacaacgucgcgaccugcggccuguucgggcugguguccuuccuccugcugugcggccgcagcugcuccacgaccuacaaggggguguacgagcuccagacccuggagcuggacauggccagccucaacaugaccaugccgcuguccugcacgaagaacaacagccaccacuacaucauggucggcaacgagaccggccuggagcucacccugaccaacacguccaucaucaaccacaaguucugcaaccugagcgacgcccacaagaagaaccucuacgaccacgcccugauguccaucaucagcaccuuccaccuguccauccccaacuucaaccaguacgaggccaugagcugcgacuucaacgggggcaagaucuccgugcaguacaaccucagccacaccuacgcgguggacgccgccaaccacugcgggaccaucgccaacggcguccugcagacguucaugcggauggcguggggcggguccuacaucgcccuggacagccgcugcggcuccugggacugcaucaugaccagcuaccaguaccucaucauccagaacaccaccugggaggaccacugccaguucucccggcccagccccaucggguaccugggccugcucagccagcgcacgcgggacaucuacaucucccgccggcgccgggggaccuucaccuggacccugagcgacuccgagggcaacgagacgccgggcggguacugccugacccgcuggaugcucaucgaggccgagcugaagugcuucggcaacaccgccguggccaagugcaacgagaagcacgacgaggaguucugcgacaugcugcggcuguucgacuucaacaagcaggcgauccgccggcugaagacccccgcccagaugagcauccagcugaucaacaaggccgugaacgcccucaucaacgaccagcugaucaugaagaaccaccuccgcgacaucaugugcauccccuacugcaacuacuccaaguacugguaccucaaccacacggucaccgggaagaccagccugccccggugcuggcugguguccaacggcagcuaccucaacgagacccacuucuccgacgacaucgagcagcaggccgacaacaugaucacggagcugcugcagaaggaguacauggaccgccaggggaagaccccgcucggccugguggaccuguucgucuucagcaccuccuucuaccucaucagcaucuuccugcaccugaucaagauccccacccaccggcacgugaucggcaagcccugccccaagccgcaccgccugaaccacauggggaucugcuccugcggccucuacaagcaccccggggugcccgucaaguggaagcgguga

SEQ ID NO: 4469 - RNA, 1473 nt, Artificial Sequence
  derived and/or modified protein sequence (opt1) from LASV(LASV271-NIG-2010;Clade II)__AIT17690__GPCstabilized
augggccagaucaucaccuucuuccaggaggugccccacgucaucgaggaggugaugaacaucgugcugaucgcccucagccugcuggccauccucaaggggaucuacaacgucgcgaccugcggccuguucgggcugguguccuuccuccugcugugcggccgcagcugcuccacgaccuacaaggggguguacgagcuccagacccuggagcuggacauggccagccucaacaugaccaugccgcuguccugcacgaagaacaacagccaccacuacaucauggucggcaacgagaccggccuggagcucacccugaccaacacguccaucaucaaccacaaguucugcaaccugagcgacgcccacaagaagaaccucuacgaccacgcccugauguccaucaucagcaccuuccaccuguccauccccaacuucaaccaguacgaggccaugagcugcgacuucaacgggggcaagaucuccgugcaguacaaccucagccacgcguacgccguggacgccgccucccacugcgggaccgucgcgaacggcgugcugcagaccuucaugcggauggccuggggcgggagcuacaucgcccuggacuccggcugcgggagcugggacugcaucaugacguccuaccaguaccucaucauccagaacaccaccugggaggaccacugccaguucagccgccccagccccaucggcuaccuggggcugcucucccagcggacccgcgacaucuacaucagccggcgccggcgcggcacguucaccuggacccuguccgacagcgagggcaacgagacccccgggggcuacugccugacgcgguggaugcucaucgaggccgagcugaagugcuucgggaacaccgccguggcgaagugcaacgagaagcacgacgaggaguucugcgacaugcugcgccucuucgacuucaacaagcaggccauccggcgccugaagaccccggcccagauguccauccagcugaucaacaaggccgucaacgcccucaucaacgaccagcugaucaugaagaaccaccuccgggacaucaugugcauccccuacugcaacuacagcaaguacugguaccugaaccacaccgugacgggccgcaccucccugccccggugcuggcuggugagcaacggguccuaccucaacgagacccacuucagcgacgacaucgagcagcaggcggacaacaugaucaccgagcugcugcagaaggaguacauggaccgccagggcaagacgccgcucggccuggucgaccuguucguguucuccaccagcuucuaccucaucuccaucuuccugcaccuggugaagauccccacccaccggcacgucaucgggaagcccugccccaagccgcaccgccugaaccacaugggcaucugcagcugcgggcucuacaagcaccccggcgugcccgugaaguggaagcgguga

SEQ ID NO: 4470 - RNA, 1473 nt, Artificial Sequence
  derived and/or modified protein sequence (opt1) from LASV(LASV274-NIG-2010;Clade II)__AIT17694__GPCstabilized
augggccagaucaucaccuucuuccaggaggugccccacgucaucgaggaggugaugaacaucgugcugaucgcccucagccugcuggccauccucaaggggaucuacaacgucgcgaccugcggccuguucgggcugguguccuuccuccugcugugcggccgcagcugcuccacgaucuacaaggggguguacgagcuccagacccuggagcuggacauggccagccucaacaugaccaugccgcuguccugcaccaagaacaacagccaccacuacaucauggucggcaacgagacgggccuggagcucacccugaccaacaccuccaucaucaaccacaaguucugcaaccugagcgacgcccacaagaagaaccucuacgaccacgcccugauguccaucaucagcacguuccaccuguccauccccaacuucaaccaguacgaggccaugagcugcgacuucaacgggggcaagaucuccgugcaguacaaccucagccacaccuacgcgguggacgccgccaaccacugcgggaccaucgccaacggcguccugcagaccuucaugcggauggcguggggcggguccuacaucgcccuggacagcggcugcggguccugggacugcaucaugacgagcuaccaguaccucaucauccagaacaccaccugggaggaccacugccaguucucccgccccagccccaucggcuaccuggggcugcucagccagcggacccgcgacaucuacaucucccggcgccggcgcggcacguucaccuggacccugagcgacuccgagggcaacgagacccccgggggcuacugccugacgcgguggaugcucaucgaggccgagcugaagugcuucgggaacaccgccguggccaagugcaacgagaagcacgacgaggaguucugcgacaugcugcgccucuucgacuucaacaagcaggcgauccggcgccugaagaccccggcccagaugagcauccagcugaucaacaaggccgugaacgcccucaucaacgaccagcugaucaugaagaaccaccuccgggacaucaugugcauccccuacugcaacuacuccaaguacugguaccugaaccacaccgucacgggcaagaccagccugccccgcugcuggcugguguccaacgggagcuaccucaacgagacccacuucuccgacgacaucgagcagcaggccgacaacaugaucaccgagcugcugcagaaggaguacaucgaccggcagggcaagacgccgcucggccugguggaccuguucgucuucagcaccuccuucuaccucaucagcaucuuccugcaccuggugaagauccccacccaccgccacguggucgggaagcccugccccaagccgcaccggcugaaccacaugggcaucugcuccugcgggcucuacaagcaccccggcgugcccgugaaguggaagcgcuga

SEQ ID NO: 4471 - RNA, 1473 nt, Artificial Sequence
  derived and/or modified protein sequence (opt1) from LASV(LASV719-NIG-2009;Clade II)__AIT17704__GPCstabilized
augggccagaucaucaccuucuuccaggaggugccccacgucaucgaggaggugaugaacaucgugcugaucgcccucagccugcuggccauccucaaggggaucuacaacgucgcgaccugcggccuguucgggcugguguccuuccuccugcugugcggccgcagcugcuccacgaccuacaaggggguguacgagcuccagacccuggagcuggacauggccagccucaacaugaccaugccgcuguccugcacgaagaacaacagccaccacuacaucauggucggcaacgagaccggccuggagcucacccugaccaacacguccaucaucaaccacaaguucugcaaccugagcgacgcccacaagaagaaccucuacgaccacgcccugauguccaucaucagcaccuuccaccuguccauccccaacuucaaccaguacgaggccaugagcugcgacuucaacgggggcaagaucuccgugcaguacaaccucagccacaccuacgcgguggacgccgccaaccacugcgggaccaucgccaacggcguccugcagacguucaugcggauggcguggggcggguccuacaucgcccuggacagcggcugcggguccugggacugcaucaugaccagcuaccaguaccucaucauccagaacaccaccugggaggaccacugccaguucucccgccccagccccaucggcuaccuggggcugcucagccagcggacgcgcgacaucuacaucucccggcgccggcgcggcaccuucaccuggacccugagcgacuccgagggcaacgagacgcccgggggcuacugccugacccgguggaugcucaucgaggccgagcugaagugcuucgggaacaccgccguggccaagugcaacgagaagcacgacgaggaguucugcgacaugcugcgccucuucgacuucaacaagcaggcgauccggcgccugaagaccccggcccagaugagcauccagcugaucaacaaggccgugaacgcccucaucaacgaccagcugaucaugaagaaccaccuccgggacaucaugugcauccccuacugcaacuacuccaaguacugguaccugaaccacacggucaccggcaagaccagccugccccgcugcuggcugguguccaacgggagcuaccucaacgagacccacuucuccgacgacaucgagcagcaggccgacaacaugaucacggagcugcugcagaaggaguacaucgaccggcagggcaagaccccgcucggccugguggaccuguucgucuucagcaccuccuucuaccucaucagcaucuuccugcaccuggugaagauccccacccaccgccacgugaucgggaagcccugccccaagccgcaccggcugaaccacaugggcaucugcuccugcgggcucuacaagcaccccggcguccccgugaaguggaagcgcuga

SEQ ID NO: 4472 - RNA, 1473 nt, Artificial Sequence
  derived and/or modified protein sequence (opt1) from LASV(LASV738-NIG-2009;Clade II)__AIT17712__GPCstabilized
augggccagaucaucaccuucuuccaggaggugccccacgucaucgaggaggugaugaacaucgugcugaucgcccucagccugcuggccauccucaaggggaucuacaacgucgcgaccugcggccuguucgggcugguguccuuccuccugcugugcggccgcagcugcuccacgaccuacaaggggguguacgagcuccagacccuggagcuggacauggccagccucaacaugaccaugccgcuguccugcacgaagaacaacagccaccacuacaucauggucggcaacgagaccggccuggagcucacccugaccaacacguccaucaucaaccacaaguucugcaaccugagcgacgcccacaagaagaaccucuacgaccacgcccugauguccaucaucagcaccuuccaccuguccauccccaacuucaaccaguacgaggccaugagcugcgacuucaacgggggcaagaucuccgugcaguacaaccucagccacaccuacgcgguggacgccgccaaccacugcgggaccaucgccaacggcguccugcagacguucaugcggauggcguggggcggguccuacaucgcccuggacagcggcugcggggccugggacugcaucaugaccuccuaccaguaccucaucauccagaacaccaccugggaggaccacugccaguucagccgccccucccccaucggcuaccuggggcugcucagccagcggacgcgcgacaucuacaucagccggcgccggcgcggcaccuucaccuggacccuguccgacagcgagggcaacgagacgcccgggggcuacugccugacccgguggaugcucaucgaggccgagcugaagugcuucgggaacaccgccguggcgaagugcaacgagaagcacgacgaggaguucugcgacaugcugcgccucuucgacuucaacaagcaggccaucaugcggcugaagaccccggcccagauguccauccagcugaucaacaaggccgugaacgcccucaucaacgaccagcugaucaugaagaaccaccuccgcgacaucaugugcauccccuacugcaacuacagcaaguacugguaccugaaccacacggucaccggcaagaccucccugccccggugcuggcuggugagcaacggguccuaccucaacgagacccacuucagcgacgacaucgagcagcaggcggacaacaugaucacggagaugcugcagaaggaguacaucgaccgccagggcaagaccccgcugggccucguggaccuguucgucuucuccaccagcuucuaccugaucuccaucuuccuccaccuggugaagauccccacccaccggcacgugaucgggaagcccugccccaagccgcaccgccugaaccacaugggcaucugcagcugcgggcuguacaagcaccccggcguccccgugcgguggaagcgcuga

SEQ ID NO: 4473 - RNA, 1473 nt, Artificial Sequence
  derived and/or modified protein sequence (opt1) from LASV(LASV966-NIG-2009;Clade II)__AIT17718__GPCstabilized
augggccagaucaucaccuucuuccaggaggugccccacgucaucgaggaggugaugaacaucgugcugaucgcccucagccugcuggccauccucaaggggaucuacaacgucgcgaccugcggccuguucgggcugguguccuuccuccugcugugcggccgcagcugcuccacgaccuacaaggggguguacgagcuccagacccuggagcuggacauggccagccucaacaugaccaugccgcuguccugcacgaagaacaacagccaccacuacauccgggucggcaacgagaccggccuggagcucacccugaccaacgccuccaucaucaaccacaaguucugcaaccugagcgacgcccacaagaagaaccucuacgaccacgcccugauguccaucaucagcacguuccaccuguccauccccaacuucaaccaguacgaggcgaugagcugcgacuucaacgggggcaagaucuccgugcaguacaaccucagccacgccuacgccaucgacgccgcgaaccacugcgggaccguggccaacggcguccugcagaccuucaugcgcauggccuggggcggguccuacaucgcccuggacagcggcugcgggaacugggacugcaucaugaccuccuaccaguaccucaucauccagaacacgaccugggaggaccacugccaguucagccggcccucccccaucggcuaccuggggcugcucagccagcgcacccgggacaucuacaucagccgccggcgccggggcaccuucacguggacccuguccgacagcgagggcaacgagacccccgggggcuacugccugacccgcuggaugcucaucgaggccgagcugaagugcuucgggaacacggcgguggccaagugcaacgagaagcacgacgaggaguucugcgacaugcugcggcuguucgacuucaacaagcaggccauccgccggcugaagaccccggcccagauguccauccagcugaucaacaaggccgugaacgcgcucaucaacgaccagcugaucaugaagaaccaccuccgcgacaucaugugcauccccuacugcaacuacagcaaguacugguaccucaaccacaccgucaccggcaagacgucccugccccggugcuggcuggugagcaacggguccuaccucaacgagacccacuucagcgacgacaucgagcagcaggccgacaacaugaucaccgagcugcugcagaaggaguacauggaccgccagggcaagaccccgcucggccugguggaccuguucgucuucuccacgagcuucuaccucaucuccaucuuccugcaccuggugaagauccccacccaccggcacgugaucgggaagcccugccccaagccgcaccgccugaaccacaugggcaucugcagcugcggguucuacaagcaccccggcguccccgugaaguggaagcgguga

SEQ ID NO: 4474 - RNA, 1473 nt, Artificial Sequence
  derived and/or modified protein sequence (opt1) from LASV(LASV969-NIG-2009;Clade II)__AIT17724__GPCstabilized
augggccagaucaucaccuucuuccaggaggugccccacgucaucgaggaggugaugaacaucgugcugaucgcccucagccugcuggccauccucaaggggaucuacaacgucgcgaccugcggccuguucgggcugguguccuuccuccugcugugcggccgcagcugcuccacgaccuacaaggggguguacgagcuccagacccuggagcuggacauggccaaccucaacaugaccaugccgcugagcugcacgaagaacaacucccaccacuacaucauggucggcaacgagaccggccuggagcucacccugaccaacacgagcaucaucaaccacaaguucugcaaccuguccgacgcccacaagaagaaccucuacgaccacgcccugaugagcaucaucuccaccuuccaccugagcauccccaacuucaaccaguacgaggccauguccugcgacuucaacgggggcaagaucagcgugcaguacaaccucucccacaccuacgcgguggacgccgccaaccacugcgggaccgucgccaacggcgugcugcagacguucaugcggauggcguggggcgggagcuacaucgcccuggacuccggcugcgggagcugggacugcaucaugaccuccuaccaguaccucaucauccagaacaccaccugggaggaccacugccaguucagccgccccucccccaucggcuaccuggggcugcucagccagcggacgcgcgacaucuacaucagccggcgccggcgcggcaccuucaccuggacccuguccgacagcgagggcaacgagacgcccgggggcuacugccugacccgguggaugcucaucgaggccgagcugaagugcuucgggaacaccgccguggccaagugcaacgagaagcacgacgaggaguucugcgacaugcugcgccucuucgacuucaacaagcaggcgauccggcgccugaagaccccggcccagauguccauccagcugaucaacaaggccgucaacgcccucaucaacgaccagcugaucaugaagaaccaccuccgggacaucaugugcauccccuacugcaacuacagcaaguacugguaccugaaccacacggugaccggcaagaccucccugccccgcugcuggcuggugagcaacggguccuaccucaacgagacccacuucagcgacgacaucgagcagcaggccgacaacaugaucacggagcugcugcagaaggaguacauggaccggcagggcaagaccccgcucggccuggucgaccuguucguguucuccaccagcuucuaccucaucuccaucuuccugcaccuggugaagauccccacccaccgccacaucauggggaagcccugccccaagccgcaccggcugaaccacaugggcaucugcagcugcgggcucuacaagcaccccggcguccccgugaaguggaagcgcuga

SEQ ID NO: 4475 - RNA, 1473 nt, Artificial Sequence
  derived and/or modified protein sequence (opt1) from LASV(LASV971-NIG-2009;Clade II)__AIT17728__GPCstabilized
augggccagaucaucaccuucuuccaggaggugccccacgucaucgaggaggugaugaacaucgugcugaucgcccucagccugcuggccauccucaaggggaucuacaacgucgcgaccugcggccuguucgggcugguguccuuccuccugcugugcggccgcagcugcuccacgaccuacaaggggguguacgagcuccagacccuggagcuggacaugggcagccucaacaugaccaugccgcuguccugcacgaagaacaacagccaccacuacaucauggucggcaacgagaccgggcuggagcucacccugaccaacacguccaucaucaaccacaaguucugcaaccugagcgacgcccacaagaagaaccucuacgaccacgcccugauguccaucaucagcaccuuccaccuguccauccccaacuucaaccaguacgaggccaugagcugcgacuucaacggcgggaagaucuccgugcaguacaaccucagccacaccuacgccguggacgcggccaaccacugcggcaccaucgccaacgggguccugcagacguucaugcggauggccuggggcggcuccuacaucgcgcuggacagcgggugcggcuccugggacugcaucaugaccagcuaccaguaccucaucauccagaacaccaccugggaggaccacugccaguucucccgccccagccccaucggguaccugggccugcucagccagcggacgcgcgacaucuacaucucccggcgccggcgcggcaccuucaccuggacccugagcgacuccgaggggaacgagacgccgggcggguacugccugacccgguggaugcucaucgaggccgagcugaagugcuucggcaacaccgccguggccaagugcaacgagaagcacgacgaggaguucugcgacaugcugcgccucuucgacuucaacaagcaggccauccggcgccugaagacccccgcgcagaugagcauccagcugaucaacaaggccgugaacgcccucaucaacgaccagcugaucaugaagaaccaccuccgggacaucaugugcauccccuacugcaacuacuccaaguacugguaccugaaccacacggucaccgggaagaccagccugccccgcugcuggcugguguccaacggcagcuaccucaacgagacccacuucuccgacgacaucgagcagcaggccgacaacaugaucacggagcugcugcagaaggaguacauggaccggcagggcaagaccccgcucgggcugguggaccuguucgucuucagcaccuccuucuaccucaucagcaucuuccugcaccuggugaagauccccacccaccgccacgugaucggcaagcccugccccaagccgcaccggcugaaccacauggggaucugcuccugcggccucuacaagcaccccgggguccccgugaaguggaagcgcuga

SEQ ID NO: 4476 - RNA, 1473 nt, Artificial Sequence
  derived and/or modified protein sequence (opt1) from LASV(LASV975-NIG-2009;Clade II)__AIT17732__GPCstabilized
augggccagaucaucaccuucuuccaggaggugccccacgucaucgaggaggugaugaacaucgugcugaucgcccucagccugcuggccauccucaaggggaucuacaacgucgcgaccugcggccuguucgggcugguguccuuccuccugcugugcggccgcagcugcuccacgaccuacaaggggguguacgagcuccagacccuggagcuggacauggccagccucaacaugaccaugccgcuguccugcacgaagaacaacagccaccacuacaucauggucggcaacgagaccggccuggagcucacccugaccaacacguccaucaucaaccacaaguucugcaaccugagcgacgcccacaagaagaaccucuacgaccacgcccugauguccaucaucagcaccuuccaccuguccauccccaacuucaaccaguacgaggccaugagcugcgacuucaacgggggcaagaucuccgugcaguacaaccucagccacaccuacgcgguggacgccgccaaccacugcgggaccaucgccaacggcguccugcagacguucaugcggauggcguggggcggguccuacaucgcccuggacagcggcugcggguccugggacugcaucaugaccagcuaccaguaccucaucauccagaacaccaccugggaggaccacugccaguucucccgccccagccccaucggcuaccuggggcugcucagccagcggacgcgcgacaucuacaucucccggcgccggcgcggcaccuucaccuggacccugagcgacuccgagggcaacgagacgcccgggggcuacugccugacccgguggaugcucaucgaggccgagcugaagugcuucgggaacaccgccguggccaagugcaacgagaagcacgacgaggaguucugcgacaugcugcgccucuucgacuucaacaagcaggcgauccggcgccugaagaccccggcccagaugagcauccagcugaucaacaaggccgugaacgcccucaucaacgaccagcugaucaugaagaaccaccuccgggacaucaugugcauccccuacugcaacuacuccaaguacugguaccugaaccacacggucaccggcaagaccagccugccccgcugcuggcugguguccaacgggagcuaccucaacgagacccacuucuccgacgacaucgagcagcaggccgacaacaugaucacggagcugcugcagaaggaguacaucgaccggcagggcaagaccccgcucggccugguggaccuguucgucuucagcaccuccuucuaccucaucagcaucuuccugcaccuggugaagauccccacccaccgccacaucguggggaagcccugccccaagccgcaccggcugaaccacaugggcaucugcuccugcgggcucuacaagcaccccggcguccccgugaaguggaagcgcuga

SEQ ID NO: 4477 - RNA, 1473 nt, Artificial Sequence
  derived and/or modified protein sequence (opt1) from LASV(LASV976-NIG-2009;Clade II)__AIT17736__GPCstabilized
augggccagaucgugaccuucuuccaggaggucccccacgugaucgaggaggugaugaacaucguccugaucgcccucagccugcuggccauccucaaggggaucuacaacguggcgaccugcggccuguucgggcugguguccuuccuccugcugugcggccgcagcugcuccacgaccuacaagggggucuacgagcuccagacccuggagcuggacauggccagccucaacaugaccaugccgcuguccugcacgaagaacaacagccaccacuacaucauggugggcaacgagaccggccuggagcucacccugaccaacacguccaucaucaaccacaaguucugcaaccugagcgacgcccacaagaaggaccucuacgaccacgcccugauguccaucaucagcaccuuccaccuguccauccccaacuucaaccaguacgaggccaugagcugcgacuucaacgggggcaagaucuccgugcaguacaaccucagccacaccuacgcggucgacgccgccaaccacugcgggaccaucgccaacggcgugcugcagacguucaugcggauggcguggggcggguccuacaucgcccuggacagcggcugcggguccugggacugcaucaugaccagcuaccaguaccucaucauccagaacaccaccugggaggaccacugccaguucucccgccccagccccaucggcuaccuggggcugcucagccagcggacgcgcgacaucuacaucucccggcgccggcgcggcaccuucaccuggacccugagcgacuccgagggcaacgagacgcccgggggcuacugccugacccgguggaugcucaucgaggccgagcugaagugcuucgggaacaccgccguggccaagugcaacgagaagcacgacgaggaguucugcgacaugcugcgccucuucgacuucaacaagcaggcgaucaugcggcugaagaccccggcccagaugagcauccagcugaucaacaaggccgucaacgcccucaucaacgaccagcugaucaugaagaaccaccuccgcgacaucaugugcauccccuacugcaacuacuccaaguacugguaccugaaccacacggugaccggcaagaccagccugccccggugcuggcugguguccaacgggagcuaccucaacgagacccgcuucuccgacgacaucgagcagcaggccgacaacaugaucacggagaugcugcagaaggaguaccuggaccggcagggcaagaccccgcucggccuggucgaccuguucguguucagcaccuccuucuaccucaucagcaucuuccugcaccuggugaagauccccacccaccgccacaucaucgggaagcccugccccaagccgcaccggcugaaccacaugggcaucugcuccugcgggcucuacaagcaccccggcguccccgugaaguggaagcgcuga

SEQ ID NO: 4478 - RNA, 1473 nt, Artificial Sequence
  derived and/or modified protein sequence (opt1) from LASV(LASV978-NIG-2009;Clade II)__AIT17744__GPCstabilized
augggccagaucaucaccuucuuccaggaggugccccacgucaucgaggaggugaugaacaucgugcugaucgcccucagccugcuggccauccucaaggggaucuacaacgucgcgaccugcggccuguucgggcugauguccuuccuccugcugugcggccgcagcugcuccacgaccuacaaggggguguacgagcuccagacccuggagcuggacauggccaaccucaacaugaccaugccgcugagcugcacgaagaacaacucccaccacuacaucauggugggcaacgagaccggccuggagcucacccugaccaacacgagcaucaucaaccacaaguucugcaaccuguccgacgcccacaagaagaaccucuacgaccacgcccugaugagcaucaucuccaccuuccaccugagcauccccaacuucaaccaguacgaggccauguccugcgacuucaacgggggcaagaucagcguccaguacaaccucucccacgcguacgccguggacgccgccaaccacugcgggaccaucgcgaacggcgugcugcagaccuucaugcggauggccuggggcgggagcuacaucgcccuggacuccggcugcgggagcugggacugcaucaugacguccuaccaguaccucaucauccagaacaccagcugggaggaccacugccaguucucccgccccagccccaucggcuaccuggggcugcucagccagcggacccgcgacaucuacaucucccggcgccggcgcggcaccuucacguggacccugagcgacuccgagggcaacgagacccccgggggcuacugccugacccgguggaugcucaucgaggccgagcugaagugcuucgggaacacggccgucgcgaagugcaacgagaagcacgacgaggaguucugcgacaugcugcgccucuucgacuucaacaagcaggccauccggcgccugaagaccccggcccagaugagcauccagcugaucaacaaggccgugaacgcccucaucaacgaccagcugaucaugaagaaccaccuccgggacaucaugugcauccccuacugcaacuacuccaaguacugguaccugaaccacaccgugaccggcaagacgagccugccccgcugcuggcuggucuccaacgggagcuaccucaacgagacccacuucuccgacgacaucgagcagcaggcggacaacaugaucaccgagcugcugcagaaggaguacaucgaccggcagggcaagaccccgcucggccugguggaccuguucguguucagcacguccuucuaccucaucagcaucuuccugcaccuggucaagauccccacccaccgccacgugaucgggaagcccugccccaagccgcaccggcugaaccacaugggcaucugcuccugcgggcucuacaagcaccccggcgugcccgucaaguggaagcgcuga

SEQ ID NO: 4479 - RNA, 1473 nt, Artificial Sequence
  derived and/or modified protein sequence (opt1) from LASV(LASV981-NIG-2009;Clade II)__AIT17752__GPCstabilized
augggccagaucaucaccuucuuccacgaggugccccacgucaucgaggaggugaugaacaucgugcugaucgcccucagccugcuggccauccucaaggggaucuacaacgucgcgaccugcggccuguucgggcugguguccuuccuccugcugugcggccgcagcugcuccacgaccuacaaggggguguacgagcuccagacccuggagcuggacauggccagccucaacaugaccaugccgcuguccugcacgaagaacaacagccaccacuacaucauggucggcaacgagaccggccuggagcucacccugaccaacacguccaucaucaaccacaaguucugcaaccugagcgacgcccacaagaagaaccucuacgaccacgcccugauguccaucaucagcaccuuccaccuguccauccccaacuucaaccaguacgaggccaugagcugcgacuucaacgggggcaagaucuccgugcaguacaaccucagccacaccuacgcgaucgacgccgccaaccacugcgggaccaucgccaacggcgugcugcagacguucaugcggauggcguggggcggguccuacaucgcccuggacagcggcugcggguccugggacugcaucaugaccagcuaccaguaccucaucauccagaacaccaccugggaggaccacugccaguucucccgccccagccccaucggcuaccuggggcugcucagccagcggacgcgcgacaucuacaucucccggcgccggcgcggcaccuucaccuggacccugagcgacuccgagggcaacgagacgcccgggggcuacugccugacccgguggaugcucaucgaggccgagcugaagugcuucgggaacaccgccgucgccaagugcaacgagaagcacgacgaggaguucugcgacaugcugcgccucuucgacuucaacaagcaggcgauccggcgccugaagaccccggcccagaugagcauccagcugaucaacaaggccgugaacgcccucaucaacgaccagcugaucaugaagaaccaccuccgggacaucaugugcauccccuacugcaacuacuccaaguacugguaccugaaccacacggugaccggcaagaccagccugccccgcugcuggcuggucuccaacgggagcuaccucaacgagacccacuucuccgacgacaucgagcagcaggccgacaacaugaucacggagcugcugcagaaggaguacaucgaccggcagggcaagaccccgcucggccugguggaccuguucguguucagcaccuccuucuaccucaucagcaucuuccugcaccuggucaagauccccacccaccgccacgugaucgggaagcccugccccaagccgcaccggcugaaccacaugggcaucugcuccugcgggcucuacaagcaccccggcgugcccgucaaguggaagcgcuga

SEQ ID NO: 4480 - RNA, 1473 nt, Artificial Sequence
  derived and/or modified protein sequence (opt1) from LASV(LASV982-NIG-2009;Clade II)__AIT17756__GPCstabilized
augggccagaucaucaccuucuuccaggaggugccccacgucaucgaggaggugaugaacaucgugcugaucgcccucagccugcuggccauccucaaggggaucuacaacgucgcgaccugcggccuguucgggcugguguccuuccuccugcugugcggccgcagcugcuccaucacguacaaggggguguacgagcuccagacccuggagcuggacauggccagccucaacaugaccaugccgcuguccugcaccaagaacaacagccaccacuacaucauggucggcaacgagacgggccuggagcucacccugaccaacaccuccaucaucaaccacaaguucugcaaccugagcgacgcccacaagaagaaccucuacgaccacgcccugauguccaucaucagcacguuccaccuguccauccccaacuucaaccaguacgaggccaugagcugcgacuucaacgggggcaagaucuccgugcaguacaaccucagccacaccuacgcgguggacgccgccaaccacugcgggaccaucgccaacggcguccugcagaccuucaugcggauggcguggggcggguccuacaucgcccuggacagcggcugcggguccugggacugcaucaugacgagcuaccaguaccucaucauccagaacaccaccugggaggaccacugccaguucucccgccccagccccaucggcuaccuggggcugcucagccagcggacccgcgacaucuacaucucccggcgccggcgcggcacguucaccuggacccugagcgacuccgagggcaacgagacccccgggggcuacugccugacgcgguggaugcucaucgaggccgagcugaagugcuucgggaacaccgccguggccaagugcaacgagaagcacgacgaggaguucugcgacaugcugcgccucuucgacuucaacaagcaggcgauccggcgccugaaggccccggcccagaugagcauccagcugaucaacaaggccgugaacgcccucaucaacgaccagcugaucaugaagaaccaccuccgggacaucaugugcauccccuacugcaacuacuccaaguacugguaccugaaccacaccgucaccggccgcacgagccugccccggugcuggcugguguccaacgggagcuaccucaacgagacccacuucuccgacgacaucgagcagcaggcggacaacaugaucaccgagcugcugcagaaggaguacaucgaccgccagggcaagaccccgcucggccugguggaccuguucgucuucagcacguccuucuaccucaucagcaucuuccugcaccuggugaagauccccacccaccggcacaucaucgggaagcccugccccaagccgcaccgccugaaccacaugggcaucugcuccugcgggcucuacaagcaccccggcgugcccgucaaguggaagcgguga

SEQ ID NO: 4481 - RNA, 1473 nt, Artificial Sequence
  derived and/or modified protein sequence (opt1) from LASV(LASV988-NIG-2009;Clade II)__AIT17758__GPCstabilized
augggccagaucaucaccuucuuccaggaggugccccacgucaucgaggaggugaugaacaucgugcugaucgcccucagccugcuggccauccucaaggggaucuacaacgucgcgaccugcggccuguucgggcugguguccuuccuccugcugugcggccgcagcugcuccacgaccuacaaggggguguacgagcuccagacccuggagcugaacauggccagccucaacaugaccaugccgcuguccugcacgaagaacaacagccaccacuacaucauggucggcaacgagaccggccuggagcucacccugaccaacacguccaucaucaaccacaaguucugcaaccugagcgacgcccacaagcggaaccucuacgaccacgcccugauguccaucaucagcaccuuccaccuguccauccccaacuucaaccaguacgaggccaugagcugcgacuucaacgggggcaagaucuccgugcaguacaaccucagccacaccuacgcgguggacgccgccaagcacugcgggaccaucgccaacggcguccugcagacguucaugcgcauggcguggggcggguccuacaucgcccuggacagcggcugcggguccugggacugcaucaugaccagcuaccaguaccucaucauccagaacaccaccugggaggaccacugcgaguucucccggcccagccccaucggcuaccuggggcugcucagccagcgcacgcgggacaucuacaucucccgccggcgccggggcaccuucaccuggacccugagcgacuccgagggcaacgagacgcccgggggcuacugccugacccgcuggaugcucaucgaggccgagcugaagugcuucgggaacaccgccguggccaagugcaacgagaagcacgacgaggaguucugcgacaugcugcggcuguucgacuucaacaagcaggcgauccgccggcugaaggccccggcccagaugagcauccagcugaucaacaaggccgugaacgcccucaucaacgaccagcugaucaugaagaaccaccuccgcgacaucaugugcauccccuacugcaacuacuccaaguacugguaccucaaccacaccgucacgggcaagaccagccugccccggugcuggcugguguccaacgggagcuaccucaacgagacccacuucuccgacgacaucgagcagcaggcggacaacaugaucaccgagcugcugcagaaggaguacaucgaccgccagggcaagacgccgcucggccugguggaccuguucgucuucagcaccuccuucuaccucaucagcaucuuccugcaccuggugaagauccccacccaccggcacgugaucgggaagcccugccccaagccgcaccgccugaaccacaugggcaucugcuccugcgggcucuacaagcaccccggcguccccgugaaguggaagcgguga

SEQ ID NO: 4482 - RNA, 1473 nt, Artificial Sequence
  derived and/or modified protein sequence (opt1) from LASV(LASV989-NIG-2009;Clade II)__AIT17762__GPCstabilized
augggccagaucaucaccuucuuccaggaggugccccacgucaucgaggaggugaugaacaucgugcugaucgcccucagccugcuggccauccucaaggggaucuacaacgucgcgaccugcggccuguucgggcugguguccuuccuccugcugugcggccgcagcugcuccacgaccuacaaggggguguacgagcuccagacccuggagcuggacauggccagccucaacaugaccaugccgcuguccugcacgaagaacaacagccaccacuacaucauggucggcaacgagaccggccuggagcucacccugaccaacacguccaucaucagccacaaguucugcaaccuguccgacgcccacaagaagaaccucuacgaccacgcccugaugagcaucaucuccaccuuccaccugagcauccccaacuucaaccaguacgaggccauguccugcgacuucaacgggggcaagaucagcgugcaguacaaccucucccacaccuacgcgguggacgccgccaaccacugcgggaccaucgccaacggcguccugcagacguucaugcggauggcguggggcgggagcuacaucgcccuggacuccggcugcgggagcugggacugcaucaugaccuccuaccaguaccucaucauccagaacaccaccugggaggaccacugccaguucagccgccccagccccaucggcuaccuggggcugcucucccagcggacgcgcgacaucuacaucagccggcgccggcgcggcaccuucaccuggacccuguccgacagcgagggcaacgaggcccccgggggcuacugccugacgcgguggaugcucaucgaggccgagcugaagugcuucgggaacaccgccguggcgaagugcaacgagaagcacgacgaggaguucugcgacaugcugcgccucuucgacuucaacaagcaggccauccggcgccugaagaccccggcccagauguccauccagcugaucaacaaggccgugaacgcccucaucaacgaccagcugaucaugaagaaccaccuccgggacaucaugugcauccccuacugcaacuacagccgcuacugguaccugaaccacaccgucacgggcaagaccucccugccccggugcuggcuggugagcaacggguccuaccucaacgagacccacuucagcgacgacaucgagcagcaggcggacaacaugaucaccgagcugcugcagaaggaguacauggaccgccagggcaagacgccgcucggccugguggaccuguucgucuucuccaccagcuucuaccucaucuccaucuuccugcaccuggugaagauccccacccaccggcacgugaucgggaagcccugccccaagccgcaccgccugaaccacaugggcaucugcagcugcgggcucuacaagcaccccggcguccccgugaaguggaagcgguga

SEQ ID NO: 4483 - RNA, 1473 nt, Artificial Sequence
  derived and/or modified protein sequence (opt1) from LASV(LASV991-NIG-2009;Clade II)__AIT17770__GPCstabilized
augggccagaucgugaccuucuuccaggaggucccccacgugaucgaggaggugaugaacaucguccugaucgcccucagccugcuggccauccucaaggggaucuacaacguggcgaccugcggccuguucgggcugguguccuuccuccugcugugcggccgcagcugcuccacgaccuacaagggggucuacgagcuccaggcccuggagcuggacaugagcucccucaacaugaccaugccgcugagcugcaccaagaacaacucccaccacuacaucauggugggcaacgagacgggccuggagcucacccugaccaacaccagcaucauccaccacaaguucugcaaccuguccgacgcccacaagaaggaccucuacgaccacgcccugaugagcaucaucuccacguuccaccugagcauccccaacuucaaccaguacgaggccauguccugcgacuucaacgggggcaagaucagcgugcaguacaaccucucccacaccuacgcggucgacgccgccaaccacugcgggaccaucgccaacggcgugcugcagaccuucaugcggauggcguggggcgggagcuacaucgcccuggacuccggcugcgggggcugggacugcaucaugacgagcuaccaguuccucaucauccagaacaccaccugggaggaccacugccaguucucccgccccagccccaucggguaccugggccugcucagccagcggacccgcgacaucuacaucucccggcgccggcgcggcacguucaccuggacccugagcgacuccgaggggaacgagaccccgggcggguacugccugacgcgguggaugcucaucgaggccgagcugaagugcuucggcaacaccgccguggccaagugcaacgagaagcacgacgaggaguucugcgacaugcugcgccucuucgacuucaacaagcaggcgaucaagcggcugaagacccccgcccagaugagcauccaccugaucaacaaggccgucaacgcccucaucaacgaccagcugaucaugaagaaccaccuccgcgacaucaugugcauccccuacugcaacuacuccaaguacugguaccugaaccacaccgugacggggaagaccagccugccccggugcuggcugguguccaacggcagcuaccucaacgagacccacuucuccgacgacaucgagcagcaggccgacaacaugaucaccgagcugcugcagaaggaguacaucgaccgccagggcaagacgccgcucgggcuggucgaccuguucguguucagcaccuccuucuaccucaucagcaucuuccugcaccuggugaagauccccacccaccggcacgucaucggcaagcccugccccaagccgcaccgccugaaccacauggggaucugcuccugcggccucuacaagcaccccggggugcccgugcgguggaagcgcuga

SEQ ID NO: 4484 - RNA, 1473 nt, Artificial Sequence
  derived and/or modified protein sequence (opt1) from LASV(LASV993-NIG-2009;Clade II)__AIT17778__GPCstabilized
augggccagaucaucaccuucuuccaggaggugccccacgucaucgaggaggugaugaacaucgugcugaucgcccucagccugcuggccauccucaaggggaucuacaacgucgcgaccugcggccuguucgggcugguguccuuccuccugcugugcggccgcagcugcuccacgaccuacaaggggguguacgagcuccagacccuggagcuggacauggccaaccucaacaugaccaugccgcugagcugcacgaagaacaacucccaccacuacaucauggucggcaacgagaccggccuggagcucacccugaccaacacgagcaucaucaaccacaaguucugcaaccuguccgacgcccacaagaagaaccucuacgaccacgcccugaugagcaucaucuccaccuuccaccugagcauccccaacuucaaccaguacgaggccauguccugcgacuucaacgggggcaagaucagcgugcaguacaaccucucccacaccuacgcgcgggacgccgccaaccacugcgggaccaucgccaacggcgugcugcagacguucaugcgcauggcguggggcgggagcuacaucgcccuggacuccggcugcgggagcugggacugcaucaugaccuccuaccaguaccucaucauccagaacaccaccugggaggaccacugccaguucagccggcccucccccaucggcuaccuggggcugcucagccagcgcacgcgggacaucuacaucagccgccggcgccggggcaccuucaccuggacccuguccgacagcgagggcaacgagacgcccgggggcuacugccugacccgcuggaugcucaucgaggccgagcugaagugcuucgggaacaccgccgucgccaagugcaacgagaagcacgacgaggaguucugcgacaugcugcggcuguucgacuucaacaagcaggcgauccgccggcugaagaccccggcccagaugaacauccagcugaucaacaaggccgugaacgcccucaucaacgaccagcugaucaugaagaaccaccuccgcgacaucaugugcauccccuacugcaacuacuccaaguacugguaccucaaccacacggugaccggcaagaccagccugccccggugcuggcuggucuccaacgggagcuaccucaacgagacccacuucuccgacgacaucgagcagcaggccgacaacaugaucacggagcugcugcagaaggaguacauggaccgccagggcaagaccccgcucggccugguggaccuguucguguucagcaccuccuucuaccucaucagcaucuuccugcaccuggucaagauccccacccaccggcacgugaucgggaagcccugccccaagccgcaccgccugaaccacaugggcaucugcuccugcgggcucuacaagcaccccggcgugcccgucaaguggaagcgguga

SEQ ID NO: 4485 - RNA, 1473 nt, Artificial Sequence
  derived and/or modified protein sequence (opt1) from LASV(Nig08-04;Clade II)__ADU56610__GPCstabilized
augggccagaucgugaccuucuuccaggaggucccccacgugaucgaggaggugaugaacaucguccugaucgcccucagccugcuggccauccucaaggggaucuacaacguggcgaccugcggccuguucgggcugaucuccuuccuccugcugugcggccgcagcugcuccacgaccuacaaggggguguacgagcuccagacccuggagcuggacauggccaaccucaacaugaccaugccgcugagcugcacgaagaacuccagccaccacuacaucauggucggcaacgagaccggccuggagcucacccugaccaacacguccaucaucaaccacaaguucugcaaccugagcgacgcccacaagaagaaccucuacgaccacgcccugauguccaucaucagcaccuuccaccuguccauccccaacuucaaccaguacgaggccaugagcugcgacuucaacgggggcaagaucuccgugcaguacaaccucagccacgcguacgccguggacgccgccaaccacugcgggaccaucgcgaacggcguccugcagaccuucaugcggauggccuggggcggguccuacaucgcccuggacagcggcugcgggaacugggacugcaucaugacguccuaccaguaccucaucauccagaacaccaccugggaggaccacugccaguucagccgccccucccccaucggcuaccuggggcugcucagccagcggacccgcgacaucuacaucagccggcgccggcgcggcacguucaccuggacccuguccgacagcgagggcaacgaggcccccgggggcuacugccugacccgguggaugcucaucgaggccgagcugaagugcuucgggaacacggcgaucgccaagugcaacgagaagcacgacgaggaguucugcgacaugcugcgccucuucgacuucaacaagcaggccaucaagcggcugaaggccccggcccagauguccauccagcugaucaacaaggcggugaacgcccucaucaacgaccagcugaucaugaagaaccaccuccgcgacaucaugugcauccccuacugcaacuacagcaaguacugguaccugaaccacaccgugaccggcaagaccucccugccccggugcuggcugaucagcaacggguccuaccucaacgagacgcacuucagcgacgacaucgagcagcaggccgacaacaugaucaccgagcugcugcagaaggaguacauggaccgccagggcaagaccccgcucggccuggucgaccuguucguguucuccaccagcuucuaccucaucuccaucuuccugcaccuggugaagauccccacgcaccggcacaucgucgggcgccccugccccaagccgcaccggcugaaccacaugggcaucugcagcugcgggcucuacaagcaccccggcgugcccgugaaguggaagcgcuga

SEQ ID NO: 4486 - RNA, 1473 nt, Artificial Sequence
  derived and/or modified protein sequence (opt1) from LASV(Nig08-A41;Clade II)__ADU56626__GPCstabilized
augggccagaucaucaccuucuuccaggaggugccccacgucaucgaggaggugaugaacaucgugcugaucgcccucagccugcuggccauccucaaggggaucuacaacgucgcgaccugcggccuguucgggcugguguccuuccuccugcugugcggccgcagcugcuccacgaccuacaaggggguguacgagcuccagacccuggagcugaacauggccagccucaacaugaccaugccgcuguccugcacgaagaacaacagccaccacuacaucauggucggcaacgagaccggccuggagcucacccugaccaacacguccaucaucaaccacaaguucugcaaccugagcgacgcccacaagcggaaccucuacgaccacgcccugauguccaucaucagcaccuuccaccuguccauccccaacuucaaccaguacgaggccaugagcugcgacuucaacgggggcaagaucuccgugcaguacaaccucagccacaccuacgcgguggacgccgccaagcacugcgggaccaucgccaacggcguccugcagacguucaugcgcauggcguggggcggguccuacaucgcccuggacagcggcugcggguccugggacugcaucaugaccagcuaccaguaccucaucauccagaacaccaccugggaggaccacugccaguucucccggcccagccccaucggcuaccuggggcugcucagccagcgcacgcgggacaucuacaucucccgccggcgccggggcaccuucaccuggacccugagcgacuccgagggcaacgagacgcccgggggcuacugccugacccgcuggaugcucaucgaggccgagcugaagugcuucgggaacaccgccguggccaagugcaacgagaagcacgacgaggaguucugcgacaugcugcggcuguucgacuucaacaagcaggcgauccgccggcugaaggccccggcccagaugagcauccagcugaucaacaaggccgugaacgcccucaucaacgaccagcugaucaugaagaaccaccuccgcgacaucaugugcauccccuacugcaacuacuccaaguacugguaccucaaccacaccgucacgggcaagaccagccugccccggugcuggcugguguccaacgggagcuaccucaacgagacccacuucuccgacgacaucgagcagcaggcggacaacaugaucaccgagcugcugcagaaggaguacaucgaccgccagggcaagacgccgcucggccugguggaccuguucgucuucagcaccuccuucuaccucaucagcaucuuccugcaccuggugaagauccccacccaccggcacgugaucgggaagcccugccccaagccgcaccgccugaaccacaugggcaucugcuccugcgggcucuacaagcaccccggcguccccgugaaguggaagcgguga

SEQ ID NO: 4487 - RNA, 1473 nt, Artificial Sequence
  derived and/or modified protein sequence (opt1) from LASV(Nig08-A47;Clade II)__ADU56630__GPCstabilized
augggccagaucaucaccuucuuccaggaggugccccacgucaucgaggaggugaugaacaucgugcugaucgcccucagccugcuggccauccucaaggggaucuacaacgucgcgaccugcggccuguucgggcugguguccuuccuccugcugugcggccgcagcugcuccacgaccuacaaggggguguacgagcuccagacccuggagcuggacauggccagccucaacaugaccaugccgcuguccugcacgaagaacaacagccaccacuacaucauggucggcaacgagaccggccuggagcucacccugaccaacacguccaucaucaaccacaaguucugcaaccugagcgacgcccacaagaagaaccucuacgaccacgcccugauguccaucaucagcaccuuccaccuguccauccccaacuucaaccaguacgaggccaugagcugcgacuucaacgggggcaagaucuccgugcaguacaaccucagccacgcguacgccguggacgccgccaaccacugcgggaccaucgcgaacggcguccugcagaccuucaugcggauggccuggggcggguccuacaucgcccuggacagcggcugcggguccugggacugcaucaugacgagcuaccaguaccucaucauccagaacaccaccugggaggaccacugccaguucucccgccccagccccaucggcuaccuggggcugcucagccagcggacccgcgacaucuacaucucccggcgccggcgcggcacguucaccuggacccugagcgacuccgagggcaacgagacccccgggggcuacugccugacgcgguggaugcucaucgaggccgagcugaagugcuucgggaacaccgccguggcgaagugcaacgagaagcacgacgaggaguucugcgacaugcugcgccucuucgacuucaacaagcaggccauccggcgccugaagaccccggcccagaugagcauccagcugaucaacaaggccgugaacgcccucaucaacgaccagcugaucaugaagaaccaccuccgggacaucaugugcauccccuacugcaacuacuccaaguacugguaccugaaccacaccgucacgggcaagaccagccugccccgcugcuggcugguguccaacgggagcuaccucaacgagacccacuucuccgacgacaucgagcagcaggcggacaacaugaucaccgagcugcugcagaaggaguacauggaccggcagggcaagacgccgcucggccugguggaccuguucgucuucagcaccuccuucuaccucaucagcaucuuccugcaccuggugcgcauccccacccaccggcacgugaucgggaagcccugccccaagccgcaccgccugaaccacaugggcaucugcuccugcgggcucuacaagcaccccggcguccccgugaaguggaagcgguga

SEQ ID NO: 4488 - RNA, 1473 nt, Artificial Sequence
  derived and/or modified protein sequence (opt1) from LASV(CSF;Clade III)__AAL13212__GPCstabilized
augggccagaucgugaccuucuuccaggaggucccccacgugaucgaggagaucaugaacaucgugcugaucacccucagccugcuggccauccucaagggggucuacaaccuggccacgugcggccugaucgggcucaucaccuuccuguuccugugcggccgcuccugcagcaugaccuacaagggguccuaccagcucgagacccuggagcugaacauggagacgcucaacaugaccaugccgcugagcugcaccaagaacaccucccaccacuacauccgggugggcaacgagacgggccuggagcucacccugaccaacaccagcaucaucaaccacaaguucugcaaccuguccgacgcgcacaagaagaaccucuacgaccacagccugauguccaucaucagcacguuccaccuguccauccccaacuucaaccaguacgaggccaugagcugcgacuucaacgggggcaagaucuccauccaguacaaccucagccacaccuacgccggggacgccgccaagcacugcggcacccuggcgaacgggauccugcagaccuucaugcgcauggccuggggcggcuccuacaucgcccucgacagcgggugcggcaacugggacugcaucaugacguccuaccaguaccugaucauccagaacaccaccugggaggaccacugccaguucagccggcccucccccaucggguaccugggccuccugagccagcgcacccgggagaucuacaucagccgccggcgccggggcacguucaccuggacccuguccgacagcgaggggaacgagaacccgggcggguacugccucacccgcuggaugcugaucgaggccgagcugaagugcuucggcaacacggcgguggccaagugcaacgagaagcacgacgaggaguucugcgacaugcuccggcuguucgacuucaacaagcaggccauccagcgccugaaggcccccgcccagauguccauccagcucaucaacaaggcggucaacgcccugaucaacgaccagcugaucaugaagaaccaccuccgggacaucaugugcauccccuacugcaacuacagcaaguacugguaccugaaccacaccaccaccgggcgcacgucccugccccggugcuggcucgugagcaacggcuccuaccugaacgagacccgcuucagcgacgacaucgagcagcaggccgacaacaugaucaccgagaugcugcagaaggaguacaucgaccggcagggcaagaccccgcucgggcugguggaccuguucgucuucuccacgagcuucuaccucaucuccaucuuccugcaccugaucaagauccccacccaccgccacaucgugggcgggcccugccccaagccgcaccggcugaaccacaagggcaucugcagcugcgggcucuacaagcgccccggcguguccguccgguggaagcgcuga

SEQ ID NO: 4489 - RNA, 1473 nt, Artificial Sequence
  derived and/or modified protein sequence (opt1) from LASV(ISTH2121-NIG-2012;Clade III)__AIT17540__GPCstabilized
augggccagaucgugaccuucuuccaggaggucccccacgugaucgaggagaucaugaacaucgugcugaucacccucagccugcuggccauccucaaggggaucuacaacuucgccacgugcggccugaucgggcugaucaccuuccucuuccugugcggccgcuccugcagcaccaucuacaagggguccuaccagcugcagacccucgagcugaacauggagacgcugaacaugaccaugccgcucagcugcaccaagaacaacucccaccacuacauccgggucggcaacgagaccggccuggagcugacgcucaccaacaccagcaucaucaaccacaaguucugcaaccuguccgaggcgcacaagaagaaccuguacgaccacgcccucaugagcaucaucuccaccuuccaccugagcauccccaacuucaaccaguacgaggccauguccugcgacuucaacgggggcaagaucagcgugcaguacaaccugucccacagcuacgccguggacgccgcgaaccacugcgggacggucgccaacggcgugcuccagaccuucaugcgcauggccuggggcggguccuacaucgcccuggacagcggcugcgggaacugggacugcaucaugaccuccuaccaguaccugaucauccagaacaccacgugggaggaccacugccaguucagccggcccucccccaucggcuaccucgggcugcugagccagcgcacccgggacaucuacaucagccgccggcgccggggcaccuucaccuggacgcucuccgacagcgagggcaaggagacccccgggggcuacugccugacccgcuggaugcugaucgaggcggagcucaagugcuucgggaacaccgccguggccaagugcaacgagaagcacgacgaggaguucugcgacaugcugcggcuguucgacuucaacaagcaggccauccagcgccucaagacgccggcccagauguccauccagcugaucaacaaggcggucaacgcccugaucaacgaccagcucaucaugaagaaccaccuccgggacaucaugugcauccccuacugcaacuacagcaaguacugguaccugaaccacaccuccaccggccgcaccagccugcccaagugcuggcugguguccaacgggagcuaccugaacgagacgcacuucuccgacgacaucgagcagcaggccgacaacaugaucaccgagaugcuccagaaggaguacaucgaccggcagggcaagaccccgcugggccugguggaccucuucgucuucagcaccuccuucuaccugaucagcaucuuccugcaccucgugaagauccccacgcaccgccacaucguggggaaguccugccccaagccccaccggcugaaccacaugggcaucugcagcugcgggcuguacaagcagccgggcguccccgugaaguggaagcgcuga

SEQ ID NO: 4490 - RNA, 1473 nt, Artificial Sequence
  derived and/or modified protein sequence (opt1) from LASV(Nig08-A19;Clade III)__ADU56618__GPCstabilized
augggccagaucgugaccuucuuccaggaggucccccacgugaucgaggaggugaugaacaucguccugaucgcccucagcauccuggccauccugaaggggcucuacaacaucgcgaccugcggccugaucgggcuggugacguuccuccugcuguccggccgcagcugcuccaugaccuacaaggggguguacgagcuccagacccuggagcugaacaugaacacccucaacaugacgaugccgcugagcugcaccaagaacaacucccaccacuacaucauggucggcaacgagaccggccuggagcucacccugacgaacaccagccugcuccaccacaaguucugcaaccuguccgacgcccacaagaagaaccuguacgaccacacccucaugagcaucaucuccaccuuccaccugagcauccccaacuucaaccaguacgaggccauguccugcgacuucaacgggggcaagaucacggugcaguacaaccugagccacuccuacgccaucgacgccgcgaaccacugcgggaccguggccaacggcguccuccagaccuucaugcggauggccuggggcgggagcuacaucgcccuggacuccggcugcgggaagugggacugcaucaugaccagcuaccaguaccugaucauccagaacacgaccugggaggaccacugccaguucucccgccccagccccaucggcuaccucgggcugcugucccagcggacccgcgacaucuacaucagccggcgccggcgcggcaccuucacguggacccucagcgacuccgagggcaacgagacccccgggggcuacugccugacccgguggaugcugaucgaggcggagcucaagugcuucgggaacacggccguggccaagugcaacgagaagcacgacgaggaguucugcgacaugcugcgccuguucgacuucaacaagcaggccauccggcgccucaaggccccggcgcagaugagcauccagcugaucaacaaggccgugaacgcccugaucaacgaccagcucaucaugaagaaccaccuccgggacaucaugugcauccccuacugcaacuacuccaaguacugguaccugaaccacaccagcaccggccgcaccucccugccccggugcuggcuggucagcaacggguccuaccugaacgagacgcacuucagcgacgacaucgagcagcaggccgacaacaugaucaccgagaugcuccagaaggaguaccuggaccgccagggcaagaccccgcugggccucguggaccuguucguguucuccaccagcuucuaccugaucuccaucuuccugcaccucgucaagauccccacgcaccggcacaucguggggaagcccugccccaagccgcaccgccugaaccacaugggcaucugcagcugcgggcuguacaagcagcccggcgugcccguccgguggaagcgcuga

SEQ ID NO: 4491 - RNA, 1473 nt, Artificial Sequence
  derived and/or modified protein sequence (opt1) from LASV(ONM-299;Clade III)__ANH09734__GPCstabilized
augggccagaucgugaccuucuuccaggaggucccccacgugaucgaggagaucaugaacaucgugcugaucacccucagccugcuggccauccucaaggggcuguacaacuucgccacgugcggccugaucgggcucaucaccuuccuguuccugugcggccgcuccugcagcaugaucuacaagggguccuaccagcucgagacccuggagcugaacauggagacccucaacaugacgaugccgcugagcugcaccaagaacaacucccaccacuacauccgggucggcaacgagaccggccuggagcucacccugacgaacaccagcaucaucgggcacaaguucugcaaccuguccgacgcgcacaagaagaaccucuacgaccacagccugauguccaucaucagcaccuuccaccuguccauccccaacuucaaccaguacgaggccaugagcugcgacuucaacggcgggaagaucuccauccaguacaaccucagccacaccuacgccggcgacgccgccaagcacugcgggacgguggcgaacggcgugcugcagaccuucaugcgcauggccuggggcggguccuacaucgcccuggacagcggcugcgggaacugggacugcaucaugaccuccuaccaguaccucaucauccagaacaccacgugggaggaccacugccaguucagccggcccucccccaucggcuaccugggccugcucagccagcgcacccgggacaucuacaucagccgccggcgccgggggaccuucaccuggacgcuguccgacagcgagggcaaggagacccccgggggcuacugccugacccgcuggaugcucaucgaggccgagcugaagugcuucgggaacaccgcggucgccaagugcaacgagaagcacgacgaggaguucugcgacaugcugcggcuguucgacuucaacaagcaggccauccagcgccugaagacgccggcccagauguccauccagcugaucaacaaggccgugaacgcgcucaucaacgaccagcugaucaugaagaaccaccuccgggacaucaugugcauccccuacugcaacuacagcaaguacugguaccucaaccacaccuccaccggccgcaccagccugcccaagugcuggcugguguccaacggcagcuaccucaacgagacgcacuucuccgacgacaucgagcagcaggccgacaacaugaucaccgagaugcugcagaaggaguacaucgaccggcaggggaagaccccgcugggccucgucgacguguucguguucagcaccuccuucuaccugaucagcaucuuccugcaccucgucaagauccccacgcaccgccacaucguggggaaguccugccccaagccccaccggcugaaccacaugggcaucugcagcugcgggcuguacaagcagccgggcgugcccguccgcuggaagcgguga

SEQ ID NO: 4492 - RNA, 1473 nt, Artificial Sequence
  derived and/or modified protein sequence (opt1) from LASV(ONM-700;Clade III)__ANH09738__GPCstabilized
augggccagaucgugaccuucuuccaggaggucccccacgugaucgaggagaucaugaacaucgugcugaucacccucagccugcuggccauccucaaggggcuguacaacuucgccacgugcggccugaucgggcucaucaccuuccuguuccugugcggccgcuccugcagcaugaucuacaagggguccuaccagcucgagacccuggagcugaacauggagacccucaacaugacgaugccgcugagcugcaccaagaacaacucccaccacuacauccgggucggcaacgagaccggccuggagcucacccugacgaacaccagcaucaucaaccacaaguucugcaaccuguccgacgcgcacaagcgcaaccucuacgaccacagccugauguccaucaucagcaccuuccaccuguccauccccaacuucaaccaguacgaggccaugagcugcgacuucaacgggggcaagaucuccauccaguacaaccucagccacaccuacgccggggacgccgccaagcacugcggcacgguggcgaacggggugcugcagaccuucaugcggauggccuggggcggcuccuacaucgcccuggacagcgggugcggcaacugggacugcaucaugaccuccuaccaguaccucaucauccagaacaccacgugggaggaccacugccaguucagccgccccucccccaucggguaccugggccugcucagccagcggacccgcgacaucuacaucagccggcgccggcgcggcaccuucaccuggacgcuguccgacagcgaggggaaggagaccccgggcggguacugccugacccgguggaugcucaucgaggccgagcugaagugcuucggcaacaccgcggucgccaagugcaacgagaagcacgacgaggaguucugcgacaugcugcgccucuucgacuucaacaagcaggccauccagcggcugaagacgcccgcccagauguccauccagcugaucaacaaggccgugaacgcgcucaucaacgaccagcugaucaugaagaaccaccuccgcgacaucaugugcauccccuacugcaacuacagcaaguacugguaccugaaccacaccuccaccgggcggaccagccugcccaagugcuggcugguguccaacggcagcuaccucaacgagacgcacuucuccgacgacaucgagcagcaggccgacaacaugaucaccgagaugcugcagaaggaguacaucgaccgccagggcaagaccccgcuggggcucgucgacguguucauguucagcaccuccuucuaccugaucagcaucuuccugcaccucgugaagauccccacgcaccggcacaucgucggcaaguccugccccaagccccaccgccugaaccacauggggaucugcagcugcggccuguacaagcagccgggggugcccgugcgguggaagcgcuga

SEQ ID NO: 4493 - RNA, 1473 nt, Artificial Sequence
  derived and/or modified protein sequence (opt1) from LASV(Weller;Clade III)__AAT49010__GPCstabilized
augggccagaucgugaccuucuuccaggaggucccccacgugaucgaggaggugaugaacaucguccugaucgcccucagcgugcuggccauccugaaggggcucuacaacuucgcgaccugcggccugaucgggcuggugacguuccuccugcuguccggccgcagcugcuccaugaucuacaagggggucuacgagcuccagacccuggagcugaacauggagacccucaacaugaccaugccgcugagcugcacgaagaacaccucccaccacuacauccgggugggcaacgacaccggccuggagcucacccugacgaacgagacccugcuccaccacaaguucugcaaccugagcgacgcccacaagcgcaaccuguacgaccacgcccucauguccaucaucagcaccuuccaccuguccauccccaacuucaaccaguacgaggccaugagcugcgacuucaacgggggcaagaucaccgugcaguacaaccugucccacagcuacgccgucgacgcggccaagcacugcgggacgguggccaacggcgugcuccagaccuucaugcggauggccuggggcggguccuacaucgcgcuggacagccgcugcggcaacugggacugcaucaugaccuccuaccaguaccugaucauccagaacaccacgugggaggaccacugccaguucagccggcccucccccaucggguaccucggccugcugagccagcgcacccgggacaucuacaucucccgccggcgccgggggaccuucaccuggacgcucagcgacagcgagggcaacgagaccccgggcggguacugccugacccgcuggaugcugaucgaggccgagcucaagugcuucggcaacaccgccgucgccaagugcaacgagaagcacgacgaggaguucugcgacaugcugcggcuguucgacuucaacaagcaggccauccgccggcucaagacgcccgcgcagauguccauccagcugaucaacaaggccgugaacgcccugaucaacgaccagcucaucaugaagaaccaccuccgcgacaucaugugcauccccuacugcaacuacagcaaguacugguaccugaaccacaccuccaccgggaagaccagccugccccggugcuggcugguguccaacggcagcuaccugaacgagacgcacuucuccgacgacaucgagcagcaggccgacaacaugaucaccgagaugcuccagaaggaguaccuggaccgccaggggaagaccccgcugggccucgucgaccuguucguguucagcaccuccuucuaccugaucagcaucuuccugcaccucaucaagauccccacgcaccggcacaucgugggcaagcccugccccaagccgcaccgccugaaccacauggggaucugcuccugcggccuguacaagcagcccgggguccccgugcgguggaagcgcuga

SEQ ID NO: 4494 - RNA, 1476 nt, Artificial Sequence
  derived and/or modified protein sequence (opt1) from LASV(BA366;Clade IV)__ADI39451__GPCstabilized
augggccagaucgugaccuucuuccaggaggucccccacgugaucgaggaggugaugaacaucguccugaucgcccucagcgugcuggccgugcugaaggggcucuacaacgucgcgaccugcggccugaucgggcugaucgccuuccuccugcugugcggccgcuccugcacgaccacccucuacaaggggguguacgagcugcaggcccuggagcucaacauggagacccugaacaugacgaugccgcugagcugcaccaagaacaacucccaccacuacaucauggugggcaacgagaccggccucgagcugacccugacgaacaccagcaucaucaaccacaaguucugcaaccucuccgacgcccacaagaagaaccuguacgaccacgcccugaugagcaucaucuccaccuuccaccucagcauccccaacuucaaccaguacgaggcgauguccugcgacuucaacgggggcaagaucagcguccaguacaaccugucccacaccuacgccguggacgccgccaaccacugcgggacgguggcgaacggcguccugcagaccuucaugcggauggccuggggcgggagcuacaucgcccucgacuccggcugcgggagcugggacugcaucaugaccuccuaccaguaccugaucauccagaacaccacgugggaggaccacugccaguucagccgccccucccccaucggcuaccuggggcuccugagccagcggacccgcgacaucuacaucucccggcgccggcgcggcaccuucaccuggacgcugagcgacagcgagggcaaggacacccccgggggcuacugccucacccgguggaugcugaucgaggccgagcugaagugcuucgggaacaccgccguggcgaagugcaacgagaagcacgacgaggaguucugcgacaugcuccgccuguucgacuucaacaagcaggccauccagcggcugaaggccccggcccagauguccauccagcucaucaacaaggccgugaacgcgcugaucaacgaccagcugaucaugaagaaccaccuccgcgacaucaugugcauccccuacugcaacuacagcaaguacugguaccugaaccacacgaucaccggccggaccucccugcccaagugcuggcucgucagcaacggguccuaccugaacgagacccacuucagcgacgacaucgagcagcaggccgacaacaugaucacggagaugcugcagaaggaguacaucgagcgccagggcaagaccccgcucggccugguggaccuguucguguucuccaccagcuucuaccucaucuccaucuuccugcaccugaucaagauccccacccaccggcacaucgucaacaagcccugccccaagccgcaccgccugaaccacaugggggugugcagcugcggccucuacaagcagcccggggugcccguccgguggaagcgcuga

SEQ ID NO: 4495 - RNA, 1476 nt, Artificial Sequence
  derived and/or modified protein sequence (opt1) from LASV(G1180-SLE-2010;Clade IV)__AIT17168__GPCstabilized
augggccagaucgugaccuucuuccaggaggucccccacgugaucgaggaggugaugaacaucguccugaucgcccucagcauccuggccgugcugaaggggcucuacaacuucgcgaccugcggccugguggggcugcucacguuccugcugcucugcggccgcuccugcaccgccagccgguacaagggggucuacgagcugcagacccuggagcucaacauggagacccugaacaugacgaugccgcuguccugcaccaagaacaacagccaccacuacaucauggugggcaacgagaccggccucgagcugacccugacgaacaccuccaucaucaaccacaaguucugcaaccucagcgacgcccacaagaagaaccuguacgaccacgcccugauguccaucaucagcaccuuccaccucuccauccccaacuucaaccaguacgaggccaugagcugcgacuucaacgggggcaagaucuccgugcaguacaaccugagccacuccuacgcgggggacgccgccaaccacugcggcaccgucgccaacggggugcugcagacguucaugcgcauggcguggggcggcagcuacaucgcccucgacuccgggugcggcagcugggacugcaucaugaccuccuaccaguaccugaucauccagaacaccaccugggaggaccacugccaguucagccggcccucccccaucggguaccugggccuccugagccagcgcacgcgggacaucuacaucagccgccggcgccggggcaccuucaccuggacccuguccgacagcgaggggaaggacacgccgggcggguacugccucacccgcuggaugcugaucgaggccgagcugaagugcuucggcaacaccgccguggccaagugcaacgagaagcacgacgaggaguucugcgacaugcuccggcuguucgacuucaacaagcaggcgauccagcgccugaaggcccccgcccagauguccauccagcucaucaacaaggccgucaacgcccugaucaacgaccagcugaucaugaagaaccaccuccgggacaucaugugcauccccuacugcaacuacagcaaguacugguaccugaaccacaccacgaccgggaagaccucccugcccaagugcuggcucgugagcaacggcuccuaccugaacgagacccacuucagcgacgacaucgagcagcaggcggacaacaugaucacggagaugcugcagaaggaguacauggagcgccagggcaagaccccgcucgggcugguggaccuguucgucuucuccaccagcuucuaccucaucuccaucuuccugcaccuggugaagauccccacccaccggcacaucgugggcaagagcugccccaagccccaccgccugaaccacauggggaucugcuccugcggccucuacaagcagccggggguccccgugaaguggaagcgguga

SEQ ID NO: 4496 - RNA, 1476 nt, Artificial Sequence
  derived and/or modified protein sequence (opt1) from LASV(G1190-SLE-2010;Clade IV)__AIT17172__GPCstabilized
augggccagaucgugaccuucuuccaggaggucccccacgugaucgaggaggugaugaacaucguccugaucgcccucagcauccuggccgugcugaaggggcucuacaacuucgcgaccugcggccugguggggcuggucacguuccuccugcugugcggccgcuccugcaccaccagccucuacaaggggguguacgagcugcagacccuggagcucaacauggagacgcugaacaugaccaugccgcuguccugcaccaagaacaacagccaccacuacaucauggugggcaacgagaccggccucgagcugacgcugaccaacaccuccaucaucaaccacaaguucugcaaccucagcgacgcccacaagaagaaccuguacgaccacgcccugauguccaucaucagcaccuuccaccucuccauccccaacuucaaccaguacgaggccaugagcugcgacuucaacgggggcaagaucuccguccaguacaaccugagccacuccuacgccggggacgcggccaaccacugcggcacgguggccaacggggugcugcagaccuucaugcggauggccuggggcggcagcuacaucgcgcucgacuccgggugcggccgcugggacugcaucaugaccagcuaccaguaccugaucauccagaacaccacgugggaggaccacugccaguucucccggcccagccccaucggguaccugggccuccugucccagcgcacccgggacaucuacaucagccgccggcgccggggcaccuucaccuggacgcugagcgacuccgaggggaaggacaccccgggcggguacugccucacccgcuggaugcugaucgaggccgagcugaagugcuucggcaacaccgccgucgccaagugcaacgagaagcacgacgaggaguucugcgacaugcuccggcuguucgacuucaacaagcaggccauccagcgccugaaggcgcccgcccagaugagcauccagcucaucaacaaggccgugaacgcccugaucaacgaccagcugaucaugaagaaccaccuccgggacaucaugugcauccccuacugcaacuacuccaaguacugguaccugaaccacacgaccaccgggaagaccagccugcccaagugcuggcucguguccaacggcagcuaccugaacgagacgcacuucuccgacgacaucgagcagcaggccgacaacaugaucaccgagaugcugcagaaggaguacauggagcgccagggcaagaccccgcucgggcuggucgaccuguucguguucagcaccuccuucuaccucaucagcaucuuccugcaccuggugaagauccccacgcaccggcacaucgucggcaagcccugcccccgcccgcaccggcugaaccacauggggaucugcuccugcggccucuacaagcagcccggggugcccgugaaguggaagcgcuga

SEQ ID NO: 4497 - RNA, 1476 nt, Artificial Sequence
  derived and/or modified protein sequence (opt1) from LASV(G1200-LIB-2010;Clade IV)__AIT17176__GPCstabilized
augggccagaucgugaccuucuuccaggaggucccccacgugaucgaggaggugaugaacaucguccugaucgcccucagccugcuggccgugcucaaggggcuguacaacguggcgaccugcggccugaucgggcucaucacguuccugcugcucugcggccgcuccugcaccaccaaccuguacaagggggucuacgagcugcaggcccucgagcugaacauggagacccugaacaugacgaugccgcucagcugcaccaagaacaacucccaccacuacaucauggugggcaacgagaccggccuggagcugacccucacgaacaccagcaucaucaaccacaaguucugcaaccuguccgacgcccacaagaagaaccuguacgaccacgcccucaugagcaucaucuccaccuuccaccugagcauccccaacuucaaccaguacgaggccauguccugcgacuucaacgggggccggaucagcgugcaguacaaccugucccacagcuacgcgggggacgccgccucccacugcggcaccaucgccaacgggguccuccagacguucaugcgcauggcguggggcggcagcuacaucgcccuggacuccgggugcggcgggugggacugcaucaugaccagcuaccaguaccugaucauccagaacaccaccugggaggaccacugccaguucucccggcccagccccaucggcuaccucggccugcugucccagcgcacgcgggacaucuacaucagccgccggcgccgggggaccuucaccuggacccucagcgacuccgagggcaaggacacgcccgggggcuacugccugacccgcuggaugcugaucgaggccgagcucaagugcuucgggaacaccgccguggccaagugcaacgagaagcacgacgaggaguucugcgacaugcugcggcuguucgacuucaacaagcaggcgauccagcgccucaaggccccggcccagaugagcauccagcugaucaacaaggccgugaacgcccugaucaacgaccagcucaucaugaagaaccaccuccgggacaucaugugcauccccuacugcaacuacuccaaguacugguaccugaaccacaccgucacgggcaagaccagccugcccaagugcuggcugguguccaacggcagcuaccugaacgagacccacuucuccgacgacaucgagcagcaggcggacaacaugaucaccgagaugcuccagaaggaguacauggagcgccaggggaagacgccgcugggccugguggaccucuucgucuucagcaccuccuucuaccugaucagcaucuuccugcaccuggugaagauccccacccaccggcacguggucgggaagcccugccccaagccgcaccgccucaaccacaugggcaucugcuccugcgggcuguacaagcagcccggcgugcccgugcgguggaagcgcuga

SEQ ID NO: 4498 - RNA, 1476 nt, Artificial Sequence
  derived and/or modified protein sequence (opt1) from LASV(G1442-SLE-2011;Clade IV)__AIT17180__GPCstabilized
augggccagaucgugaccuucuuccaggaggucccccacgugaucgaggaggugaugaacaucguccugaucgcccucagcauccuggccgugcugaaggggcucuacaacguggcgaccugcggccugaucgggcuggucacguuccuccugcugugcggccgcuccugcaccaccacccucuacaaggggguguacgagcugcagacgcuggagcucaacauggagacccugaacaugaccaugccgcugagcugcaccaagaacaacucccaccacuacauccgggugggcaacgagacgggccucgagcugacccugaccaacaccagcaucaucaaccacaaguucugcaaccucuccgacgcccacaagaagaaccuguacgaccacgcccugaugagcaucaucuccacguuccaccucagcauccccaacuucaaccaguacgaggccauguccugcgacuucaacgggggcaagaucagcguccaguacaaccugucccacagcuacgccggggacgcggccaaccacugcggcaccguggccaacggggugcugcagaccuucaugcgcauggccuggggcggcuccuacaucgcgcucgacagcgggugcggcaacugggacugcaucaugaccuccuaccaguaccugaucauccagaacacgaccugggacgaccacugccaguucagccggcccucccccaucggguaccugggccuccugagccagcgcacccgggacgucuacaucucccgccggcgccggggcaccuucacguggacccugagcgacagcgaggggaaggacaccccgggcggguacugccucacccgcuggaugcugaucgaggccgagcugaagugcuucggcaacacggccguggccaagugcaacgagaagcacgacgaggaguucugcgacaugcuccggcuguucgacuucaacaagcaggccauccagcgccugaaggcgcccgcccagauguccauccagcucaucaacaaggccgugaacgcccugaucaacgaccagcugaucaugaagaaccaccuccgggacaucaugugcauccccuacugcaacuacagcaaguacugguaccugaacaacaccgccaccgggaagaccucccugcccaagugcuggcucaucagcaacggcuccuaccugaacgagacgcacuucagcgacgacaucgagcaggaggcggacaacaugaucaccgagaugcugcagaaggaguacauggagcgccagggcaagaccccgcucgggcuggucgaccuguucguguucuccaccagcuucuaccucaucuccaucuuccugcaccuggugaagauccccacgcaccggcacaucgucggcaagagcugccccaagccccaccgccugaaccacauggggaucugcuccugcggccucuacaagcagccgggggugcccgugcgguggaagcgcuga

SEQ ID NO: 4499 - RNA, 1476 nt, Artificial Sequence
  derived and/or modified protein sequence (opt1) from LASV(G1529-SLE-2011;Clade IV)__AIT17184__GPCstabilized
augggccagaucgugaccuucuuccaggaggucccccacgugaucgaggaggugaugaacaucguccugaucgcccucagcauccuggccgugcugaaggggcucuacaacguggcgaccugcggccugaucgggcuggucacguuccuccugcugugcggccgcuccugcaccaccacccucuacaaggggguguacgagcugcaggcccuggagcucaacauggagacgcugaacaugaccaugccgcugagcugcaccaagaacaacucccaccacuacauccgggugggcaacgagaccggccucgagcugacgcugaccaacaccagcaucaucgaccacaaguucugcaaccucuccgacgcccacaagaagaaccuguacgaccacgcccugaugagcaucaucuccaccuuccaccucagcauccccaacuucaaccaguacgaggccauguccugcgacuucaacgggggcaagaucagcguccaguacaaccugucccacagcuacgcgggggacgccgccaaccacugcggcacgguggccaacggggugcugcagaccuucaugcgcauggcguggggcggcuccuacaucgcccucgacagcgggugcaacggcugggacugcaucaugaccuccuaccaguaccugaucauccagaacaccacgugggacgaccacugccaguucagccggcccucccccaucggguaccugggccuccugagccagcgcacccgggacaucuacaucucccgccggcgccggggcaccuucaccuggacgcugagcgacagcgaggggaaggacaccccgggcggguacugccucacccgcuggaugcugaucgaggccgagcugaagugcuucggcaacaccgccgucgccaagugcaacgagaagcacgacgaggaguucugcgacaugcuccggcuguucgacuucaacaagcaggcgauccgccggcugaaggcccccgcccagauguccauccagcucaucaacaaggccgugaacgcccugaucaacgaccagcugaucaugaagaaccaccuccgcgacaucaugugcauccccuacugcaacuacagcaaguacugguaccugaacaacacggcgaccgggaagaccucccugccccggugcuggcucgugagcaacggcuccuaccugaacgagacccacuucagcgacgacaucgagcagcaggccgacaacaugaucacggagaugcugcagcgcgaguacauggagcggcagggcaagaccccgcucgggcuggucgaccuguucguguucuccaccagcuucuaccucaucuccaucuuccugcaccuggugaagauccccacccaccgccacaucgucggcaagcccugccccaagccgcaccggcugaaccacauggggaucugcagcugcggccucuacaagcagcccggggugcccgugaaguggaagcgcuga

SEQ ID NO: 4500 - RNA, 1476 nt, Artificial Sequence
  derived and/or modified protein sequence (opt1) from LASV(G1618-SLE-2011;Clade IV)__AIT17188__GPCstabilized
augggccagaucgugaccuucuuccaggaggucccccacgugaucgaggaggugaugaacaucguccugaucgcccucagcauccuggccgugcugaaggggcucuacaacuucgcgaccugcggcuucguggggcuggucuccuuccugcuccugugcggccgcagcugcacgaccucccuguacaaggggguguacgagcuccagacccuggagcugaacauggagacccucaacaugacgaugccgcugagcugcaccaagaacaacucccaccacuacaucauggugggcaacgagaccggccuggagcucacccugacgaacaccagcaucaucaaccacaaguucugcaaccuguccgacgcccacaagaagaaccucuacgaccacgcccugaugagcaucaucuccaccuuccaccugagcauccccaacuucaaccaguacgaggccauguccugcgacuucaacgggggcaagaucagcguccaguacaaccucucccacagcuacgccguggacgcggccaaccacugcgggaccguggccaacggcguccugcagacguucaugcggauggccuggggcggguccuacaucgcgcuggacagcggcugcggguccugggacugcaucaugaccagcuaccaguaccucaucauccagaacaccaccugggaggaccacugccaguucucccgccccagccccaucggcuaccuggggcugcucagccagcggacgcgcgacaucuacaucucccggcgccggcgcggcaccuucaccuggacccugagcgacuccgagggcaaggacacgcccgggggcuacugccugacccgguggaugcucaucgaggccgagcugaagugcuucgggaacaccgccguggccaagugcaacgagaagcacgacgaggaguucugcgacaugcugcgccucuucgacuucaacaagcaggccauccagcggcugcgcgcgccggcccagaugagcauccagcugaucaacaaggccgugaacgcccucaucaacgaccagcugaucaugaagaaccaccuccgggacaucaugugcauccccuacugcaacuacuccaaguacugguaccugaaccacaccacgaccggccgcaccagccugcccaagugcuggcuggucuccaacgggagcuaccucaacgagacccacuucuccgacgacaucgagcagcaggccgacaacaugaucacggagaugcugcagaaggaguacauggagcggcagggcaagaccccgcugggccucguggaccuguucguguucagcaccuccuucuaccugaucagcaucuuccuccaccuggucaagauccccacccaccgccacaucguggggaaguccugccccaagccccaccggcugaaccacaugggcaucugcagcugcgggcuguacggccagccgggggugcccgucaaguggaagcgcuga

SEQ ID NO: 4501 - RNA, 1476 nt, Artificial Sequence
  derived and/or modified protein sequence (opt1) from LASV(G1646-SLE-2011;Clade IV)__AIT17192__GPCstabilized
augggccagaucgugaccuucuuccaggaggucccccacgugaucgaggaggugaugaacaucguccugaucgcccucagcauccuggccgugcugaaggggcucuacaacuucgcgaccugcggcuucaucgggcugguguccuuccugcuccugugcggccgcagcugcacgaccucccuguacaagggggucuacgagcuccagacccuggagcugaacauggagacccucaacaugacgaugccgcugagcugcaccaagaacaacucccaccacuacaucauggugggcaacgagaccggccuggagcucacccugacgaacaccagcaucaucaaccacaaguucugcaaccuguccgacgcccacaagaagaaccucuacgaccacgcccugaugagcaucaucuccaccuuccaccugagcauccccaacuucaaccaguucgaggccauguccugcgacuucaacgggggcaagaucagcgugcaguacaaccucucccacagcuacgccgucgacgcggccaaccacugcgggaccguggccaacggcgugcugcagacguucaugcggauggccuggggcggguccuacaucgcgcuggacagcggcugcggguccugggacugcaucaugaccagcuaccaguaccucaucauccagaacaccaccugggaggaccacugccaguucucccgccccagccccaucggcuaccuggggcugcucagccagcggacgcgcgacaucuacaucucccggcgccggcgcggcaccuucaccuggacccugagcgacuccgagggcaaggacacgcccgggggcuacugccugacccgguggaugcucaucgaggccgagcugaagugcuucgggaacaccgccgucgccaagugcaacgagaagcacgacgaggaguucugcgacaugcugcgccucuucgacuucaacaagcaggccauccagcggcugaaggcgccggcccagaugagcauccagcugaucaacaaggccgugaacgcccucaucaacgaccagcugaucaugaagaaccaccuccgcgacaucaugugcauccccuacugcaacuacuccaaguacugguaccugaaccacaccacgaccggccggaccagccugcccaagugcuggcugguguccaacgggagcuaccucaacgagacccacuucuccgacgacaucgagcagcaggccgacaacaugaucacggagaugcugcagaaggaguacauggagcgccagggcaagaccccgcugggccucgucgaccuguucguguucagcaccuccuucuaccugaucagcaucuuccuccaccuggugaagauccccacccaccggcacaucgucgggaaguccugccccaagccccaccgccugaaccacaugggcaucugcagcugcgggcuguacggccagccgggggugcccgugaaguggaagcgguga

SEQ ID NO: 4502 - RNA, 1476 nt, Artificial Sequence
  derived and/or modified protein sequence (opt1) from LASV(G1647-SLE-2011;Clade IV)__AIT17196__GPCstabilized
augggccagaucgugaccuucuuccaggaggucccccacgugaucgaggaggugaugaacaucguccugaucgcccucagcauccuggccgugcugaaggggcucuacaaccuggcgaccugcggccugguggggcucgucacguuccugcugcucugcggccgcuccugcaccaccagccuguacaaggggguguacgagcugcagacccucgagcugaacauggagacgcugaacaugaccaugccgcucuccugcaccaagaacaacagccaccacuacaucauggugggcaacgagaccggccuggagcugacgcucaccaacaccuccaucaucaaccacaaguucugcaaccugagcgacgcccacaagaagaaccuguacgaccacgcccucauguccaucaucagcaccuuccaccuguccauccccaacuucaaccaguacgaggccaugagcugcgacuucaacgggggcaagaucuccguccaguacaaccugagccacuccuacgccggggacgcggccaaccacugcggcacgguggccaacggggugcuccagaccuucaugcggauggccuggggcggcagcuacaucgcgcuggacuccgggugcggccgcugggacugcaucaugaccagcuaccaguaccugaucauccagaacaccacgugggaggaccacugccaguucucccggcccagccccaucggguaccucggccugcugucccagcgcacccgggacaucuacaucagccgccggcgccggggcaccuucaccuggacgcucagcgacuccgaggggaaggacaccccgggcggguacugccugacccgcuggaugcugaucgaggccgagcucaagugcuucggcaacaccgccgucgccaagugcaacgagaagcacgacgaggaguucugcgacaugcugcggcuguucgacuucaacaagcaggccauccagcgccucaaggcgcccgcccagaugaacauccagcugaucaacaaggccgugaacgcccugaucaacgaccagcucaucaugaagaaccaccuccgggacaucaugugcauccccuacugcaacuacagcaaguacugguaccugaaccacacgaccaccgggaagaccucccugccccgcugcuggcuggugagcaacggcuccuaccugaacgagacgcacuucagcgacgacaucgagcagcaggccgacaacaugaucaccgagaugcuccagaaggaguacauggagcggcagggcaagaccccgcuggggcuggucgaccucuucguguucuccaccagcuucuaccugaucuccaucuuccugcaccuggugaagauccccacgcaccgccacaucgucggcaagcccugccccaagccgcaccggcucaaccacauggggaucugcagcugcggcuucuacaagcagcccggggugcccgugaaguggaagcgcuga

SEQ ID NO: 4503 - RNA, 1476 nt, Artificial Sequence
  derived and/or modified protein sequence (opt1) from LASV(G1774-SLE-2011;Clade IV)__AIT17204__GPCstabilized
augggccagaucgugaccuucuuccaggaggucccccacgugaucgaggaggugaugaacaucguccugaucgcccucagcauccuggccgugcugaaggggcucuacaaccuggcgaccugcggccugguggggcucgucacguuccugcugcucugcggccgcuccugcaccagcucccuguacaaggggguguacgagcugcagacccucgagcugaacauggagacccugaacaugacgaugccgcucagcugcaccaagaacuccagccaccacuacauccgggugggcaacgagaccggccuggagcugacccucacgaacaccuccaucaucaaccacaaguucugcaaccugagcgacgcccacaagaagaaccuguacgaccacgcccucauguccaucaucagcaccuuccaccuguccauccccaacuucaaccaguacgaggccaugagcugcgacuucaacgggggcaagaucuccguccaguacaaccugagccacuccuacgccggggacgcggccaaccacugcggcaccguggccaacggggugcuccagacguucaugcgcauggccuggggcggcagcuacaucgcgcuggacuccgggugcgaccggugggacugcaucaugaccagcuaccaguaccugaucauccagaacaccaccugggaggaccacugccaguucucccgccccagccccaucggcuaccucgggcugcugagccagcggacgcgcgacaucuacaucucccggcgccggcgcggcaccuucaccuggacccucagcgacuccgagggcaaggacacgcccgggggcuacugccugacccgguggaugcugaucgaggccgagcucaagugcuucgggaacaccgccgucgccaagugcaacgagaagcacgacgaggaguucugcgacaugcugcgccuguucgacuucaacaagcaggccauccagcggcucaaggcgccggcccagaugagcauccagcugaucaacaaggccgugaacgcccugaucaacgaccagcucaucaugaagaaccaccuccgcgacaucaugugcauccccuacugcaacuacuccaaguacugguaccugaaccacaccaucacgggcaagaccagccugcccaagugcuggcugguguccaacgggagcuaccugaacaagacccacuucuccgacgacaucgagcagcaggccgacaacaugaucaccgagaugcuccagaaggaguacauggagcggcagggcaagacgccgcugggccuggucgaccucuucguguucagcaccuccuucuaccugaucagcaucuuccugcaccugaucaagauccccacccaccgccacaucguggggaagcccugccccaagccgcaccggcucaaccacaugggcaucugcuccugcgggcuguacaagcagcccggcguccccgugaaguggaagcgcuga

SEQ ID NO: 4504 - RNA, 1476 nt, Artificial Sequence
  derived and/or modified protein sequence (opt1) from LASV(G1792-SLE-2011;Clade IV)__AIT17208__GPCstabilized
augggccagaucgugaccuucuuccaggaggucccccacgugaucgaggaggugaugaacaucguccugaucgcccucagcauccuggccgugcugaaggggcucuacaacuucgcgaccugcggccugaucgggcuggugacguuccuccugcugugcggccgcuccugcaccaccagccucuacaagggggucuacgagcugcagacccuggagcucaacauggagacgcugaacaugaccaugccgcuguccugcaccaagaacaacagccaccacuacaucauggugggcaacgagaccggccucgagcugacgcugaccaacaccuccaucaucaaccacaaguucugcaaccucagcgacgcccacaagaagaaccuguacgaccacgcccugauguccaucaucagcaccuuccaccucuccauccccaacuucaaccaguacgaggccaugagcugcgacuucaacgggggcaagaucuccgugcaguacaaccugagccacuccuacgccggggacgcggccaaccacugcggcacggucgccaacggggugcugcagaccuucaugcggauggccuggggcggcagcuacaucgcgcucgacuccgggugcggccagugggacugcaucaugaccagcuaccaguaccugaucauccagaacaccacgugggaggaccacugccaguucucccgccccagccccaucggguaccugggccuccugucccagcggacccgcgacaucuacaucagccggcgccggcgcggcaccuucaccuggacgcugagcgacuccgaggggaaggacaccccgggcggguacugccucacccgguggaugcugaucgaggccgagcugaagugcuucggcaacaccgccguggccaagugcaacgagaagcacgacgaggaguucugcgacaugcuccgccuguucgacuucaacaagcaggccauccagcggcugaaggcgcccgcccagaugagcauccagcucaucaacaaggccgucaacgcccugaucaacgaccagcugaucaugaagaaccaccuccgcgacaucaugugcauccccuacugcaacuacuccaaguacugguaccugaaccacacgaccaccgggaagaccagccugcccaagugcuggcucguguccaacggcagcuaccugaacgagacgcacuucuccgacgacaucgagcagcaggccgacaacaugaucaccgagaugcugcagaaggaguacauggagcggcagggcaagaccccgcucgggcugguggaccuguucgucuucagcaccuccuucuaccucaucagcaucuuccugcaccuggugaagauccccacgcaccgccacaucgugggcaaguccugccccaagccccaccggcugaaccacauggggaucugcagcugcggccucuacaagcagccggggguccccgugaaguggaagcgcuga

SEQ ID NO: 4505 - RNA, 1476 nt, Artificial Sequence
  derived and/or modified protein sequence (opt1) from LASV(G1897-SLE-2011;Clade IV)__AIT17210__GPCstabilized
augggccagaucgugaccuucuuccaggaggucccccacgugaucgaggaggugaugaacaucguccugaucgcccucagcauccuggccgugcugaaggggcucuacaaccuggcgaccugcggccugguggggcucgucacguuccugcugcucugcggccgcuccugcaccaccagccuguacaaggggguguacgagcugcagacccucgagcugaacauggagacgcugaacaugaccaugccgcucuccugcaccaagaacaacagccaccacuacaucauggugggcaacgagaccggccuggagcugacgcucaccaacaccuccaucaucaaccacaaguucugcaaccugagcgacgcccacaagaagaaccuguacgaccacgcccucauguccaucaucagcaccuuccaccuguccauccccaacuucaaccaguacgaggccaugagcugcgacuucaacgggggcaagaucuccguccaguacaaccugagccacuccuacgccggggacgcggccaaccacugcggcacgguggccaacggggugcuccagaccuucaugcggauggccuggggcggcagcuacaucgcgcuggacuccgggugcgaccgcugggacugcaucaugaccagcuaccaguaccugaucauccagaacaccacgugggaggaccacugccaguucucccggcccagccccaucggcuaccucgggcugcugucccagcgcacccgggacaucuacaucagccgccggcgccggggcaccuucaccuggacgcucagcgacuccgagggcaaggacacccccgggggcuacugccugacccgcuggaugcugaucgaggccgagcucaagugcuucgggaacaccgccgucgccaagugcaacgagaagcacgacgaggaguucugcgacaugcugcggcuguucgacuucaacaagcaggccauccagcgccucaaggcgccggcccagaugagcauccagcugaucaacaaggccgugaacgcccugaucaacgaccagcucaucaugaagaaccaccuccgggacaucaugugcauccccuacugcaacuacuccaaguacugguaccugaaccacacgaccaccggcaagaccagccugcccaagugcuggcugguguccaacgggagcuaccugaacgagacgcacuucuccgacgacaucgagcagcaggccgacaacaugaucaccgagaugcuccagaaggaguacauggagcgccagggcaagaccccgcugggccuggucgaccucuucguguucagcaccuccuucuaccugaucagcaucuuccugcggcuggugaagauccccacgcaccgccacaucgucgggaagcccugccccaagccgcaccggcucaaccacaugggcaucugcuccugcgggcuguacaagcagcccggcgugcccgugaaguggaagcgcuga

SEQ ID NO: 4506 - RNA, 1476 nt, Artificial Sequence
  derived and/or modified protein sequence (opt1) from LASV(G1932-SLE-2011;Clade IV)__AIT17212__GPCstabilized
augggccagaucgugaccuucuuccaggaggucccccacgugaucgaggaggugaugaacaucguccugaucgcccucagcauccuggccgugcugaaggggcucuacaaccuggcgaccugcggccugguggggcucgucacguuccugcugcucugcggccgcuccugcaccaccagccuguacaaggggguguacgagcugcagacccucgagcugaacauggagacgcugaacaugaccaugccgcucuccugcaccaagaacaacagccaccacuacaucauggugggcaacgagaccggccuggagcugacgcucaccaacaccuccaucaucaaccacaaguucugcaaccugagcgacgcccaccggaagaaccuguacgaccacgcccucauguccaucaucagcaccuuccaccuguccauccccaacuucaaccaguacgaggccaugagcugcgacuucaacgggggcaagaucuccguccaguacaaccugagccacuccuacgccggggacgcggccaaccacugcggcacgguggccaacggggugcuccagaccuucaugcgcauggccuggggcggcagcuacaucgcgcuggacuccgggugcggcaagugggacugcaucaugaccagcuaccaguaccugaucauccagaacaccacgugggaggaccacugccaguucucccggcccagccccaucggguaccucggccugcugucccagcgcacccgggacaucuacaucagccgccggcgccggggcaccuucaccuggacgcucagcgacuccgaggggaaggacaccccgggcggguacugccugacccgcuggaugcugaucgaggccgagcucaagugcuucggcaacaccgccgucgccaagugcaacgagaagcacgacgaggaguucugcgacaugcugcggcuguucgacuucaacaagcaggccauccagcgccucaaggcgcccgcccagaugagcauccagcugaucaacaaggccgugaacgcccugaucaacgaccagcucaucaugaagaaccaccuccgggacaucaugugcauccccuacugcaacuacuccaaguacugguaccugaaccacacgaccaccgggaagaccagccugccccgcugcuggcugguguccaacggcagcuaccugaacgagacgcacuucuccgacgacaucgagcagcaggccgacaacaugaucaccgagaugcuccagaaggaguacauggagcggcagggcaagaccccgcuggggcuggucgaccucuucguguucagcaccuccuucuaccugaucagcaucuuccugcaccuggugaagauccccacgcaccgccacaucgucggcaagcccugccccaagccgcaccggcucaaccacauggggaucugcuccugcggccuguacaagcagcccggggugcccgugaaguggaagcgcuga

SEQ ID NO: 4507 - RNA, 1476 nt, Artificial Sequence
  derived and/or modified protein sequence (opt1) from LASV(G1959-SLE-2011;Clade IV)__AIT17216__GPCstabilized
augggccagaucgugaccuucuuccaggaggucccccacgugaucgaggaggugaugaacaucguccugaucgcccucagcauccuggccgugcugaaggggcucuacaacuucgcgaccugcggccugguggggcuggucacguuccuccugcugugcggccgcuccugcaccaccagccucuacaaggggguguacgagcugcagacccuggagcucaacauggagacgcugaacaugaccaugccgcuguccugcaccaagaacaacagccaccacuacaucauggugggcaacgagaccggccucgagcugacgcugaccaacaccuccaucaucaaccacaaguucugcaaccucagcgacgcccacaagaagaaccuguacgaccacgcccugauguccaucaucagcaccuuccaccucuccauccccaacuucaaccaguacgaggccaugagcugcgacuucaacgggggcaagaucuccguccaguacaaccugagccacuccuacgccggggacgcggccaaccacugcggcacgguggccaacggggugcugcagaccuucaugcggauggccuggggcggcagcuacaucgcgcucgacuccgggugcggccgcugggacugcaucaugaccagcuaccaguaccugaucauccagaacaccacgugggaggaccacugccaguucucccggcccagccccaucggguaccugggccuccugucccagcgcacccgggacaucuacaucagccgccggcgccggggcaccuucaccuggacgcugagcgacuccgaggggaaggacaccccgggcggguacugccucacccgcuggaugcugaucgaggccgagcugaagugcuucggcaacaccgccgucgccaagugcaacgagaagcacgacgaggaguucugcgacaugcuccggcuguucgacuucaacaagcaggccauccagcgccugaaggcgcccgcccagaugagcauccagcucaucaacaaggccgugaacgcccugaucaacgaccagcugaucaugaagaaccaccuccgggacaucaugugcauccccuacugcaacuacuccaaguacugguaccugaaccacacgaccaccgggaagaccagccugcccaagugcuggcucguguccaacggcagcuaccugaacgagacgcacuucuccgacgacaucgagcagcaggccgacaacaugaucaccgagaugcugcagaaggaguacauggagcgccagggcaagaccccgcucgggcuggucgaccuguucguguucagcaccuccuucuaccucaucagcaucuuccugcaccuggugaagauccccacgcaccggcacaucgucggcaagcccugccccaagccgcaccgccugaacuacauggggaucugcuccugcggccucuacaagcagcccggggugcccgugcgguggaagcgcuga

SEQ ID NO: 4508 - RNA, 1476 nt, Artificial Sequence
  derived and/or modified protein sequence (opt1) from LASV(G2141-SLE-2011;Clade IV)__AIT17224__GPCstabilized
augggccagaucgugaccuucuuccaggaggucccccacgugaucgaggaggugaugaacaucguccugaucgcccucagcauccuggccgugcugaaggggcucuacaacguggcgaccugcggccugaucgggcuggucacguuccuccugcugugcggccgcuccugcaccaccacccucuacaaggggguguacgagcugcaggcccuggagcucaacauggagacgcugaacaugaccaugccgcugagcugcaccaagaacaacucccaccacuacauccgggugggcaacgacaccggccucgagcugacgcugaccaacaccagcaucauccagcacaaguucugcaaccucuccgacgcccacaagaagaaccuguacgaccacacccugaugagcaucaucuccacguuccaccucagcauccccaacuucaaccaguacgaggccauguccugcgacuucaacgggggcaagaucagcguccaguacaaccugucccacagcuacgccggggacgcggccucccacugcggcaccguggccaacggggugcugcagaccuucaugcgcauggccuggggcggcagcuacaucgcgcucgacuccgggugcggcaacugggacugcaucaugaccagcuaccaguaccugaucauccagaacacgaccugggaggaccacugccaguucucccggcccagccccaucggguaccugggccuccugucccagcgcacccgggacaucuacaucagccgccggcgccggggcaccuucacguggacccugagcgacuccgaggggcgcgacaccccgggcggguacugccucacccgguggaugcugaucgaggccgagcugaagugcuucggcaacacggccgucgccaagugcaacgagaagcacgacgaggaguucugcgacaugcuccgccuguucgacuucaacaagcaggccauccagcggcugaagacccccgcgcagaugagcauccagcucaucaacaaggccgugaacgcccugaucaacgaccagcugaucaugaagaaccaccuccgcgacaucaugugcauccccuacugcaacuacuccaaguacugguaccugaacaacaccaucaccggcaagagcucccugcccaagugcuggcucgugagcaacggguccuaccugaacgagacgcacuucagcgacgacaucgagcaggaggccgacaacaugaucaccgagaugcugcagaaggaguacauggagcggcagggcaagaccccgcucgggcuggucgaccuguucguguucuccaccagcuucuaccucaucuccaucuuccugcaccuggugaagauccccacgcaccgccacaucgucggcaagcccugccccaagccgcaccggcugaaccacaugggggugugcagcugcggccucuacaagcagcccggggugcccguccgcuggaagcgguga

SEQ ID NO: 4509 - RNA, 1476 nt, Artificial Sequence
  derived and/or modified protein sequence (opt1) from LASV(G2147-SLE-2011;Clade IV)__AIT17228__GPCstabilized
augggccagaucgugaccuucuuccaggaggucccccacgugaucgaggaggugaugaacaucguccugaucgcccucagcauccuggccgugcugaaggggcucuacaacuucgcgaccugcggccugguggggcugcucacguuccugcugcucugcggccgcuccugcaccaccagccuguacaagggggucuacgagcugcagacccucgagcugaacauggagacgcugaacaugaccaugccgcucuccugcaccaagaacaacagccaccacuacaucauggugggcaacgagaccggccuggagcugacgcucaccaacaccuccaucaucgaccacaaguucugcaaccugagcgacgcccacaagaagaaccuguacgaccacgcccucauguccaucaucagcaccuuccaccuguccauccccaacuucaaccaguacgaggccaugagcugcgacuucaacgggggcaagaucuccgugcaguacaaccugagccacuccuacgccggggacgcggccaaccacugcggcacggucgccaacggggugcuccagaccuucaugcggauggccuggggcggcagcuacaucgcgcuggacuccgggugcggcgggugggacugcaucaugaccagcuaccaguaccugaucauccagaacaccacgugggaggaccacugccaguucucccgccccagccccaucggcuaccucggccugcugucccagcggacccgcgacaucuacaucagccggcgccggcgcgggaccuucaccuggacgcucagcgacuccgagggcaaggacacccccgggggcuacugccugacccgguggaugcugaucgaggccgagcucaagugcuucgggaacaccgccguggccaagugcaacgagaagcacgacgaggaguucugcgacaugcugcgccuguucgacuucaacaagcaggccauccagcggcucaaggcgccggcccagaugagcauccagcugaucaacaaggccgucaacgcccugaucaacgaccagcucaucaugaagaaccaccuccgcgacaucaugugcauccccuacugcaacuacuccaaguacugguaccugaaccacacgaccaccggcaagaccagccugcccaagugcuggcugguguccaacggcagcuaccugaacgagacgcacuucuccgacgacaucgagcagcaggccgacaacaugaucaccgagaugcuccagaaggaguacauggagcggcaggggaagaccccgcugggccugguggaccucuucgucuucagcaccuccuucuaccugaucagcaucuuccugcaccuggugaagauccccacgcaccgccacaucguggggaaguccugccccaagccccaccggcucaaccacaugggcaucugcagcugcgggcuguacaagcagccgggcguccccgugaaguggaagcgcuga

SEQ ID NO: 4510 - RNA, 1476 nt, Artificial Sequence
  derived and/or modified protein sequence (opt1) from LASV(G2165-SLE-2011;Clade IV)__AIT17232__GPCstabilized
augggccagaucgugaccuucuuccaggaggucccccacgugaucgaggaggugaugaacaucguccugaucgcccucagcauccuggccgugcugaaggggcucuacaacuucgcgaccugcggccugguggggcuggucacguuccuccugcugugcggccgcuccugcaccaccagccucuacaaggggguguacgagcugcagacccuggagcucaacauggagacgcugaacaugaccaugccgcuguccugcaccaagaacaacagccaccacuacauccgggugggcaacgagaccggccucgagcugacgcugaccaacaccuccaucaucaaccacaaguucugcaaccucagcgacgcccacaagaagaaccuguacgaccacgcccugauguccaucaucagcaccuuccaccucuccauccccaacuucaaccaguacgaggccaugagcugcgacuucaacgaggggaagaucuccguccaguacaaccugagccacuccuacgccggcgacgcggccaaccacugcgggacgguggccaacggcgugcugcagaccuucaugcgcauggccuggggcgggagcuacaucgcgcucgacuccggcugcgggaagugggacugcaucaugaccagcuaccaguaccugaucauccagaacaccacgugggaggaccacugccaguucucccggcccagccccaucggcuaccuggggcuccugucccagcgcacccgggacaucuacaucagccgccggcgccggggcaccuucaccuggacgcugagcgacuccgagggcaaggacacccccgggggcuacugccucacccgcuggaugcugaucgaggccgagcugaagugcuucgggaacaccgccgucgccaagugcaacgagaagcacgacgaggaguucugcgacaugcuccggcuguucgacuucaacaagcaggccaucgagcgccugaaggcgccggcccagaugagcauccagcucaucaacaaggccgugaacgcccugaucaacgaccagcugaucaugaagaaccaccuccgggacaucaugugcauccccuacugcaacuacuccaaguacugguaccugaaccacacgaccaccggcaagaccagccugcccaagugcuggcucguguccaacgggagcuaccugaacgagacgcacuucuccgacgacaucgagcagcaggccgacaacaugaucaccgagaugcugcagaaggaguacauggagcgccagggcaagaccccgcucggccuggucgaccuguucguguucagcaccuccuucuaccucaucagcaucuuccugcaccuggugaagauccccacgcaccggcacaucgucgggaaguccugccccaagccccaccgccugaaccacaugggcaucugcagcugcgggcucuacaagcagccgggcgugcccgugaaguggaagcgguga

SEQ ID NO: 4511 - RNA, 1476 nt, Artificial Sequence
  derived and/or modified protein sequence (opt1) from LASV(G2184-SLE-2011;Clade IV)__AIT17236__GPCstabilized
augggccagaucgugaccuucuuccaggaggucccccacgugaucgaggaggugaugaacaucguccugaucgcccucagcauccuggccgugcugaaggggcucuacaacuucgcgaccugcggccugguggggcuggucacguuccuccugcugugcggccgcuccugcaccaccagccucuacaaggggguguacgagcugcagacccuggagcucaacauggagacgcugaacaugaccaugccgcuguccugcaccaagaacaacagccaccacuacaucauggugggcaacgagaccggccucgagcugacgcugaccaacaccuccaucaucaaccacaaguucugcaaccucagcgacgcccacaagaagaaccuguacgaccacgcccugauguccaucaucagcaccuuccaccucuccauccccaacuucaaccaguacgaggccaugagcugcgacuucaacgggggccggaucuccguccaguacaaccugagccacuccuacgccggggaggcggccaaccacugcggcacgguggccaacggggugcugcagaccuucaugcgcauggccuggggcggcagcuacaucgcgcucgacuccgggugcggcaagugggacugcaucaugaccagcuaccaguaccugaucauccagaacaccacgugggaggaccacugccaguucucccggcccagccccaucggguaccugggccuccugucccagcgcacccgggacaucuacaucagccgccggcgccggggcaccuucaccuggacgcugagcgacuccgaggggaaggacaccccgggcggguacugccucacccgcuggaugcugaucgaggccgagcugaagugcuucggcaacaccgccgucgccaagugcaacgagaagcacgacgaggaguucugcgacaugcuccggcuguucgacuucaacaagcaggccauccagcgccugaaggcgcccgcccagaugagcauccagcucaucaacaaggccgugaacgcccugaucaacgaccagcugaucaugaagaaccaccuccgggacaucaugugcauccccuacugcaacuacucccgcuacugguaccugaaccacacgaccaccgggaagaccagccugcccaagugcuggcucguguccaacggcagcuaccugaacgagacgcacuucuccgacgacaucgagcagcaggccgacaacaugaucaccgagaugcugcagaaggaguacauggagcggcagggcaagaccccgcucgggcuggucgaccuguucguguucagcaccuccuucuaccucaucagcaucuuccugcaccuggugaagauccccacgcaccgccacaucgucggcaaguccugccccaagccccaccggcugaaccacauggggaucugcagcugcggccucuacaagcagccgggggugcccgugaaguggaagcgcuga

SEQ ID NO: 4512 - RNA, 1476 nt, Artificial Sequence
  derived and/or modified protein sequence (opt1) from LASV(G2197-SLE-2011;Clade IV)__AIT17240__GPCstabilized
augggccagaucgugaccuucuuccaggaggucccccacgugaucgaggaggugaugaacaucguccugaucgcccucagcauccuggccgugcugaaggggcucuacaaccuggcgaccugcggccugguggggcucgucacguuccugcugcucugcggccgcuccugcaccaccagccuguacaagggguucuacgagcugcagacccucgagcugaacauggagacgcugaacaugaccaugccgcucuccugcaccaagaacaacagccaccacuacauccgggugggcaacgagaccggccuggagcugacgcucaccaacaccuccaucaucgaccacaaguucugcaaccugagcgacgcccacaagaagaaccuguacgaccacgcccucauguccaucaucagcaccuuccaccuguccauccccaacuucaaccaguacgaggccaugagcugcgacuucaacgggggcaagaucuccgugcaguacaaccugagccacuccuacgccggggacgcggccaaccacugcggcacggucgccaacggggugcuccagaccuucaugcgcauggccuggggcggcagcuacaucgcgcuggacuccgggugcggccggugggacugcaucaugaccagcuaccaguaccugaucauccagaacaccacgugggaggaccacugccaguucucccgccccagccccaucggguaccucggccugcugucccagaagacccgggacaucuacaucagccgccggcgccggggcaccuucaccuggacgcucagcgacuccgaggggaaggacaccccgggcggguacugccugacccgcuggaugcugaucgaggccgagcucaagugcuucggcaacaccgccguggccaagugcaacgagaagcacgacgaggaguucugcgacaugcugcggcuguucgacuucaacaagcaggccauccagcgccucaaggcgcccgcccagaugagcauccagcugaucaacaaggccgucaacgcccugaucaacgaccagcucaucaugaagaaccaccuccgggacaucaugugcauccccuacugcaacuacuccaaguacugguaccugaaccacacgaccaccgggaagaccagccugcccaagugcuggcugguguccaacggcagcuaccugaacgagacgcacuucuccgacgacaucgagcagcaggccgacaacaugaucaccgagaugcuccagaaggaguacauggagcgccagggcaagaccccgcuggggcugguggaccucuucgucuucagcaccuccuucuaccugaucagcaucuuccugcaccuggugaagauccccacgcaccggcacaucgugggcaaguccugccccaagccccaccgccucaaccacauggggaucugcagcugcggccuguacaagcagccggggguccccgugaaguggaagcgguga

SEQ ID NO: 4513 - RNA, 1476 nt, Artificial Sequence
  derived and/or modified protein sequence (opt1) from LASV(G2222-SLE-2011;Clade IV)__AIT17244__GPCstabilized
augggccagaucgugaccuucuuccaggaggucccccacgugaucgaggaggugaugaacaucguccugaucgcccucagcauccuggccgugcugaaggggcucuacaaccuggcgaccugcggccugguggggcucgucacguuccugcugcucugcggccgcuccugcaccaccaaccuguacaaggggguguacgagcugcagacccucgagcugaacauggagacgcugaacaugaccaugccgcucagcugcaccaagaacuccagccaccacuacauccgggugggcaacgagaccggccuggagcugacgcucaccaacaccuccaucaucgaccacaaguucugcaaccugagcgacgcccacaagaagaaccuguacgaccacgcccucauguccaucaucagcaccuuccaccuguccauccccaacuucaaccaguacgaggccaugagcugcgacuucaacgggggcaagaucuccguccaguacaaccugagccacuccuacgugggggacgccgcggaccacugcggcacgguggccaacgggguccuccagaccuucaugcgcauggccuggggcggcagcuacaucgcccuggacuccgggugcggcaagugggacugcaucaucaccagcuaccaguaccugaucauccagaacaccacgugggaggaccacugccaguucucccggcccagccccaucggguaccucggccugcugucccagcgcacccgggacaucuacaucagccgccggcgccggggcaccuucaccuggacgcucagcgacuccgaggggaaggacaccccgggcggguacugccugacccgcuggaugcugaucgaggcggagcucaagugcuucggcaacaccgccguggccaagugcaacgagaagcacgacgaggaguucugcgacaugcugcggcuguucgacuucaacaagcaggccauccagcgccucaaggcccccgcgcagaugagcauccagcugaucaacaaggccgugaacgcccugaucaacgaccagcucaucaugaagaaccaccuccgggacaucaugugcauccccuacugcaacuacuccaaguacugguaccugaaccacacgaucaccgggaagaccagccugccccgcugcuggcuggucuccaacggcagcuaccugaacgagacccgguucuccgacgacaucgagcagcaggccgacaacaugaucacggagaugcuccagaaggaguacauggagcgccagggcaagaccccgcuggggcugguggaccucuucguguucagcaccuccuucuaccugaucagcaucuuccugcaccuggucaagauccccacccaccggcacaucgugggcaagcccugccccaagccgcaccgccucaaccacauggggaucugcuccugcggccuguacaagcagcccggggugcccgucaaguggaagcgguga

SEQ ID NO: 4514 - RNA, 1476 nt, Artificial Sequence
  derived and/or modified protein sequence (opt1) from LASV(G2230-SLE-2012;Clade IV)__AIT17246__GPCstabilized
augggccagaucgugaccuucuuccaggaggucccccacgugaucgaggaggugaugaacaucguccugaucgcccucagccugcuggccgugcucaaggggcuguacaacguggcgaccugcggccugaucgggcucaucacguuccugcugcucugcggccgcuccugcaccaccaaccuguacaagggggucuacgagcugcagacccucgagcugaacauggagacgcugaacaugaccaugccgcucagcugcaccaagaacuccagccaccacuacaucauggugggcaacgagaccggccuggagcugacgcucaccaacaccuccaucaucaaccacaaguucugcaaccugagcgacgcccacaagaagaaccuguacgaccacacccucauguccaucaucagcacguuccaccuguccauccccaacuucaaccaguacgaggccaugagcugcgacuucaacgggggcaagaucuccgugcaguacaaccugagccacuccuacgccgucgacgccgcgaaccacugcgggaccguggccaacggcauccuccagaccuucaugcggauggccuggggcgggagcuacaucgcccuggacuccggcugcgggaacugggacugcaucaugaccagcuaccaguaccugaucauccagaacacgaccugggaggaccacugccaguucucccgccccagccccaucggcuaccucgggcugcugucccagcggacccgcgacaucuacaucagccggcgccggcgcggcaccuucacguggacccucagcgacuccgagggcaacgacacccccgggggcuacugccugacccgguggaugcugaucgaggcggagcucaagugcuucgggaacacggccguggccaagugcaacgagaagcacgacgaggaguucugcgacaugcugcgccuguucgacuucaacaagcaggccauccagcggcucaaggccccggcgcagaugagcauccagcugaucaacaaggccgucaacgcccugaucaacgaccagcucaucaugaagaaccaccuccgcgacaucaugugcauccccuacugcaacuacuccaaguacugguaccugaaccacaccaccaccggcaagacgagccugcccaagugcuggcugguguccaacgggagcuaccugaacgagacccacuucuccgacgacaucgagcagcaggccgacaacaugaucaccgagaugcuccagaaggaguacauggagcggcagggcaagaccccgcugggccugguggaccucuucgucuucagcacguccuucuaccugaucagcaucuuccugcaccuggugaagauccccacccaccgccacaucguggggaagcccugccccaagccgcaccggcucaaccacaugggcaucugcuccugcgggcuguacaagcagcccggcguccccgugcgcuggaagcgguga

SEQ ID NO: 4515 - RNA, 1476 nt, Artificial Sequence
  derived and/or modified protein sequence (opt1) from LASV(G2259-SLE-2012;Clade IV)__AIT17250__GPCstabilized
augggccagaucgugaccuucuuccaggaggucccccacgugaucgaggaggugaugaacaucguccugaucgcccucagccugcuggccgugcucaaggggcuguacaacguggcgaccugcggccugaucgggcucgucacguuccugcugcucugcggccgcuccugcaccaccaaccuguacaaggggguguacgagcugcagacccucgagcugaacauggagacgcugaacaugaccaugccgcucagcugcaccaagaacaacucccaccacuacaucauggugggcaacgagaccggccuggagcugacgcucaccaacaccagcaucaucaaccacaaguucugcaaccuguccgacgcccacaagaagaaccuguacgaccacacccucaugagcaucaucuccacguuccaccugagcauccccaacuucaaccaguacgaggccauguccugcgacuucaacgggggcaagaucagcguccaguacaaccugucccacagcuacgccguggacgccgcgaaccacugcgggaccguggccaacggcguccuccagaccuucaugcggauggccuggggcggguccuacaucgcccuggacagcggcugcgggaacugggacugcaucaugaccuccuaccaguaccugaucauccagaacacgaccugggaggaccacugccaguucagccgccccucccccaucggcuaccucgggcugcugagccagcggacccgcgacaucuacaucucccggcgccggcgcggcaccuucacguggacccucagcgacagcgagggcaacgacacccccgggggcuacugccugacccgguggaugcugaucgaggcggagcucaagugcuucgggaacacggccguggccaagugcaacgagaagcacgacgaggaguucugcgacaugcugcgccuguucgacuucaacaagcaggccauccagcggcucaaggccccggcgcagauguccauccagcugaucaacaaggccgugaacgcccugaucaacgaccagcucaucaugaagaaccaccuccgcgacaucaugugcauccccuacugcaacuacagcaaguacugguaccugaaccacaccaccaccggcaagacgucccugcccaagugcuggcuggucagcaacggguccuaccugaacgagacccacuucagcgacgacaucgagcagcaggccgacaacaugaucaccgagaugcuccagaaggaguacauggagcggcagggcaagaccccgcugggccugguggaccucuucguguucuccacgagcuucuaccugaucuccaucuuccugcaccuggucaagauccccacccaccgccacaucguggggaagcccugccccaagccgcaccggcucaaccacaugggcaucugcagcugcgggcuguacaagcagcccggcgugcccguccgcuggaagcgguga

SEQ ID NO: 4516 - RNA, 1476 nt, Artificial Sequence
  derived and/or modified protein sequence (opt1) from LASV(G2263-SLE-2012;Clade IV)__AIT17254__GPCstabilized
augggccagaucgugaccuucuuccaggaggucccccacgugaucgaggaggugaugaacaucguccugaucgcccucagcauccuggccgugcugaaggggcucuacaacuucgcgaccugcggcaucguggggcuggucacguuccugcuccugugcggccgcuccugcaccaccagccuguacaaggggguguacgagcuccagacccuggagcugaacauggagacgcucaacaugaccaugccgcuguccugcaccaagaacaacagccaccacuacaucauggugggcaacgagaccggccuggagcucacgcugaccaacaccuccaucaucaaccacaaguucugcaaccugagcgacgcccacaagaagaaccucuacgaccacgcccugauguccaucaucagcaccuuccaccuguccauccccaacuucaaccaguacgaggccaugagcugcgacuucaacgggggcaagaucuccguccaguacaaccucagccacuccuacgccggggacgcggccaaccacugcggcacgguggccaacggggugcugcagaccuucaugcggauggccuggggcggcagcuacaucgcgcuggacuccgggugcgaccgcugggacugcaucaugaccagcuaccaguaccucaucauccagaacaccacgugggaggaccacugccaguucucccggcccagccccaucggcuaccuggggcugcucucccagcgcacccgggacaucuacaucagccgccggcgccggggcaccuucaccuggacgcugagcgacuccgagggcaagaacacccccgggggcuacugccugacccgcuggaugcucaucgaggccgagcugaagugcuucgggaacaccgccgucgccaagugcaacgagaagcacgacgaggaguucugcgacaugcugcggcuguucgacuucaacaagcaggccauccagcgccugaaggcgccggcccagaugagcaucucccugaucaacaaggccgugaacgcccucaucaacgaccagcugaucaugaagaaccaccuccgggacaucaugugcauccccuacugcaacuacagcaaguacugguaccucaaccacacgaccaccggcaagaccucccugccccgcugcuggcuggugagcaacggguccuaccucaacgagacgcacuucagcgacgacaucgagcagcaggccgacaacaugaucaccgagaugcugcagaaggaguacauggaccggcagggcaagaccccgcugggccucgucgaccuguucguguucuccaccagcuucuaccugaucuccaucuuccuccaccuggugaagauccccacgcaccgccacaucgucgggaagaccugccccaagccccaccggcugaaccacaugggcaucugcagcugcgggcuguacaagcagccgggcgugcccgugaaguggaagcgcuga

SEQ ID NO: 4517 - RNA, 1476 nt, Artificial Sequence
  derived and/or modified protein sequence (opt1) from LASV(G2280-SLE-2012;Clade IV)__AIT17258__GPCstabilized
augggccagaucgugaccuucuuccaggaggucccccacgugaucgaggaggugaugaacaucguccugaucgcccucagcauccuggccgugcugaaggggcucuacaacaucgcgaccugcggccugguggggcuggucacguuccuccugcugugcggccgcuccugcaccaccagccucuacaaggggguguacgagcugcagacccuggagcucaacauggagacgcugaacaugaccaugccgcuguccugcaccaagaacaacagccaccacuacaucauggugggcaacgagaccggccucgagcugacgcugaccaacaccuccaucaucaaccacaaguucugcaaccucagcgacgcccacaagaagaaccuguacgaccacgcccugauguccaucgucagcaccuuccaccucuccauccccaacuucaaccaguacgaggccaugagcugcgacuucaacgggggcaagaucuccgugcaguacaaccugagccacuccuacgccguggacgcggccaaccacugcgggacggucgccaacggcgugcugcagaccuucaugcggauggccuggggcgggagcuacaucgcgcucgacuccggcugcgggggcugggacugcaucaugaccagcuaccaguaccugaucauccagaacgugaccugggaggaccacugccaguucucccgccccagccccaucggguaccugggccuccugucccagcggacgcgcgacgucuacaucagccggcgccggcgcggcaccuucaccuggacccugagcgacuccgaggggaacgacacgccgggcggguacugccucacccgguggaugcugaucgaggccgagcugaagugcuucggcaacaccgccguggccaagugcaacgagaagcacgacgaggaguucugcgacaugcuccgccuguucgacuucaacaagcaggccauccagcggcugaaggcgcccgcccagaugagcauccagcucaucaacaaggccgugaacgcccugaucaacgaccagcugaucaugaagaaccaccuccgcgacaucaugugcauccccuacugcaacuacuccaaguacugguaccugaaccacaccacgaccgggaagaccagccugcccaagugcuggcucgucuccaacggcagcuaccugaacgagacccacuucuccgacgacaucgagcagcaggccgacaacaugaucacggagaugcugcagaaggaguacauggagcggcagggcaagaccccgcucgggcugguggaccuguucguguucagcaccuccuucuaccucaucagcaucuuccugcaccuggucaagauccccacccaccgccacaucgugggcaagcccugccccaagccgcaccggcugaaccacauggggaucugcuccugcggccucuacaagcagcccggggugcccgucaaguggaagcgcuga

SEQ ID NO: 4518 - RNA, 1476 nt, Artificial Sequence
  derived and/or modified protein sequence (opt1) from LASV(G2295-SLE-2012;Clade IV)__AIT17262__GPCstabilized
augggccagaucgugaccuucuuccaggaggucccccacgugaucgaggaggugaugaacaucguccugaucgcccucagcauccuggccgugcugaaggggcucuacaaccuggcgaccugcggccugguggggcucgucacguuccugcugcucugcggccgcuccugcaccaccagccuguacaaggggguguacgagcugcagacccucgagcugaacauggagacgcugaacaugaccaugccgcucuccugcaccaagaacaacagccaccacuacaucauggugggcaacgagaccggccuggagcugacgcucaccaacaccuccaucaucaaccacaaguucugcaaccugagcgacgcccacaagaagaaccuguacgaccacgcccucauguccaucaucagcaccuuccaccuguccauccccaacuucaaccaguacgaggccaugagcugcgacuucaacgggggcaagaucuccguccaguacaaccugagccacuccuacgccggggacgcggccacgcacugcggcaccguggccaacggggugcuccagaccuucaugcggauggccuggggcggcagcuacaucgcgcuggacuccgggugcggcaagugggacugcaucaugaccagcuaccaguaccugaucauccagaacacgaccugggaggaccacugccaguucucccgccccagccccaucggguaccucggccugcugucccagcggacccgcgacaucuacaucagccggcgccggcgcggcaccuucacguggacccucagcgacuccgaggggaaggacaccccgggcggguacugccugacccgguggaugcugaucgaggccgagcucaagugcuucggcaacacggccgucgccaagugcaacgagaagcacgacgaggaguucugcgacaugcugcgccuguucgacuucaacaagcaggccauccagcggcucaagacccccgcgcagaugagcauccagcugaucaacaaggccgugaacgcccugaucaacgaccagcucaucaugaagaaccaccuccgcgacaucaugugcauccccuacugcaacuacuccaaguacugguaccugaaccacaccaccacggggaagaccagccugccccggugcuggcugguguccaacggcagcuaccugaacgagacccacuucuccgacgacaucgagcagcaggccgacaacaugaucaccgagaugcuccagaaggaguacauggagcgccagggcaagacgccgcuggggcuggucgaccucuucguguucagcaccuccuucuaccugaucagcaucuuccugcaccuggugaagauccccacccaccggcacaucgucggcaagcccugccccaagccgcaccgccucaaccacauggggaucugcuccugcggccuguacaagcagcccggggugcccgugaaguggaagcgguga

SEQ ID NO: 4519 - RNA, 1476 nt, Artificial Sequence
  derived and/or modified protein sequence (opt1) from LASV(G2315-SLE-2012;Clade IV)__AIT17266__GPCstabilized
augggccagaucgugaccuucuuccaggaggucccccacgugaucgaggaggugaugaacaucguccugaucgcccucagcauccuggccgugcugaaggggcucuacaaccuggcgaccugcggccugguggggcucgucacguuccugcugcucugcggccgcuccugcaccaccagccuguacaaggggguguacgagcugcagacccucgagcugaacauggagacgcugaacaugaccaugccgcucuccugcaccaagaacaacagccaccacuacaucauggugggcaacgagaccggccuggagcugacgcucaccaacaccucccugaucaaccacaaguucugcaaccugagcgacgcccacaagaagaaccucuacgaccacgcccugauguccaucaucagcaccuuccaccuguccauccccaacuucaaccaguacgaggccaugagcugcgacuucaacgggggcaagaucuccguccaguacaaccucagccacuccuacgccguggacgcggccaaccacugcgggacgguggccaacggcguccugcagaccuucaugcggauggccuggggcgggagcuacaucgcgcuggacuccggcugcgggggcugggacugcaucaugaccagcuaccaguaccucaucauccagaacaccacgugggaggaccacugccaguucucccgccccagccccaucggguaccugggccugcucucccagcggacccgcgacaucuacaucagccggcgccggcgcggcaccuucaccuggacgcugagcgacuccgaggggaaggacaccccgggcggguacugccugacccgguggaugcucaucgaggccgagcugaagugcuucggcaacaccgccguggccaagugcaacgagaagcacgacgaggaguucugcgacaugcugcgccucuucgacuucaacaagcaggccauccagcggcugaaggcgcccgcccagaugagcauccagcugaucaacaaggccgugaacgcccucaucaacgaccagcugaucaugaagaaccaccuccgcgacaucaugugcauccccuacugcaacuacuccaaguacugguaccugaaccacacgaccaccgggcggaccagccugccccgcugcuggcuggucuccaacggcagcuaccucaacgagacgcacuucuccgacgacaucgagcagcaggccgacaacaugaucaccgagaugcugcagaaggaguacauggagcggcagggcaagaccccgcuggggcucguggaccuguucguguucagcaccuccuucuaccugaucagcaucuuccugcaccucgucaagauccccacgcaccgccacaucgugggcaaguccugccccaagccccaccggcugaaccacauggggaucugcagcugcggccuguacaagcagccgggggugcccgucaaguggaagcgcuga

SEQ ID NO: 4520 - RNA, 1476 nt, Artificial Sequence
  derived and/or modified protein sequence (opt1) from LASV(G2318-SLE-2012;Clade IV)__AIT17270__GPCstabilized
augggccagaucgugaccuucuuccaggaggucccccacgugaucgaggaggugaugaacaucguccugaucgcccucagcgugcuggccgugcugaaggggcucuacaacuucgcgaccugcggccuggucgggcuggugacguuccuccugcugugcggccgcuccugcagcaccuccguguacaagggggucuacgagcuccagacccuggagcugaacauggagacccucaacaugacgaugccgcugagcugcaccaagaacaacucccaccacuacaucauggugggcaacgagaccggccuggagcucacccugacgaacaccagcaucaucaaccacaaguucugcaaccuguccgacgcccacaagaagaaccucuacgaccacgcccugaugagcaucaucuccaccuuccaccugagcauccccaacuucaaccaguacgaggccauguccugcgacuucaacgggggcaagaucagcgugcaguacaaccucucccacagcuacgccgucgacgcggccaaccacugcgggaccguggccaacggcgugcugcagacguucaugcggauggccuggggcggguccuacaucgcgcuggacagcggcugcgggggcugggacugcaucaugaccaacuaccaguaccucaucauccagaacaccaccugggaggaccacugccaguucucccgccccagccccaucggguaccugggccugcucucccagcggacgcgcgacaucuacaucagccggcgccggcgcggcaccuucaccuggacccugagcgacuccgaggggaaggacacgccgggcggguacugccugacccgguggaugcucaucgaggccgagcugaagugcuucggcaacaccgccgucgccaagugcaacgagaagcacgacgaggaguucugcgacaugcugcgccucuucgacuucaacaagcaggccauccagcggcugaaggcgcccgcccagaugagcauccagcugaucaacaaggccgugaacgcccucaucaacgaccagcugaucaugaagaaccaccuccgcgacaucaugugcauccccuacugcaacuacuccaaguacugguaccugaaccacaccacgaccgggcggaccagccugcccaagugcuggcugguguccaacggcagcuaccucaacgagacccacuucuccgacgacaucgagcagcaggccgacaacaugaucacggagaugcugcagcgcgaguacauggagcggcagggcaagaccccgcuggggcucgucgaccuguucguguucagcaccuccuucuaccugaucagcaucuuccuccaccuggugaagauccccacccaccgccacaucgucggcaaguccugccccaagccccaccggcugaaccacauggggaucugcagcugcggccuguacaagcagccgggggugcccgugaaguggaagcgcuga

SEQ ID NO: 4521 - RNA, 1476 nt, Artificial Sequence
  derived and/or modified protein sequence (opt1) from LASV(G2363-SLE-2012;Clade IV)__AIT17274__GPCstabilized
augggccagaucgugaccuucuuccaggaggucccccacgugaucgaggaggugaugaacaucguccugaucgcccucagcauccuggccgugcugaaggggcucuacaacguggcgaccugcggccugacggggcuggucgccuuccuccugcugugcggccgcuccugcaccaccacccucuacaaggggguguacgagcugcaggcccuggagcucaacauggagacgcugaacaugaccaugccgcugagcugcaccaagaacaacucccaccacuacauccgggugggcaacgagaccggccucgagcugacgcugaccaacaccagcaucaucgagcaccgcuucugcaaccucuccgacgcccacaagaagaaccuguacgaccacgcccugaugagcaucaucuccaccuuccaccucagcauccccaacuucaaccaguacgaggcgauguccugcgacuucaacgggggcaagaucagcguccaguacaaccugucccacagcuacgccguggacgccgccaaccacugcgggacgguggcgaacggcguccugcagaccuucaugcggauggccuggggcggguccuacaucgcccucgacagcggcugcaacgggugggacugcaucaugaccuccuaccaguaccugaucauccagaacaccacgugggaggaccacugccaguucagccgccccucccccaucggcuaccuggggcuccugagccagcggacccgcgacaucuacaucucccggcgccggcgcggcaccuucaccuggacgcugagcgacagcgagggcaaggacacccccgggggcuacugccucacccgguggaugcugaucgaggccgagcugaagugcuucgggaacaccgccguggcgaagugcaacgagaagcacgacgaggaguucugcgacaugcuccgccuguucgacuucaacaagcaggccauccagcggcugaaggccccggcccagauguccauccagcucaucaacaaggccgugaacgcgcugaucaacgaccagcugaucaugaagaaccaccuccgcgacaucaugugcauccccuacugcaacuacagcaaguacugguaccugaacaacacggccaccggcaagaccucccugccccggugcuggcucgucagcaacggguccuaccugaacgagacccacuucagcgacgacaucgagcagcaggccgacaacaugaucacggagaugcugcagaaggaguacauggagcgccagggcaagaccccgcucggccugguggaccuguucguguucuccaccagcuucuaccucaucuccaucuuccugcaccuggucaagauccccacccaccggcacaucguggggaagcccugccccaagccgcaccgccugaaccacaugggcaucugcagcugcgggcucuacaagcagcccggcgcccccgugcgguggaagcgcuga

SEQ ID NO: 4522 - RNA, 1476 nt, Artificial Sequence
  derived and/or modified protein sequence (opt1) from LASV(G2384-SLE-2012;Clade IV)__AIT17276__GPCstabilized
augggccagaucgugaccuucuuccaggaggucccccacgugaucgaggaggugaugaacaucguccugaucgcccucagcauccuggccgugcugaaggggcucuacaacuucgcgaccugcggccugguggggcuggucacguuccuccugcugugcggccgcuccugcaccaccagccucuacaaggggguguacgagcugcagacccuggagcucaacauggagacgcugaacaugaccaugccgcuguccugcaccaagaacaacagccaccacuacaucauggugggcaacgagaccggccucgagcugacgcugaccaacaccuccaucaucaaccacaaguucugcaaccucagcgacgcccacaagaagaaccuguacgaccacgcccugauguccaucaucagcaccuuccaccucuccauccccaacuucaaccaguacgaggccaugagcugcgacuucaacgggggcaagaucuccguccaguacaaccugagccacuccuacgccggggacgcggccaaccacugcggcacgguggccaacggggugcugcagaccuucaugcggauggccuggggcggcagcuacaucgcgcucgacuccgggugcggcaagugggacugcaucaugaccagcuaccaguaccugaucauccagaacaccacgugggaggaccacugccaguucucccgccccagccccaucggguaccugggccuccugucccagcggacccgcgacaucuacaucagccggcgccggcgcggcaccuucaccuggacgcugagcgacuccgaggggaaggacaccccgggcggguacugccucacccgguggaugcugaucgaggccgagcugaagugcuucggcaacaccgccgucgccaagugcaacgagaagcacgacgaggaguucugcgacaugcuccgccuguucgacuucaacaagcaggccauccagcggcugaaggcgcccgcccagaugagcauccagcucaucaacaaggccgugaacgcccugaucaacgaccagcugaucaugaagaaccaccuccgcgacaucaugugcauccccuacugcaacuacuccaaguacugguaccugaaccacacgaccaccgggaagaccagccugcccaagugcuggcucguguccaacggcagcuaccugaacgagacgcacuucuccgacgacaucgagcagcaggccgacaacaugaucaccgagaugcugcagaaggaguacauggagcggcagggcaagaccccgcucgggcuggucgaccuguucguguucagcaccuccuucuaccucaucagcaucuuccugcaccuggugaagauccccacgcaccgccacaucgucggcaaguccugccccaagccccaccggcugaaccacauggggaucugcagcugcggccucuacaagcagccgggggugcccgugcgcuggaagcgguga

SEQ ID NO: 4523 - RNA, 1473 nt, Artificial Sequence
  derived and/or modified protein sequence (opt1) from LASV(G2392-SLE-2012;Clade IV)__AIT17280__GPCstabilized
augggccagaucgugaccuucuuccaggaggucccccacgugaucgaggaggugaugaacaucguccugaucgcccucagcauccuggccgugcugaaggggcucuacaacuucgcgaccugcggccugguggggcuggucacguuccuccugcugugcggccgcuccugcaccaccagccucuacaaggggguguacgagcugcagacccuggagcucaacauggagacgcugaacaugaccaugccgcuguccugcaccaagaacaacagccaccacuacauccgggugggcaacgagaccggccucgagcugacgcugaccaacaccuccaucaucgaccacaaguucugcaaccucagcgacgcccacaagaagaaccuguacgaccacgcccugauguccaucaucagcaccuuccaccucuccauccccaacuucaaccaguacgaggccaugagcugcgacuucaacgggggcaagaucuccguccaguacaaccugagccacuccuacgccggggacgcggccaaccacugcggcacgguggccaacggggugcugcagaccuucaugcgcauggccuggggcggcagcuacaucgcgcucgacuccgggugcgagugggacugcaucaugaccagcuaccaguaccugaucauccagaacaccacgugggacaaccacugccaguucucccggcccagccccaucggcuaccuggggcuccugucccagcgcacccgggacaucuacaucagccgccggcgccggggcaccuucaccuggacgcugagcgacuccgagggcaaggacacccccgggggcuacugccucacccgcuggaugcugaucgaggccgagcugaagugcuucgggaacaccgccgucgccaagugcaacgagaagcacgacgaggaguucugcgacaugcuccggcuguucgacuucaacaagcaggccauccagcgccugaaggugccggcgcagaugagcauccagcucaucaacaaggccgugaacgcccugaucaacgaccagcugaucaugaagaaccaccuccgggacaucaugugcauccccuacugcaacuacuccaaguacugguaccugaaccacacgaccaccggcaagaccagccugcccaagugcuggcucgucuccaacgggagcuaccugaacgagacgcacuucuccgacgacaucgagcagcaggccgacaacaugaucaccgagaugcugcagaaggaguacauggagcgccagggcaagaccccgcucggccugguggaccuguucguguucagcaccuccuucuaccucaucagcaucuuccugcaccuggucaagauccccacgcaccggcacaucguggggaaguccugccccaagccccaccgccugaaccacaugggcaucugcagcugcggguucuacaagcagccgggcgugcccgucaaguggaagcgguga

SEQ ID NO: 4524 - RNA, 1476 nt, Artificial Sequence
  derived and/or modified protein sequence (opt1) from LASV(G2405-SLE-2012;Clade IV)__AIT17284__GPCstabilized
augggccagaucgugaccuucuuccaggaggucccccacgugaucgaggaggugaugaacaucguccugaucgcccucagcgugcuggccgugcugaaggggcucuacaacuucgcgaccugcggcaucgucgggcuggugacguuccugcuccugugcggccgcuccugcaccaccagccuguacaaggggguguacgagcuccagacccuggagcugaacauggagacgcucaacaugaccaugccgcuguccugcaccaagaacaacagccaccacuacaucauggucggcaacgacaccggccuggagcucacgcugaccaacaccuccaucaucaaccacaaguucugcaaccugagcgacgcccacaagaagaaccucuacgaccacgcccugauguccaucaucagcaccuuccaccuguccauccccaacuucaaccaguacgaggccaugagcugcgacuucaacgggggcaagaucuccgugcaguacaaccucagccacuccuacgccggggacgcggccgaccacugcggcacgguggccaacgggguccugcagaccuucaugcggauggccuggggcggcagcuacaucgcgcuggacuccgggugcggccgcugggacugcaucaugaccagcuaccaguaccucaucauccagaacaccacgugggaggaccacugccaguucucccggcccagccccaucggguaccugggccugcucucccagcgcacccgggacaucuacaucagccgccggcgccggggcaccuucaccuggacgcugagcgacuccgaggggaaggacaccccgggcggguacugccugacccgcuggaugcucaucgaggccgagcugaagugcuucggcaacaccgccguggccaagugcaacgagaagcacgacgaggaguucugcgacaugcugcggcuguucgacuucaacaagcaggccauccagcgccugaaggcgcccgcccagaugagcauccagcugaucaacaaggccgugaacgcccucaucaacgaccagcugaucaugaagaaccaccuccgggacaucaugugcauccccuacugcaacuacuccaaguacugguaccucaaccacacgaccaccgggaagaccagccugcccaagugcuggcuggucuccaacggcagcuaccucaacgagacgcacuucuccgacgacaucgagcagcaggccgacaacaugaucaccgagaugcugcagaaggaguacauggagcgccagggcaagaccccgcuggggcucguggaccuguucguguucagcaccuccuucuaccugaucagcaucuuccuccaccuggucaagauccccacgcaccggcacaucgugggcaagcccugccccaagccgcaccgccugaaccacauggggaucugcuccugcggccuguacaagcagcccggggugcccgucaaguggaagcgguga

SEQ ID NO: 4525 - RNA, 1476 nt, Artificial Sequence
  derived and/or modified protein sequence (opt1) from LASV(G2427-SLE-2012;Clade IV)__AIT17288__GPCstabilized
augggccagaucgugaccuucuuccaggaggucccccacgugaucgaggaggugaugaacaucguccugaucgcccucagcauccuggccgugcugaaggggcucuacaacuucgcgaccugcggccugguggggcuggucacguuccuccugcugugcggccgcuccugcaccaccagccucuacaaggggguguacgagcugcagacccuggagcucaacauggagacgcugaacaugaccaugccgcuguccugcaccaagaacaacagccaccacuacaucauggugggcaacgagaccggccucgagcugacgcugaccaacaccuccaucaucaaccacaaguucugcaaccucagcgacgcccacaagaagaaccuguacgaccacgcccugauguccaucaucagcaccuuccaccucuccauccccaacuucaaccaguacgaggccaugagcugcgacuucaacgggggcaagaucuccguccaguacaaccugagccacuccuacgccguggacgcggccaaccacugcgggacgguggccaacggcguccugcagaccuucaugcggauggccuggggcgggggcuacaucgcgcucgacagcgggugcggcaacugggacugcaucaugaccuccuaccaguaccugaucauccagaacaccacgugggaggaccacugccaguucagccgccccucccccaucggguaccugggccuccugagccagcggacccgcgacaucuacaucucccggcgccggcgcggcaccuucaccuggacgcugagcgacagcgaggggaaggacaccccgggcggguacugccucacccgguggaugcugaucgaggccgagcugaagugcuucggcaacaccgccguggccaagugcaacgagaagcacgacgaggaguucugcgacaugcuccgccuguucgacuucaacaagcaggccauccagcggcugaaggcgcccgcccagauguccauccagcucaucaacaaggccgugaacgcccugaucaacgaccagcugaucaugaagaaccaccuccgcgacaucaugugcauccccuacugcaacuacagcaaguacugguaccugaaccacacggucaccgggaagaccucccugcccaagugcuggcucgugagcaacggcuccuaccugaacgagacccacuucagcgacgacaucgagcagcaggccgacaacaugaucacggagaugcugcagaaggaguacauggagcggcagggcaagaccccgcucgggcugguggaccuguucgucuucuccaccagcuucuaccucaucuccaucuuccugcaccuggugaagauccccacccaccgccacaucgugggcaagagcugccccaagccccaccggcugaaccacauggggaucugcuccugcggccucuacaagcagccggggguccccgugcgcuggaagcgguga

SEQ ID NO: 4526 - RNA, 1476 nt, Artificial Sequence
  derived and/or modified protein sequence (opt1) from LASV(G2431-SLE-2012;Clade IV)__AIT17292__GPCstabilized
augggccagaucgugaccuucuuccaggaggucccccacgugaucgaggaggugaugaacaucguccugaucgcccucagcaucauggccgugcugaaggggcuguacaacaucgcgaccugcggccucguggggcuggucacguuccugcuccugugcggccgcuccugcaccaccacccuguacaaggggguguacgagcuccagacgcuggagcugaacauggagacccucaacaugaccaugccgcugagcugcaccaagaacaacucccaccacuacaucauggugggcaacgagacgggccuggagcucacccugaccaacaccagcaucaucaaccacaaguucugcaaccuguccgacgcccacaagaagaaccucuacgaccacgcccugaugagcaucaucuccacguuccaccugagcauccccaacuucaaccaguacgaggccauguccugcgacuucaacgggggcaagaucagcguccaguacaaccucucccacagcuacgccggggacgcggccaaccacugcggcaccguggccaacggggugcugcagaccuucaugcggauggccuggggcggcuccuacaucgcgcuggacagcgggugcggcgggugggacugcaucaugaccuccuaccaguaccucaucauccagaacacgaccugggaggaccacugccaguucacccgccccagccccaucggcuaccugggccugcucucccagcggacccgcgacaucuacaucagccggcgccggcgcgggacguucaccuggacccuguccgacagcgagggcaacgacacccccgggggcuacugccugacgcgguggaugcucaucgaggccgagcugaagugcuucgggaacaccgccgucgccaagugcaacgagaagcacgacgaggaguucugcgacaugcugcgccucuucgacuucaacaagcaggccauccagcggcugcgcgcgccggcccagaugagcauccagcugaucaacaaggccgugaacgcccucaucaacgaccagcugaucaugaagaaccaccuccgggacaucaugugcauccccuacugcaacuacuccaaguacugguaccugaaccacaccaccacgggccgcaccagccugccccggugcuggcugguguccaacggcagcuaccucaacgagacccacuucuccgacgacaucgagcagcaggccgacaacaugaucaccgagaugcugcagaaggaguacauggagcgccaggggaagacgccgcugggccucgucgaccuguucguguucagcaccuccuucuaccugaucagcaucuuccuccaccugaucaagauccccacccaccggcacaucguggggaagcccugccccaagccgcaccgccugaaccacaugggcgucugcuccugcgggcuguacaagcagcccggcgugcccgugcgguggaagcgcuga

SEQ ID NO: 4527 - RNA, 1476 nt, Artificial Sequence
  derived and/or modified protein sequence (opt1) from LASV(G2511-SLE-2012;Clade IV)__AIT17294__GPCstabilized
augggccagaucgugaccuucuuccaggaggucccccacgugaucgaggaggugaugaacaucguccugaucgcccucagcauccuggccgugcugaaggggcucuacaaccuggcgaccugcggccugguggggcucgucacguuccugcugcucugcggccgcuccugcaccaccagccuguacaaggggguguacgagcugcagacccucgagcugaacauggagacgcugaacaugaccaugccgcucuccugcaccaagaacaacagccaccacuacaucauggugggcaacgagaccggccuggagcugacgcucaccaacaccuccaucaucgaccacaaguucugcaaccugagcgacgcccacaagaagaaccuguacgaccacgcccucauguccaucaucagcaccuuccaccuguccauccccaacuucaaccaguacgaggccaugagcugcgacuucaacgggggcaagaucuccguccaguacaaccugagccacuccuacgccggggacgcggccaaccacugcggcacgguggccaacggggugcuccagaccuucaugcggauggccuggggcggcagcuacaucgcgcuggacuccgggugcggcgggugggacugcaucaugaccagcuaccaguaccugaucauccagaacaccacgugggaggaccacugccaguucucccgccccagccccgucggcuaccucggccugcugucccagcggacccgcgacaucuacaucagccggcgccggcgcgggaccuucaccuggacgcucagcgacuccgagggcaaggacacccccgggggcuacugccugacccgguggaugcugaucgaggccgagcucaagugcuucgggaacaccgccguggccaagugcaacgagaagcacgacgaggaguucugcgacaugcugcgccuguucgacuucaacaagcaggccauccagcggcucaagacgccggcgcagaugagcauccagcugaucaacaaggccgugaacgcccugaucaacgaccagcucaucaugaagaaccaccuccgcgacaucaugugcauccccuacugcaacuacuccaaguacugguaccugaaccacaccaccaccggcaagacgagccugccccggugcuggcuggucuccaacggcagcuaccugaacgagacccacuucuccgacgacaucgagcagcaggccgacaacaugaucaccgagaugcuccagaaggaguacauggagcgccaggggaagaccccgcugggccugguggaccucuucguguucagcacguccuucuaccugaucagcaucuuccugcaccuggucaagauccccacccaccggcacaucguggggaagcccugccccaagccgcaccgccucaaccacaugggcaucugcuccugcgggcuguacaagcagcccggcgugcccgucaaguggaagcgguga

SEQ ID NO: 4528 - RNA, 1476 nt, Artificial Sequence
  derived and/or modified protein sequence (opt1) from LASV(G2554-SLE-2012;Clade IV)__AIT17298__GPCstabilized
augggccagaucgugaccuucuuccaggaggucccccacgugaucgaggaggugaugaacaucguccugaucgcccucagcauccuggccgugcugaaggggcucuacaacaucgcgaccugcggccugcuggggcucgugugcuuccugcugcucugcggccgcuccugcacgaccagccuguacaagggggucuacgagcugcagacccucgagcugaacauggagacccugaacaugacgaugccgcucuccugcaccaagaacaacagccaccacuacaucauggugggcaacgagaccggccuggagcugacccucacgaacaccuccaucaucaaccacaaguucugcaaccugagcgacgcccacaagaagaaccuguacgaccacgcccucauguccaucaucagcaccuuccaccuguccauccccaacuucaaccaguacgaggccaugagcugcgacuucaacgggggcaagaucuccgugcaguacaaccugagccacuccuacgccgucgacgcggccagccacugcgggaccaucgccaacggcgugcuccagacguucaugcggauggccuggggcggguccuacaucgcgcuggacagcggcugcgggggcugggacugcaucaugaccuccuaccaguaccugaucauccagaacaccaccugggaggaccacugccaguucagccgccccucccccaucggguaccucggccugcugagccagcggacgcgcgacaucuacaucagccggcgccggcgcggcaccuucaccuggacccucuccgacagcgaggggaaggacacgccgggcggguacugccugacccgguggaugcugaucgaggccgagcucaagugcuucggcaacaccgccguggccaagugcaacgagaagcacgacgaggaguucugcgacaugcugcgccuguucgacuucaacaagcaggccauccagcggcucaaggcgcccgcccagauguccauccagcugaucaacaaggccgucaacgcccugaucaacgaccagcucaucaugaagaaccaccuccgcgacaucaugugcauccccuacugcaacuacagcaaguacugguaccugaaccacaccacgaccgggaagaccucccugcccaagugcuggcuggugagcaacggcuccuaccugaacgagacccacuucagcgacgacaucgagcagcaggccgacaacaugaucacggagaugcuccagaaggaguacauggagcggcagggcaagaccccgcuggggcugguggaccucuucgucuucuccaccagcuucuaccugaucuccaucuuccugcaccuggugaagauccccacccaccgccacguggucggcaagcccugccccaagccgcaccggcucaaccacauggggaucugcagcugcggccuguacgggcagcccggcgugcccgugaaguggaagcgcuga

SEQ ID NO: 4529 - RNA, 1476 nt, Artificial Sequence
  derived and/or modified protein sequence (opt1) from LASV(G2557-SLE-2012;Clade IV)__AIT17302__GPCstabilized
augggccagaucgugaccuucuuccaggaggucccccacgugaucgaggaggugaugaacaucguccugaucgcccucagccugcuggccgugcucaaggggcuguacaacguggcgaccugcggccugaucgggcucgucacguuccugcugcucugcggccgcuccugcaccaccaaccuguacaaggggguguacgagcugcagacccucgagcugaacauggagacgcugaacaugaccaugccgcucagcugcaccaagaacaacucccaccacuacaucauggugggcaacgagaccggccuggagcugacgcucaccaacaccagcaucaucucccacaaguucugcaaccugagcgacgcccacaagaagaaccuguacgaccacacccucauguccaucaucagcacguuccaccuguccauccccaacuucaaccaguacgaggccaugagcugcgacuucaacgggggcaagaucuccguccaguacaaccugagccacuccuacgccguggacgccgcgaaccacugcgggaccguggccaacggcguccuccagaccuucaugcggauggccuggggcgggagcuacaucgcccuggacuccggcugcgggaacugggacugcaucaugaccagcuaccaguaccugaucauccagaacacgaccugggaggaccacugccaguucucccgccccagccccaucggcuaccucgggcugcugucccagcggacccgcgacaucuacaucagccggcgccggcgcggcaccuucacguggacccucagcgacuccgagggcaacgacacccccgggggcuacugccugacccgguggaugcugaucgaggcggagcucaagugcuucgggaacacggccguggccaagugcaacgagaagcacgacgaggaguucugcgacaugcugcgccuguucgacuucaacaagcaggccauccagcggcucaaggccccggcgcagaugagcauccagcugaucaacaaggccgugaacgcccugaucaacgaccagcucaucaugaagaaccaccuccgcgacaucaugugcauccccuacugcaacuacuccaaguacugguaccugaaccacaccaccaccggcaagacgagccugcccaagugcuggcuggucuccaacgggagcuaccugaacgagacccacuucuccgacgacaucgagcagcaggccgacaacaugaucaccgagaugcuccagaaggaguacauggagcggcagggcaagaccccgcugggccugguggaccucuucguguucagcacguccuucuaccugaucagcaucuuccugcaccuggucaagauccccacccaccgccacaucguggggaagcccugccccaagccgcaccggcucaaccacaugggcaucugcuccugcgggcuguacaagcagcccggcgugcccguccgcuggaagcgguga

SEQ ID NO: 4530 - RNA, 1476 nt, Artificial Sequence
  derived and/or modified protein sequence (opt1) from LASV(G2587-SLE-2012;Clade IV)__AIT17310__GPCstabilized
augggccagaucgugaccuucuuccaggaggucccccacgugaucgaggaggugaugaacaucguccugaucgcccucagcauccuggccgugcugaaggggcucuacaaccuggcgaccugcggccugguggggcucgucacguuccugcugcucugcggccgcuccugcaccaccagccuguacaaggggguguacgagcugcagacccucgagcugaacauggagacgcugaacaugaccaugccgcucuccugcaccaagaacaacagccaccacuacaucauggugggcaacgagaccggccuggagcugacgcucaccaacaccuccaucaucaaccacaaguucugcaaccugagcgacgcccacaagaagaaccuguacgaccacgcccucauguccaucaucagcaccuuccaccuguccauccccaacuucaaccaguacgaggccaugagcugcgacuucaacgggggcaagaucuccguccaguacaaccugagccacuccuacgccggggacgcggccacgcacugcggcaccguggccaacggggugcuccagaccuucaugcggauggccuggggcggcagcuacaucgcgcuggacuccgggugcggcaagugggacugcaucaugaccagcuaccaguaccugaucauccagaacacgaccugggaggaccacugccaguucucccgccccagccccaucggguaccucggccugcugucccagcggacccgcgacaucuacaucagccggcgccggcgcggcaccuucacguggacccucagcgacuccgaggggaaggacaccccgggcggguacugccugacccgguggaugcugaucgaggccgagcucaagugcuucggcaacacggccgucgccaagugcaacgagaagcacgacgaggaguucugcgacaugcugcgccuguucgacuucaacaagcaggccauccagcggcucaagacccccgcgcagaugagcauccagcugaucaacaaggccgugaacgcccugaucaacgaccagcucaucaugaagaaccaccuccgcgacaucaugugcauccccuacugcaacuacuccaaguacugguaccugaaccacaccaccacggggaagaccagccugccccggugcuggcugguguccaacggcagcuaccugaacgagacccacuucuccgacgacaucgagcagcaggccgacaacaugaucaccgagaugcuccagaaggaguacauggagcgccagggcaagacgccgcuggggcuggucgaccucuucguguucagcaccuccuucuaccugaucagcaucuuccugcaccuggugaagauccccacccaccggcacaucgucggcaagcccugccccaagccgcaccgccucaacuacauggggaucugcuccugcggccuguacaagcagcccggggugcccgugaaguggaagcgguga

SEQ ID NO: 4531 - RNA, 1476 nt, Artificial Sequence
  derived and/or modified protein sequence (opt1) from LASV(G2612-SLE-2012;Clade IV)__AIT17314__GPCstabilized
augggccagaucgugaccuucuuccaggaggucccccacgugaucgaggaggugaugaacaucguccugaucacccucagcauccuggccgugcugaaggggcucuacaacguggccacgugcggccuggucgggcuggugaccuuccuccugcugugcggccgcuccugcaccaccagccucuacaaggggguguacgagcugcagacgcuggagcucaacauggagacccugaacaugaccaugccgcuguccugcaccaagaacaacagccaccacuacaucauggucggcaacgagacgggccucgagcugacccugaccaacaccuccaucaucaaccacaaguucugcaaccucagcgacgcgcacaagaaggaccuguacgaccacgcccugauguccaucaucagcacguuccaccucuccauccccaacuucaaccaguacgaggccaugagcugcgacuucaacgggggcaagaucuccgugcaguacaaccugagccacuccuacgccguggacgccgcgaaccacugcgggaccgucgccaacggcgugcugcagaccuucaugcggauggccuggggcgggagcuacaucgcccucgacuccggcugcgggggcugggacugcaucaugaccagcuaccaguaccugaucauccagaacacgaccugggaggaccacugccaguucucccgccccagccccaucggguaccugggccuccugucccagcggacccgcgacaucuacaucagccggcgccggcgcggcaccuucacguggacccugagcgacuccgaggggaacgacaccccgggcggguacugccucacccgguggaugcugaucgaggcggagcugaagugcuucggcaacacggccguggccaagugcaacgagaagcacgacgaggaguucugcgacaugcuccgccuguucgacuucaacaagcaggccauccagcggcugaaggcccccgcgcagaugagcauccagcucaucaacaaggccgucaacgcccugaucaacgaccagcugaucaugaagaaccaccuccgcgacaucaugugcauccccuacugcaacuacuccaaguacugguaccugaaccacaccaccaccgggaagacgagccugcccaagugcuggcucguguccaacggcagcuaccugaacgagacccacuucuccgacgacaucgagcagcaggccgacaacaugaucaccgagaugcugcagaaggaguacauggagcggcagggcaagaccccgcucgggcugguggaccuguucgucuucagcacguccuucuaccucaucagcaucuuccugcaccuggugaagauccccacccaccgccacaucgugggcaagcccugccccaagccgcaccggcugaaccacauggggaucugcuccugcggccucuacaagcagcccgggguccccgugaaguggaagcgcuga

SEQ ID NO: 4532 - RNA, 1476 nt, Artificial Sequence
  derived and/or modified protein sequence (opt1) from LASV(G2615-SLE-2012;Clade IV)__AIT17318__GPCstabilized
augggccagaucgugaccuucuuccaggaggucccccacgugaucgaggaggugaugaacaucguccugaucgcccucagccugcuggccgugcucaaggggcuguacaacguggcgaccugcggccugaucgggcucgucacguuccugcugcucugcggccgcuccugcaccaccaaccuguacaaggggguguacgagcugcagacccucgagcugaacauggagacgcugaacaugaccaugccgcucagcugcaccaagaacaacucccaccacuacaucauggugggcaacgagaccggccuggagcugacgcucaccaacaccagcaucaucaaccacaaguucugcaaccuguccgacgcccacaagaagaaccuguacgaccacgcccucaugagcaucaucuccaccuuccaccugagcauccccaacuucaaccaguacgaggccauguccugcgacuucaacgggggcaagaucagcguccaguacaaccugucccacagcuacgccguggacgcggccaaccacugcgggacgguggccaacggcguccuccagaccuucaugcggauggccuggggcggguccuacaucgcgcuggacagcggcugcgggaacugggacugcaucaugaccuccuaccaguaccugaucauccagaacaucaccugggaggaccacugccaguucagccgccccucccccaucggcuaccucgggcugcugagccagcggacgcgcgacaucuacaucucccggcgccggcgcggcaccuucaccuggacccucagcgacagcgagggcaacgacacgcccgggggcuacugccugacccgguggaugcugaucgaggccgagcucaagugcuucgggaacaccgccguggccaagugcaacgagaagcacgacgaggaguucugcgacaugcugcgccuguucgacuucaacaagcaggccauccagcggcucaaggcgccggcccagauguccauccagcugaucaacaaggccgugaacgcccugaucaacgaccagcucaucaugaagaaccaccuccgcgacaucaugugcauccccuacugcaacuacagcaaguacugguaccugaaccacaccacgaccggcaagaccucccugcccaagugcuggcuggucagcaacggguccuaccugaacgagacccacuucagcgacgacaucgagcagcaggccgacaacaugaucacggagaugcuccagaaggaguacauggagcggcagggcaagaccccgcugggccugguggaccucuucguguucuccaccagcuucuaccugaucuccaucuuccugcaccuggucaagauccccacccaccgccacaucguggggaagcccugccccaagccgcaccggcucaaccacaugggcaucugcagcugcgggcuguacaagcagcccggcgugcccguccgcuggaagcgguga

SEQ ID NO: 4533 - RNA, 1476 nt, Artificial Sequence
  derived and/or modified protein sequence (opt1) from LASV(G2723-SLE-2012;Clade IV)__AIT17322__GPCstabilized
augggccagaucgugaccuucuuccaggaggucccccacgugaucgaggaggugaugaacaucguccugaucgcccucagccugcuggccgugcucaaggggcuguacaacguggcgaccugcggccugaucgggcucgucacguuccugcugcucugcggccgcuccugcaccaccaaccuguacaagggggccuacgagcugcagacccucgagcugaacauggagacgcugaacaugaccaugccgcucagcugcaccaagaacaacucccaccacuacaucauggugggcaacgagaccggccuggagcugacgcucaccaacaccagcaucaucaaccacaaguucugcaaccuguccgacgcccacaagaagaaccuguacgaccacacccucaugagcaucaucuccacguuccaccugagcauccccaacuucaaccaguacgaggccauguccugcgacuucaacgggggcaagaucagcgugcaguacaaccugucccacagcuacgccgucgacgcggccaaccacugcgggaccguggccaacggcgugcuccagaccuucaugcggauggccuggggcggguccuacaucgcgcuggacagcggcugcgggaacugggacugcaucaugaccuccuaccaguaccugaucauccagaacacgaccugggaggaccacugccaguucagccgccccucccccaucggcuaccucgggcugcugagccagcggacccgcgacaucuacaucucccggcgccggcgcggcaccuucacguggacccucagcgacagcgagggcaacgacacccccgggggcuacugccugacccgguggaugcugaucgaggccgagcucaagugcuucgggaacacggccgucgccaagugcaacgagaagcacgacgaggaguucugcgacaugcugcgccuguucgacuucaacaagcaggccauccagcggcucaaggcgccggcccagauguccauccagcugaucaacaaggccgugaacgcccugaucaacgaccagcucaucaugaagaaccaccuccgcgacaucaugugcauccccuacugcaacuacagcaaguacugguaccugaaccacaccaccaccggcaagacgucccugcccaagugcuggcuggugagcaacggguccuaccugaacgagacccacuucagcgacgacaucgagcagcaggccgacaacaugaucaccgagaugcuccagaaggaguacauggagcggcagggcaagaccccgcugggccuggucgaccucuucguguucuccacgagcuucuaccugaucuccaucuuccugcaccuggugaagauccccacccaccgccacaucgucgggaagcccugccccaagccgcaccggcucaaccacaugggcaucugcagcugcgggcuguacaagcagcccggcgugcccgugcgcuggaagcgguga

SEQ ID NO: 4534 - RNA, 1476 nt, Artificial Sequence
  derived and/or modified protein sequence (opt1) from LASV(G2868-SLE-2012;Clade IV)__AIT17328__GPCstabilized
augggccagaucgugaccuucuuccaggaggucccccacgugaucgaggaggugaugaacaucguccugaucacccucagcauccuggccgugcugaaggggcucuacaacaucgccacgugcggccugguggggcuggucaccuuccuccugcugugcggcaaguccugcaccaccagccucuacaaggggguguacgagcugcagacgcuggagcucaacauggagacccugaacaugaccaugccgcuguccugcaccaagaacaacagccaccacuacauccgcgugggcaacgagacgggccucgagcugacccugaccaacaccuccaucaucaaccacaaguucugcaaccucagcgacgcgcacaagaagaaccuguacgaccacgcccugauguccaucaucagcacguuccaccucuccauccccaacuucaaccaguacgaggccaugagcugcgacuucaacgggggcaagaucuccguccaguacaaccugagccacuccuacgccguggacgccgcgaaccacugcgggaccguggccaacggcguccugcagaccuucaugcggauggccuggggcgggagcuacaucgcccucgacuccggcugcgggaacugggacugcaucaugaccagcuaccaguaccugaucauccagaacacgaccugggaggaccacugccaguucucccgccccagccccaucggcuaccuggggcuccugucccagcggacccgcgacaucuacaucagccggcgccggcgcggcaccuucacguggacccugagcgacuccgagggcaacgacgcgcccgggggcuacugccucacccgguggaugcugaucgaggccgagcugaagugcuucgggaacaccgccguggccaagugcaacgagaagcacgacgaggaguucugcgacaugcuccgccuguucgacuucaacaagcaggccauccagcggcugaaggcgccggcccagaugagcauccagcucaucaacaaggccgugaacgcccugaucaacgaccagcugaucaugaagaaccaccuccgcgacaucaugugcauccccuacugcaacuacuccaaguacugguaccugaaccacacgaccaccggcaagaccagccugcccaagugcuggcucgucuccaacgggagcuaccugaacgagacgcacuucuccgacgacaucgagcagcaggccgacaacaugaucaccgagaugcugcagaaggaguacauggagcggcagggcaagaccccgcucggccugguggaccuguucguguucagcaccuccuucuaccucaucagcaucuuccugcaccuggucaagauccccacgcaccgccacgugguggggaaguccugccccaagccccaccggcugaaccacaugggcaucugcagcugcgggcucuacaagcagccgggcguccccgugaaguggaagcgcuga

SEQ ID NO: 4535 - RNA, 1476 nt, Artificial Sequence
  derived and/or modified protein sequence (opt1) from LASV(G2903-SLE-2012;Clade IV)__AIT17332__GPCstabilized
augggccagaucgugaccuucuuccaggaggucccccacgugaucgaggaggugaugaacaucguccugaucgcccucagcauccuggccgugcugaaggggcucuacaaccuggcgaccugcggccugguggggcucgucacguuccugcugcucugcggccgcuccugcaccaccagccuguacaaggggguguacgagcugcagacccucgagcugaacauggagacgcugaacaugaccaugccgcucuccugcaccaagaacaacagccaccacuacauccgggugggcaacgagaccggccuggagcugacgcucaccaacaccuccaucaucaaccacaaguucugcaaccugagcgacgcccacaagaagaaccuguacgaccacgcccucauguccaucaucagcaccuuccaccuguccauccccaacuucaaccaguacgaggccaugagcugcgacuucaacgggggcaagaucuccguccaguacaaccugagccacuccuacgccguggacgcggccaaccacugcgggacgguggccaacggcguccuccagaccuucaugcgcauggccuggggcgggagcuacaucgcgcuggacuccggcugcgggcggugggacugcaucaugaccagcuaccaguaccugaucauccagaacaccacgugggaggaccacugccucuucucccgccccagccccaucggcuaccuggggcugcucucccagcggacccgcgacaucuacaucagccggcgccggcgcggcaccuucaccuggacgcugagcgacuccgagggccgggacacccccgggggcuacugccugacccgcuggaugcucaucgaggccgagcugaagugcuucgggaacaccgccguggccaagugcaacgagaagcacgacgaggaguucugcgacaugcugcggcuguucgacuucaacaagcaggccauccagcgccugaaggcgccggcccagaugagcauccagcugaucaacaaggccgugaacgcccucaucaacgaccagcugaucaugaagaaccaccuccgggacaucaugugcauccccuacugcaacuacuccaaguacugguaccucaaccacacgaccaccggccgcaccagccugccccggugcuggcuggucuccaacgggagcuaccucaacgagacgcacuucuccgacgacaucgagcagcaggccgacaacaugaucaccgagaugcugcagaaggaguacauggagcgccagggcaagaccccgcugggccucguggaccuguucguguucagcaccuccuucuaccugaucagcaucuuccugcaccucgucaagauccccacgcaccggcacaucguggggaaguccugccccaagccccaccgccugaaccacaugggcaucugcagcugcgggcuguacaagcagccgggcgugcccgucaaguggaagcgguga

SEQ ID NO: 4536 - RNA, 1476 nt, Artificial Sequence
  derived and/or modified protein sequence (opt1) from LASV(G2944-SLE-2012;Clade IV)__AIT17340__GPCstabilized
augggccagaucgugaccuucuuccaggaggucccccacgugaucgaggaggugaugaacaucguccugaucgcccucagcauccuggccgugcugaaggggcucuacaacuucgcgaccugcggccugguggggcuggucacguuccuccugcugugcggccgcuccugcaccaccagccucuacaaggggguguacgagcugcagacccuggagcucaacauggagacgcugaacaugaccaugccgcuguccugcaccaagaacaacagccaccacuacaucauggugggcaacgagaccggccucgagcugacgcugaccaacaucuccaucaucaaccacaaguucugcaaccucagcgacgcccacaagaagaaccuguacgaccacgcccugauguccaucaucagcaccuuccaccucuccauccccaacuucaaccaguacgaggccaugagcugcgacuucaacgggggcaagaucuccguccaguacaaccugagccacuccuacgccggggacgcggccaaccacugcggcaccguggccaacggggugcugcagacguucaugcggauggccuggggcggcagcuacaucgcgcucgacuccgggugcggcgagugggacugcaucaugaccagcuaccaguaccugaucauccagaacaccaccugggaggaccacugccaguucucccgccccagccccaucggguaccugggccuccugucccagcggacgcgcgacaucuacaucagccggcgccggcgcggcaccuucaccuggacccugagcgacuccgaggggaaggacacgccgggcggguacugccucacccgguggaugcugaucgaggccgagcugaagugcuucggcaacaccgccgucgccaagugcaacgagaagcacgacgaggaguucugcgacaugcuccgccuguucgacuucaacaagcaggccauccagcggcugaaggcgcccgcccagaugagcauccagcucaucaacaaggccgugaacgcccugaucaacgaccagcugaucaugaagaaccaccuccgcgacaucaugugcauccccuacugcaacuacuccaaguacugguaccugaaccacaccacgaccgggaagaccagccugcccaagugcuggcucguguccaacggcagcuaccugaacgagacccacuucuccgacgacaucgagcagcaggccgacaacaugaucacggagaugcugcagaaggaguacauggagcggcagggcaagaccccgcucgggcuggucgaccuguucguguucagcaccuccuucuaccucaucagcaucuuccugcaccuggugaagauccccacccaccgccacaucgucggcaagcccugcccccggccgcaccgccugaaccacauggggaucugcuccugcggccucuacaagcagcccggggugcccgugaaguggaagcgguga

SEQ ID NO: 4537 - RNA, 1476 nt, Artificial Sequence
  derived and/or modified protein sequence (opt1) from LASV(G3010-SLE-2013;Clade IV)__AIT17344__GPCstabilized
augggccagaucgugaccuucuuccaggaggucccccacgugaucgaggaggugaugaacaucguccugaucgcccucagcauccuggccgugcugaaggggcucuacaacuucgcgaccugcggccugguggggcuggucacguuccuccugcugugcggccgcuccugcaccaccagccucuacaaggggguguacgagcugcagacccuggagcucaacauggagacgcugaacaugaccaugccgcuguccugcaccaagaacaacagccaccacuacaucauggugggcaacgagaccggccucgagcugacgcugaccaacaccuccaucaucaaccacaaguucugcaaccucagcgacgcccacaagaagaaccuguacaaccacgcccugauguccaucaucagcaccuuccaccucuccauccccaacuucaaccaguacgaggccaugagcugcgacuucaacgggggcaagaucuccguccaguacaaccugagccacuccuacgccggggacgcggccagccacugcggcacgguggccaacggggugcugcagaccuucaugcggauggccuggggcggcuccuacaucgcgcucgacagcgggugcggcaagugggacugcaucaugaccuccuaccaguaccugaucauccagaacaccacgugggaggaccacugccaguucagccgccccucccccaucggguaccugggccuccugagccagcggacccgcgacaucuacaucagccggcgccggcgcggcaccuucaccuggacgcuguccgacagcgaggggaaggacaccccgggcggguacugccucacccgguggaugcugaucgaggccgagcugaagugcuucggcaacaccgccgucgccaagugcaacgagaagcacgacgaggaguucugcgacaugcuccgccuguucgacuucaacaagcaggccauccagcggcugaagacgcccgcgcagauguccauccagcucaucaacaaggccgugaacgcccugaucaacgaccagcugaucaugaagaaccaccuccgcgacaucaugugcauccccuacugcaacuacagcaaguacugguaccugaaccacaccaccaccgggaagacgucccugcccaagugcuggcucgugagcaacggcuccuaccugaacgagacccacuucagcgacgacaucgagcagcaggccgacaacaugaucaccgagaugcugcagaaggaguacauggagcggcagggcaagaccccgcucgggcuggucgaccuguucguguucuccacgagcuucuaccucaucuccaucuuccugcaccuggugaagauccccacccaccgccacaucgucggcaagagcugccccaagccccaccggcugaaccacauggggaucugcuccugcggccucuacaagcagccgggggugcccgugcgcuggaagcgguga

SEQ ID NO: 4538 - RNA, 1476 nt, Artificial Sequence
  derived and/or modified protein sequence (opt1) from LASV(G3016-SLE-2013;Clade IV)__AIT17348__GPCstabilized
augggccagaucgugaccuucuuccaggaggucccccacgugaucgaggaggugaugaacaucguccugaucgcccucagcauccuggccgugcugaaggggcucuacaacaucgcgaccugcggccugaucgggcuggugacguuccuccugcugugcggccgcuccugcaccaccagccucuacaagggggucuacgagcugcagacccuggagcucaacauggagacgcugaacaugaccaugccgcuguccugcaccaagaacaacagccaccacuacaucauggugggcaacgagaccggccucgagcugacgcugaccaacaccuccaucaucaaccacaaguucugcaaccucagcgacgcccacaagaagaaccuguacgaccacgcccugauguccaucaucagcaccuuccaccucuccauccccaacuucaaccaguacgaggccaugagcugcgacuucaacgggggcaagaucuccgugcaguacaaccugagccacuccuacgccggggacgcggccaaccacugcggcacggucgccaacggggugcugcagaccuucaugcggauggccuggggcggcagcuacaucgcgcucgacuccgggugcggccgcugggacugcaucaugaccagcuaccaguaccugaucauccagaacaccacgugggaggaccacugccaguucucccggcccagccccaucggguaccugggccuccugucccagcgcacccgggacaucuacaucagccgccggcgccggggcaccuucaccuggacgcugagcgacuccgaggggaacgacaccccgggcggguacugccucacccgcuggaugcugaucgaggccgagcugaagugcuucggcaacaccgccguggccaagugcaacgagaagcacgacgaggaguucugcgacaugcuccggcuguucgacuucaacaagcaggccauccagcgccugaaggcgcccgcccagaugagcauccagcucaucaacaaggccgucaacgcccugaucaacgaccagcugaucaugaagaaccaccuccgggacaucaugugcauccccuacugcaacuacuccaaguacugguaccugaaccacacgaccaccgggaagaccagccugcccaagugcuggcucguguccaacggcagcuaccugaacgagacgcacuucuccgacgacaucgagcagcaggccgacaacaugaucaccgagaugcugcagaaggaguacauggagcgccagggcaagaccccgcucgggcugguggaccuguucgucuucagcaccuccuucuaccucaucagcaucuuccugcaccuggugaagauccccacgcaccggcacaucgugggcaagcccugccccaagccgcaccgccugaaccacauggggaucugcuccugcggccucuacaagcagcccgggguccccgugaaguggaagcgguga

SEQ ID NO: 4539 - RNA, 1476 nt, Artificial Sequence
  derived and/or modified protein sequence (opt1) from LASV(G3034-SLE-2013;Clade IV)__AIT17350__GPCstabilized
augggccagaucgugaccuucuuccaggaggucccccacgugaucgaggaggugaugaacaucguccugaucgcccucagcauccuggccgugcugaaggggcucuacaacguggcgaccugcggccugaucgggcuggucacguuccuccugcugugcggccgcuccugcaccaccacccucuacaaggggguguacgagcugcaggcccuggagcucaacauggagacgcugaacaugaccaugccgcugagcugcaccaagaacaacucccaccacuacaucauggugggcaacgagaccggccucgagcugacgcugaccaacaccagcaucaucgaccacaaguucugcaaccucuccgacgcccacaagaagaaccuguacgaccacgcccugaugagcaucaucuccaccuuccaccucagcauccccaacuucaaccaguacgaggccauguccugcgacuucaacgggggcaagaucagcguccaguacaaccugucccacagcuacgcgggggacgccgccaagcacugcggcacgguggccaacggggugcugcagaccuucaugcggauggcguggggcggcuccuacaucgcccucgacagcgggugcaacggcugggacugcgucaugaccuccuaccaguaccugaucauccagaacaccacgugggaggaccacugccaguucagccgccccucccccaucggguaccugggccuccugagccagcggacccgcgacaucuacaucucccggcgccggcgcggcaccuucaccuggacgcugagcgacagcgaggggaaggacaccccgggcggguacugccucacccgguggaugcugaucgaggccgagcugaagugcuucggcaacaccgccguggccaagugcaacgagaagcacgacgaggaguucugcgacaugcuccgccuguucgacuucaacaagcaggcgauccagcggcugaagacgcccgcccagauguccauccagcucaucaacaaggccgugaacgcccugaucaacgaccagcugaucaugaagaaccaccuccgcgacaucaugugcauccccuacugcaacuacagcaaguacugguaccugaaccacaccgucaccgggaagaccucccugccccggugcuggcucgugagcaacggcuccuaccugaacgagacgcacuucagcgacgacaucgagcagcaggccgacaacaugaucaccgagaugcugcagaaggaguacaucgagcgccagggcaagaccccgcucgggcugguggaccuguucgucuucuccaccagcuucuaccucaucuccaucuuccugcaccuggugaagauccccacgcaccggcacaucaucggcaagcccugccccaagccgcaccgccugaaccacauggggaucugcagcugcggccucuacaagcagcccggggugcccguccgguggaagcgcuga

SEQ ID NO: 4540 - RNA, 1476 nt, Artificial Sequence
  derived and/or modified protein sequence (opt1) from LASV(G3101-SLE-2013;Clade IV)__AIT17354__GPCstabilized
augggccagaucgugaccuucuuccaggaggucccccacgugaucgaggaggugaugaacaucguccugaucgcccucagcauccuggccgugcugaaggggcucuacaacuucgcgaccugcggccugguggggcuggucacguuccuccugcugugcggccgcuccugcaccaccagccucuacaaggggguguacgagcugcagacccuggagcucaacauggagacgcugaacaugaccaugccgcuguccugcaccaagaacaacagccaccacuacaucauggugggcaacgagaccggccucgagcugacgcugaccaacaucuccaucaucaaccacaaguucugcaaccucagcgacgcccacaagaagaaccuguacgaccacgcccugauguccaucaucagcaccuuccaccucuccauccccaacuucaaccaguacgaggccaugagcugcgacuucaacgggggcaagaucuccguccaguacaaccugagccacuccuacgccggggacgcggccaaccacugcggcaccguggccaacggggugcugcagacguucaugcggauggccuggggcggcagcuacaucgcgcucgacuccgggugcggcgggugggacugcaucaugaccagcuaccaguaccugaucauccagaacaccaccugggaggaccacugccaguucucccgccccagccccaucggcuaccugggccuccugucccagcggacgcgcgacaucuacaucagccggcgccggcgcgggaccuucaccuggacccugagcgacuccgagggcaaggacacgcccgggggcuacugccucacccgguggaugcugaucgaggccgagcugaagugcuucgggaacaccgccgucgccaagugcaacgagaagcacgacgaggaguucugcgacaugcuccgccuguucgacuucaacaagcaggccauccagcggcugaaggcgccggcccagaugagcauccagcucaucaacaaggccgugaacgcccugaucaacgaccagcugaucaugaagaaccaccuccgcgacaucaugugcauccccuacugcaacuacuccaaguacugguaccugaaccacaccacgaccggcaagaccagccugcccaagugcuggcucguguccaacggcagcuaccugaacgagacccacuucuccgacgacaucgagcagcaggccgacaacaugaucacggagaugcugcagaaggaguacauggagcggcaggggaagaccccgcucggccuggucgaccuguucguguucagcaccuccuucuaccucaucagcaucuuccugcaccuggugaagauccccacccaccgccacaucgucgggaagcccugcccccggccgcaccgccugaaccacaugggcaucugcuccugcgggcucuacaagcagcccggcgugcccgugaaguggaagcgguga

SEQ ID NO: 4541 - RNA, 1476 nt, Artificial Sequence
  derived and/or modified protein sequence (opt1) from LASV(G3110-SLE-2013;Clade IV)__AIT17360__GPCstabilized
augggccagaucgugaccuucuuccaggaggucccccacgugaucgaggaggugaugaacaucguccugaucgcccucagcauccuggccgugcugaaggggcucuacaacuucgcgaccugcggccugguggggcuggucacguuccuccugcugugcggccgcuccugcaccaccagccucuacaaggggguguacgagcugcagacccuggagcucaacauggagacgcugaacaugaccaugccgcuguccugcaccaagaacaacagccaccacuacauccgggugggcaacgagaccggccucgagcugacgcugaccaacaccuccaucaucaaccaccgcuucugcaaccucagcgacgcccacaagaagaaccuguacgaccacgcccugauguccaucaucagcaccuuccaccucuccauccccaacuucaaccaguacgaggccaugagcugcgacuucaacgggggcaagaucuccguccaguacaaccugagccacuccuacgccggggacgcggccaaccacugcggcacgguggccaacggggugcugcagaccuucaugcggauggccuggggcggcagcuacaucgcgcucgacuccgggugcggcaagugggacugcaucaugaccagcuaccaguaccugaucauccagaacaccacgugggacgaccacugccaguucucccgccccagccccaucggguaccugggccuccugucccagcggacccgcgacaucuacaucagccggcgccggcgcggcaccuucaccuggacgcugagcgacuccgaggggaaggacaccccgggcggguacugccucacccgguggaugcugaucgaggccgagcugaagugcuucggcaacaccgccgucgccaagugcaacgagaagcacgacgaggaguucugcgacaugcuccgccuguucgacuucaacaagcaggccauccggcgccugaaggcgcccgcccagaugagcauccagcucaucaacaaggccgugaacgcccugaucaacgaccagcugaucaugaagaaccaccuccgggacaucaugugcauccccuacugcaacuacuccaaguacugguaccugaaccacacgaccaccgggaagaccagccugccccgcugcuggcucguguccaacggcagcuaccugaacgagacgcacuucuccgacgacaucgagcagcaggccgacaacaugaucaccgagaugcugcagaaggaguacauggagcggcagggcaagaccccgcucgggcuggucgaccuguucguguucagcaccuccuucuaccucaucagcaucuuccugcaccuggugaagauccccacgcaccgccacaucgucggcaaguccugccccaagccccaccggcugaaccacauggggaucugcagcugcggcuucuacaagcagccgggggugcccgugaaguggaagcgcuga

SEQ ID NO: 4542 - RNA, 1476 nt, Artificial Sequence
  derived and/or modified protein sequence (opt1) from LASV(G3148-SLE-2013;Clade IV)__AIT17364__GPCstabilized
augggccagaucgugaccuucuuccaggaggucccccacgugaucgaggaggugaugaacaucguccugaucgcccucagcauccuggccgugcugaaggggcucuacaacuucgcgaccugcggccugguggggcuggucacguuccuccugcugugcggccgcuccugcaccaccagccucuacaaggggguguacgagcugcagacccuggagcucaacauggagacgcugaacaugaccaugccgcuguccugcaccaagaacaacagccaccacuacaucauggugggcaacgagaccggccucgagcugacgcugaccaacaccuccaucaucaaccacaaguucugcaaccucagcgacgcccacaagaagaaccuguacgaccacgcccugauguccaucaucagcaccuuccaccucuccauccccaacuucaaccaguacgaggccaugagcugcgacuucaacgggggcaagaucuccguccaguacaaccugagccacuccuacgccggggacgcggccaaccacugcggcacgguggccaacggggugcugcagaccuucaugcggauggccuggggcggcagcuacaucgcgcucgacuccgggugcgaccgcugggacugcaucaugaccagcuaccaguaccugaucauccagaacaccacgugggaggaccacugccaguucucccggcccagccccaucggcuaccuggggcuccugucccagcgcacccgggacaucuacaucagccgccggcgccggggcaccuucaccuggacgcugagcgacuccgagggcaaggacacccccgggggcuacugccucacccgcuggaugcugaucgaggccgagcugaagugcuucgggaacaccgccgucgccaagugcaacgagaagcacgacgaggaguucugcgacaugcuccggcuguucgacuucaacaagcaggccauccagcgccugaaggcgccggcccagaugagcauccagcucaucaacaaggccgugaacgcccugaucaacgaccagcugaucaugaagaaccaccuccgggacaucaugugcauccccuacugcaacuacuccaaguacugguaccugaaccacacgaccaccggcaagaccagccugcccaagugcuggcucguguccaacgggagcuaccugaacgagacgcacuucuccgacgacaucgagcagcaggccgacaacaugaucaccgagaugcugcagaaggaguacaucgagcgccagggcaagaccccgcucggccuggucgaccuguucguguucagcaccuccuucuaccucaucagcaucuuccugcaccuggugaagauccccacgcaccggcacaucgucgggaagcccugccccaagccgcaccgccugaaccacaugggcaucugcuccugcgggcucuacaagcagcccggcgugagcgugaaguggaagcgguga

SEQ ID NO: 4543 - RNA, 1476 nt, Artificial Sequence
  derived and/or modified protein sequence (opt1) from LASV(G3151-SLE-2013;Clade IV)__AIT17368__GPCstabilized
augggccagaucgugaccuucuuccaggaggucccccacgugaucgaggaggugaugaacaucguccugaucgcccucagcauccuggccgugcugaaggggcucuacaacuucgcgaccugcggccugguggggcuggucacguuccuccugcugugcggccgcuccugcaccaccagccucuacaaggggguguacgagcugcagacccuggagcucaacauggagacgcugaacaugaccaugccgcuguccugcaccaagaacaacagccaccacuacaucauggugggcaacgagaccggccucgagcugacgcugaccaacaccuccaucaucaaccacaaguucugcaaccucagcgacgcccacaagaagaaccuguacgaccacgcccugauguccaucaucagcaccuuccaccucuccauccccaacuucaaccaguucgaggccaugagcugcgacuucaacgggggcaagaucuccguccaguacaaccugagccacuccuacgccggggacgcggccaaccacugcggcacgguggccaacggggugcugcagaccuucaugcggauggccuggggcggcagcuacaucgcgcucgacuccgggugcagcaagugggacugcaucaugaccuccuaccaguaccugaucauccagaacaccacgugggacgaccacugccaguucagccgccccucccccaucggcuaccuggggcuccugagccagcggacccgcgacaucuacaucagccggcgccggcgcggcaccuucaccuggacgcuguccgacagcgagggcaaggacacccccgggggcuacugccucacccgguggaugcugaucgaggccgagcugaagugcuucgggaacaccgccgucgccaagugcaacgagaagcacgacgaggaguucugcgacaugcuccgccuguucgacuucaacaagcaggccauccagcggcugaaggcgccggcccagauguccauccagcucaucaacaaggccgugaacgcccugaucaacgaccagcugaucaugaagaaccaccuccgcgacaucaugugcauccccuacugcaacuacagcaaguacugguaccugaaccacacgaccaccggcaagaccucccugcccaagugcuggcucgugagcaacggguccuaccugaacgagacgcacuucagcgacgacaucgagcagcaggccgacaacaugaucaccgagaugcugcagaaggaguacauggagcggcagggcaagaccccgcucggccuggucgaccuguucguguucuccaccagcuucuaccucaucuccaucuuccugcaccuggugaagauccccacgcaccgccacaucgucggcaagagcugccccaagccccaccggcugaacuacauggggaucugcuccugcggguucuacaagcagccgggcgugcccgugaaguggaagcgcuga

SEQ ID NO: 4544 - RNA, 1476 nt, Artificial Sequence
  derived and/or modified protein sequence (opt1) from LASV(G3157-SLE-2013;Clade IV)__AIT17370__GPCstabilized
augggccagaucgugaccuucuuccaggaggucccccacgugaucgaggaggugaugaacaucguccugaucgcccucagcauccuggccgugcugaaggggcucuacaacuucgcgaccugcggccugguggggcuggucacguuccuccugcugugcggccgcuccugcaccaccagccucuacaaggggguguacgagcugcagacccuggagcucaacauggagacgcugaacaugaccaugccgcuguccugcaccaagaacaacagccaccacuacaucauggugggcaacgagaccggccucgagcugacgcugaccaacaccuccaucaucaaccacaaguucugcaaccucagcgacgcccacaagaagaaccuguacgaccacgcccugauguccaucaucagcaccuuccaccucuccauccccaacuucaaccaguacgaggccaugagcugcgacuucaacgggggcaagaucuccguccaguacaaccugagccacuccuacgccggggacgcggccaaccacugcggcacgguggccaacggggugcugcagaccuucaugcggauggccuggggcggcagcuacaucgcgcucgacuccgggugcgaccgcugggacugcaucaugaccagcuaccaguaccugaucauccagaacaccacgugggaggaccacugccaguucucccggcccagccccaucggcuaccuggggcuccugucccagcgcacccgggacaucuacaucagccgccggcgccggggcaccuucaccuggacgcugagcgacuccgagggcaaggacacccccgggggcuacugccucacccgcuggaugcugaucgaggccgagcugaagugcuucgggaacaccgccgucgccaagugcaacgagaagcacgacgaggaguucugcgacaugcuccggcuguucgacuucaacaagcaggccauccagcgccugaaggcgccggcccagaugagcauccagcucaucaacaaggccgugaacgcccugaucaacgaccagcugaucaugaagaaccaccuccgggacaucaugugcauccccuacugcaacuacuccaaguacugguaccugaaccacacgaccaccggcaagaccagccugcccaagugcuggcucguguccaacgggagcuaccugaacgagacgcacuucuccgacgacaucgagcagcaggccgacaacaugaucaccgagaugcugcagaaggaguacauggagcgccagggcaagaccccgcucggccuggucgaccuguucguguucagcaccuccuucuaccucaucagcaucuuccugcaccuggugaagauccccacgcaccggcacaucgucgggaagcccugccccaagccgcaccgccugaaccacaugggcaucugcuccugcgggcucuacaagcagcccggcgugagcgugaaguggaagcgguga

SEQ ID NO: 4545 - RNA, 1476 nt, Artificial Sequence
  derived and/or modified protein sequence (opt1) from LASV(G3206-SLE-2013;Clade IV)__AIT17378__GPCstabilized
augggccagaucgugaccuucuuccaggaggucccccacgugaucgaggaggugaugaacaucguccugaucgcccucagcauccuggccgugcugaaggggcucuacaaccuggcgaccugcggccugguggggcucgucacguuccugcugcucugcggccgcuccugcaccaccagccuguacaaggggguguacgagcugcagacccucgagcugaacauggagacgcugaacaugaccaugccgcucuccugcaccaagaacaacagccaccacuacaucauggugggcaacgagaccggccuggagcugacgcucaccaacaccuccaucaucaaccacaaguucugcaaccugagcgacgcccacaagaagaaccuguacgaccacacccucauguccaucaucagcacguuccaccuguccauccccaacuucaaccaguacgaggccaugagcugcgacuucaacgggggcaagaucuccguccaguacaaccugagccacuccuacgccguggacgccgcgaaccacugcgggaccguggccaacggcguccuccagaccuucaugcggauggccuggggcgggagcuacaucgcccuggacuccggcugcagcgggugggacugcaucaugaccuccuaccaguaccuggugauccagaacacgaccugggaggaccacugccaguucagccgccccucccccaucggcuaccucgggcugcugagccagcggacccgcgacaucuacaucagccggcgccggcgcggcaccuucacguggacccucuccgacagcgagggcaagaacacccccgggggcuacugccugacccgguggaugcugaucgaggcggagcucaagugcuucgggaacacggccguggccaagugcaacgagaagcacgacgaggaguucugcgacaugcugcgccuguucgacuucaacaagcaggccauccagcggcucaaggccccggcgcagauguccauccagcugaucaacaaggccgucaacgcccugaucaacgaccagcucaucaugaagaaccaccuccgcgacaucaugugcauccccuacugcaacuacagcaaguacugguaccugaaccacaccaccaccggccggacgucccugccccgcugcuggcuggugagcaacggguccuaccugaacgagacccacuucagcgacgacaucgagcagcaggccgacaacaugaucaccgagaugcuccagaaggaguacauggagcggcagggcaagaccccgcugggccugguggaccucuucgucuucuccacgagcuucuaccugaucuccaucuuccugcaccuggugaagauccccacccaccgccacaucgugggcaagagcugccccaagccccaccggcucaaccacauggggaucugcuccugcggguucuacaagcagccgggcguccccgugaaguggaagcgcuga

SEQ ID NO: 4546 - RNA, 1476 nt, Artificial Sequence
  derived and/or modified protein sequence (opt1) from LASV(G3234-SLE-2013;Clade IV)__AIT17388__GPCstabilized
augggccagaucgugaccuucuuccaggaggucccccacgugaucgaggaggugaugaacaucguccugaucgcccucagcauccuggccgugcugaaggggcucuacaacguggcgaccugcggccugaucgggcuggucacguuccuccugcugugcggccgcuccugcaccaccacccucuacaaggggguguacgagcugcaggcccuggagcucaacauggagacgcugaacaugaccaugccgcugagcugcaccaagaacaacucccaccacuacauccgggugggcaacgagaccggccucgagcugacgcugaccaacaccagcaucaucaaccacaaguucugcaaccucuccgacgcccacaagaagaaccuguacgaccacgcccugaugagcaucaucuccaccuuccaccucagcauccccaacuucaaccaguacgaggccauguccugcgacuucaacgggggcaucaucagcguccaguacaaccugucccacagcuacgcgggggacgccgccaaccacugcggcacgguggccaacggggugcugcagaccuucaugcgcauggcguggggcggcuccuacaucgcccucgacagcgggugcaacggcugggacugcaucaugaccuccuaccaguaccugaucauccagaacaccacgugggacgaccacugccaguucagccggcccucccccaucggguaccugggccuccugagccagcgcacccgggacaucuacaucucccgccggcgccggggcaccuucaccuggacgcugagcgacagcgaggggaaggacaccccgggcggguacugccucacccgcuggaugcugaucgaggccgagcugaagugcuucggcaacaccgccgucgccaagugcaacgagaagcacgacgaggaguucugcgacaugcuccggcuguucgacuucaacaagcaggcgauccagcgccugaagacgcccgcccagaugaacauccagcucaucaacaaggccgugaacgcccugaucaacgaccagcugaucaugaagaaccaccuccgggacaucaugugcauccccuacugcaacuacuccaaguacugguaccugaacaacaccgccaccgggaagaccagccugccccgcugcuggcucguguccaacggcagcuaccugaacgagacgcacuucuccgacgacaucgagcagcaggcggacaacaugaucaccgagaugcugcagaaggaguacauggagcggcagggcaagaccccgcucgggcuggucgaccuguucguguucagcaccuccuucuaccucaucagcaucuuccugcaccuggugaagauccccacgcaccgccacaucgucggcaagcccugccccaagccgcaccggcugaaccacaucgggaucugcuccugcggccucuacaagcagcccggggugcccgugaaguggaagcgcuga

SEQ ID NO: 4547 - RNA, 1476 nt, Artificial Sequence
  derived and/or modified protein sequence (opt1) from LASV(G502-SLE-2009;Clade IV)__AIT17126__GPCstabilized
augggccagaucgugaccuucuuccaggaggucccccacgugaucgaggaggugaugaacaucguccugaucgcccucagcauccuggccgugcugaaggggcucuacaacuucgcgaccugcggccugguggggcugcucacguuccugcugcucugcggccgcuccugcaccaccgggcuguacaagggcgucuacgagcugcagacccucgagcugaacauggagacgcugaacaugaccaugccgcucagcugcaccaagaacaacucccaccacuacaucauggugggcaacgagaccgggcuggagcugacgcucaccaacaccagcaucaucaaccacaaguucugcaaccuguccgacgcccacaagaagaaccuguacgaccacgcccucaugagcaucaucuccaccuuccaccugagcauccccaacuucaaccaguacgaggccauguccugcgacuucaacggcgggaagaucagcgugcaguacaaccugucccacagcuacgccggcgacgcggccgaccacugcgggacggucgccaacggcgugcuccagaccuucaugcggauggccuggggcggguccuacaucgcgcuggacagcggcugcgggcgcugggacugcaucaugaccuccuaccaguaccugaucauccagaacaccacgugggaggaccacugccaguucagccggcccucccccaucggcuaccucggccugcugagccagcgcacccgggacaucuacaucucccgccggcgccgggggaccuucaccuggacgcucagcgacagcgagggcaaggacacccccgggggcuacugccugacccgcuggaugcugaucgaggccgagcucaagugcuucgggaacaccgccguggccaagugcaacgagaagcacgacgaggaguucugcgacaugcugcggcuguucgacuucaacaagcaggccauccagcgccucaaggcgccggcccagauguccauccagcugaucaacaaggccgucaacgcccugaucaacgaccagcucgugaugaagaaccaccuccgggacaucaugugcauccccuacugcaacuacagccgcuacugguaccugaaccacacgaccaccggccggaccucccugcccaagugcuggcuggugagcaacggcuccuaccugaacgagacgcacuucagcgacgacaucgagcagcaggccgacaacaugaucaccgagaugcuccagaaggaguacauggagcgccaggggaagaccccgcugggccuggucgaccucuucguguucuccaccagcuucuaccugaucuccaucuuccugcaccuggugaagauccccacgcaccggcacaucgucggcaagagcugccccaagccccaccgccucaaccacauggggaucugcuccugcgggcuguacaagcagccgggcgugcccgugaaguggaagcgguga

SEQ ID NO: 4548 - RNA, 1476 nt, Artificial Sequence
  derived and/or modified protein sequence (opt1) from LASV(G503-SLE-2009;Clade IV)__AIT17130__GPCstabilized
augggccagaucgugaccuucuuccaggaggucccccacgugaucgaggaggugaugaacaucguccugaucgcccucagcauccuggccgugcugaaggggcucuacaacuucgcgaccugcggcuucguggggcuggucacguuccugcuccugugcggccgcuccugcaccaccagccuguacaaggggguguacgagcuccagacccuggagcugaacauggagacgcucaacaugaccaugccgcuguccugcaccaagaacaacagccaccacuacauccgggugggcaacgacaccggccuggagcucacgcugaccaacaccuccaucaucaaccacaaguucugcaaccugagcgacgcccacaagaagaaccucuacgaccacgcccugauguccaucaucagcaccuuccaccuguccauccccaacuucaaccaguacgaggccaugagcugcgacuucaacgggggcaagaucuccguccaguacaaccucagccacuccuacgccguggacgcggccagccacugcgggacgaucgccaacggcgugcugcagaccuucaugcgcauggccuggggcggguccuacaucgcgcuggacagcggcugcgaccggugggacugcaucaugaccuccuaccaguaccucaucauccagaacaccacgugggaggaccacugccaguucagccgccccucccccaucggguaccugggccugcucagccagcggacccgcgacaucuacaucagccggcgccggcgcgggaccuucaccuggacgcuguccgacagcgagggcaaggacaccccgggcggguacugccugacccgguggaugcucaucgaggccgagcugaagugcuucggcaacaccgccgucgccaagugcaacgagaagcacgacgaggaguucugcgacaugcugcgccucuucgacuucaacaagcaggccauccagcggcugaaggcgcccgcccagauguccauccagcugaucaacaaggccgugaacgcccucaucaacgaccagcugaucaugaagaaccaccuccgcgacaucaugugcauccccuacugcaacuacagcaaguacugguaccugaaccacacgaccaccgggaagaccucccugcccaagugcuggcuggugagcaacggcuccuaccucaacgagacgcacuucagcgacgacaucgagcagcaggccgacaacaugaucaccgagaugcugcagaaggaguacauggagcggcaggggaagaccccgcugggccucgucgaccuguucguguucuccaccagcuucuaccugaucuccaucuuccuccaccuggugaagauccccacgcaccgccacaucgucggcaagagcugccccaagccccaccggcugaaccacauggggaucugcuccugcggccuguacaagcagccgggggugcccgugaaguggaagcgcuga

SEQ ID NO: 4549 - RNA, 1476 nt, Artificial Sequence
  derived and/or modified protein sequence (opt1) from LASV(G610-SLE-2009;Clade IV)__AIT17134__GPCstabilized
augggccagaucgugaccuucuuccaggaggucccccacgugaucgaggaggugaugaacaucguccugaucgcccucagcauccuggccgugcugaaggggcucuacaacuucgcgaccugcggccugguggggcuggucacguuccuccugcugugcggccgcuccugcaccaccagccucuacaaggggguguacgagcugcagacccuggagcucaacauggagacgcugaacaugaccaugccgcuguccugcaccaagaacaacagccaccacuacaucauggugggcaacgagaccggccucgagcugacgcugaccaacaccuccaucaucaaccacaaguucugcaaccucagcgacgcccacaagaagaaccuguacgaccacgcccugauguccaucaucagcaccuuccaccucuccauccccaacuucaaccaguacgaggccaugagcugcgacuucaacgggggcaagaucuccguccaguacaaccugagccacuccuacgccggggacgcggccaaccacugcggcacgguggccaacggggugcugcagaccuucaugcggauggccuggggcggcagcuacaucgcgcucgacuccgggugcggccgcugggacugcaucaugaccagcuaccaguaccugaucauccagaacaccacgugggaggaccacugccaguucucccggcccagccccaucggguaccugggccuccugucccagcgcacccgggacaucuacaucagccgccggcgccggggcaccuucaccuggacgcugagcgacuccgaggggaaggacaccccgggcggguacugccucacccgcuggaugcugaucgaggccgagcugaagugcuucggcaacaccgccgucgccaagugcaacgagaagcacgacgaggaguucugcgacaugcuccggcuguucgacuucaacaagcaggccauccagcgccugaaggcgcccgcccagaugagcauccagcucaucaacaaggccgugaacgcccugaucaacgaccagcugaucaugaagaaccaccuccgggacaucaugugcauccccuacugcaacuacuccaaguacugguaccugaaccacacgaccaccgggaagaccagccugcccaagugcuggcucguguccaacggcagcuaccugaacgagacgcacuucuccgacgacaucgagcagcaggccgacaacaugaucaccgagaugcugcagaaggaguacauggagcgccagggcaagaccccgcucgggcuggucgaccuguucguguucagcaccuccuucuaccucaucagcaucuuccugcaccuggugaagauccccacgcaccggcacaucgucggcaaguccugccccaagccccaccgccugaaccacauggggaucugcagcugcggccucuacaagcagccgggggugcccgugaaguggaagcgguga

SEQ ID NO: 4550 - RNA, 1476 nt, Artificial Sequence
  derived and/or modified protein sequence (opt1) from LASV(G636-SLE-2009;Clade IV)__AIT17138__GPCstabilized
augggccagaucgugaccuucuuccaggaggucccccacgugaucgaggaggugaugaacaucguccugaucgcccucagcauccuggccgugcugaaggggcucuacaaccuggcgaccugcggccugguggggcucgucacguuccugcugcucugcggccgcuccugcaccaccagccuguacaaggggguguacgagcugcagacccucgagcugaacauggagacgcugaacaugaccaugccgcucuccugcaccaagaacaacagccaccacuacaucauggugggcaacgagaccggccuggagcugacgcucaccaacaccucccugaucaaccacaaguucugcaaccugagcgacgcccacaagaagaaccucuacgaccacgcccugauguccaucaucagcaccuuccaccuguccauccccaacuucaaccaguacgaggccaugagcugcgacuucaacgggggcaagaucuccguccaguacaaccucagccacuccuacgccguggacgcggccagccacugcgggacgguggccaacggcguccugcagaccuucaugcggauggccuggggcggguccuacaucgcgcuggacagcggcugcgggggcugggacugcaucaugaccuccuaccaguaccucaucauccagaacaccacgugggaggaccacugccaguucagccgccccucccccaucggguaccugggccugcucagccagcggacccgcgacaucuacaucagccggcgccggcgcggcaccuucaccuggacgcuguccgacagcgaggggaaggacaccccgggcggguacugccugacccgguggaugcucaucgaggccgagcugaagugcuucggcaacaccgccguggccaagugcaacgagaagcacgacgaggaguucugcgacaugcugcgccucuucgacuucaacaagcaggccauccagcggcugaaggcgcccgcccagauguccauccagcugaucaacaaggccgugaacgcccucaucaacgaccagcugaucaugaagaaccaccuccgcgacaucaugugcauccccuacugcaacuacagcaaguacugguaccugaaccacacgaccaccgggcggaccucccugccccgcugcuggcuggucagcaacggcuccuaccucaacgagacgcacuucagcgacgacaucgagcagcaggccgacaacaugaucaccgagaugcugcagaaggaguacauggagcggcagggcaagaccccgcuggggcucguggaccuguucguguucuccaccagcuucuaccugaucuccaucuuccugcaccucgucaagauccccacgcaccgccacaucgugggcaagagcugccccaagccccaccggcugaaccacauggggaucugcuccugcggccuguacaagcagccgggggugcccgucaaguggaagcgcuga

SEQ ID NO: 4551 - RNA, 1476 nt, Artificial Sequence
  derived and/or modified protein sequence (opt1) from LASV(G692-SLE-2009;Clade IV)__AIT17146__GPCstabilized
augggccagaucgugaccuucuuccaggaggucccccacgugaucgaggaggugaugaacaucguccugaucgcccucagcauccuggccgugcugaaggggcucuacaaccuggcgaccugcggccugguggggcucgucacguuccugcugcucugcggccgcuccugcaccaccagccuguacaaggggguguacgagcugcagacccucgagcugaacauggagacgcugaacaugaccaugccgcucuccugcaccaagaacaacagccaccacuacaucauggugggcaacgagaccggccuggagcugacgcucaccaacaccuccaucaucaaccacaaguucugcaaccugagcgacgcccacaagaagaaccuguacgaccacgcccucauguccaucaucagcaccuuccaccuguccauccccaacuucaaccaguacgaggccaugagcugcgacuucaacgggggcaagaucuccguccaguacaaccugagccacuccuacgccggggacgcggccaaccacugcggcacgguggccaacggggugcuccagaccuucaugcggauggccuggggcggcagcuacaucgcgcuggacuccgggugcggccgcugggacugcaucaugaccagcuaccaguaccugaucauccagaacaccacgugggaggaccacugcuccuucagccggcccucccccaucggguaccucggccugcugagccagcgcacccgggacaucuacaucagccgccggcgccggggcaccuucaccuggacgcucuccgacagcgaggggaaggacaccccgggcggguacugccugacccgcuggaugcugaucgaggccgagcucaagugcuucggcaacaccgccgucgccaagugcaacgagaagcacgacgaggaguucugcgacaugcugcggcuguucgacuucaacaagcaggccauccagcgccucaaggcgcccgcccagauguccauccagcugaucaacaaggccgugaacgcccugaucaacgaccagcucaucaugaagaaccaccuccgggacaucaugugcauccccuacugcaacuacagcaaguacugguaccugaaccacacgaccaccgggaagaccucccugcccaagugcuggcuggugagcaacggcuccuaccugaacgagacgcacuucagcgacgacaucgagcagcaggccgacaacaugaucaccgagaugcuccagaaggaguacauggagcgccagggcaagaccccgcuggggcuggucgaccucuucguguucuccaccagcuucuaccugaucuccaucuuccugcaccuggugaagauccccacgcaccggcacaucgucggcaagagcugccccaagccccaccgccucaaccacauggggaucugcuccugcggcuucuacaagcagccgggggugcccgugaaguggaagcgguga

SEQ ID NO: 4552 - RNA, 1476 nt, Artificial Sequence
  derived and/or modified protein sequence (opt1) from LASV(G733-SLE-2010;Clade IV)__AIT17154__GPCstabilized
augggccagaucgugaccuucuuccaggaggucccccacgugaucgaggaggugaugaacaucguccugaucgcccucagcauccuggccgugcugaaggggcucuacaacuucgcgaccugcggcaucguggggcuggucuccuuccugcuccugugcggccgcagcugcacgaccucccuguacaaggggguguacgagcuccagacccuggagcugaacauggagacccucaacaugacgaugccgcugagcugcaccaagaacaacucccaccacuacaucauggugggcaacgagaccggccuggagcucacccugacgaacaccagcaucaucaaccacaaguucugcaaccuguccgacgcccacaagaagaaccucuacgaccacgcccugaugagcaucaucuccaccuuccaccugagcauccccaacuucaaccaguacgaggccauguccugcgacuucaacgggggcaagaucagcguccaguacaaccucucccacagcuacgccggggacgcggccaaccacugcggcaccaucgccaacggggugcugcagacguucaugcggauggccuggggcggcuccuacaucgcgcuggacagcgggugcgaccgcugggacugcaucaugaccuccuaccaguaccucaucauccagaacaccaccugggaggaccacugccaguucagccggcccucccccaucggcuaccuggggcugcucagccagcgcacgcgggacaucuacaucagccgccggcgccggggcaccuucaccuggacccuguccgacagcgagggcaaggacacgcccgggggcuacugccugacccgcuggaugcucaucgaggccgagcugaagugcuucgggaacaccgccguggccaagugcaacgagaagcacgacgaggaguucugcgacaugcugcggcuguucgacuucaacaagcaggccauccagcgccugaaggcgccggcccagauguccauccagcugaucaacaaggccgucaacgcccucaucaacgaccagcugaucaugaagaaccaccuccgggacaucaugugcauccccuacugcaacuacagcaaguacugguaccucaaccacaccacgaccggcaagaccucccugcccaagugcuggcuggugagcaacggguccuaccucaacgagacccacuucagcgacgacaucgagcagcaggccgacaacaugaucacggagaugcugcagaaggaguacauggagcgccagggcaagaccccgcugggccucguggaccuguucgucuucuccaccagcuucuaccugaucuccaucuuccuccaccuggugaagauccccacccaccggcacguggucggcaagagcugccccaagccccaccgccugaaccacauggggaucugcuccugcgggcuguacggccagccgggggugcccgugaaguggaagcgguga

SEQ ID NO: 4553 - RNA, 1476 nt, Artificial Sequence
  derived and/or modified protein sequence (opt1) from LASV(G771-SLE-2010;Clade IV)__AIT17158__GPCstabilized
augggccagaucgugaccuucuuccaggaggucccccacgugaucgaggaggugaugaacaucguccugaucgcccucagcauccuggccgugcugaaggggcucuacaacuucgcgaccugcggccugguggggcuggucacguuccuccugcugugcggccgcuccugcaccaccagccucuacaaggggguguacgagcugcagacccuggagcucaacauggagacgcugaacaugaccaugccgcuguccugcaccaagaacaacagccaccacuacaucauggugggcaacgagaccggccucgagcugacgcugaccaacaccuccaucaucaaccacaaguucugcaaccucagcgacgcccacaagaagaaccuguacgaccacgcccugauguccaucaucagcaccuuccaccucuccauccccaacuucaaccaguacgaggccaugagcugcgacuucaacgggggcaagaucuccguccaguacaaccugagccacuccuacgccggggacgcggccaaccacugcggcacgguggccaacggggugcugcagaccuucaugcggauggccuggggcggcagcuacaucgcgcucgacuccgggugcgaccgcugggacugcaucaugaccagcuaccaguaccugaucauccagaacaccacgugggaggaccacugccaguucucccggcccagccccaucggcuaccuggggcuccugucccagcgcacccgggacaucuacaucagccgccggcgccggggcaccuucaccuggacgcugagcgacuccgagggcaaggacacccccgggggcuacugccucacccgcuggaugcugaucgaggccgagcugaagugcuucgggaacaccgccgucgccaagugcaacgagaagcacgacgaggaguucugcgacaugcuccggcuguucgacuucaacaagcaggccauccagcgccugaaggcgccggcccagaugagcauccagcucaucaacaaggccgugaacgcccugaucaacgaccagcugaucaugaagaaccaccuccgggacaucaugugcauccccuacugcaacuacuccaaguacugguaccugaaccacacgaccaccggcaagaccagccugcccaagugcuggcucguguccaacgggagcuaccugaacgagacgcacuucuccgacgacaucgagcagcaggccgacaacaugaucaccgagaugcugcagaaggaguacauggagcgccagggcaagaccccgcucggccuggucgaccuguucguguucagcaccuccuucuaccucaucagcaucuuccugcaccuggugaagauccccacgcaccggcacaucgucgggaaguccugccccaagccccaccgccugaaccacaugggcaucugcagcugcgggcucuacaagcagccgggcgugcccgugaaguggaagcgguga

SEQ ID NO: 4554 - RNA, 1476 nt, Artificial Sequence
  derived and/or modified protein sequence (opt1) from LASV(G808-SLE-2010;Clade IV)__AIT17164__GPCstabilized
augggccagaucgugaccuucuuccaggaggucccccacgugaucgaggaggugaugaacaucguccugaucgcccucagcauccuggccgugcugaaggggcucuacaacuucgcgaccugcggccugguggggcuggucacguuccuccugcugugcggccgcuccugcaccagcucccucuacaaggggguguacgagcugcagacccuggagcucaacauggagacccugaacaugacgaugccgcugagcugcaccaagaacaacucccaccacuacauccgggugggcaacgagaccggccucgagcugacccugacgaacaccagcaucaucgaccacaaguucugcaaccucuccgacgcccacaagaagaaccuguacgaccacgcccugaugagcaucaucuccaccuuccaccucagcauccccaacuucaaccaguacgaggccauguccugcgacuucaacgggggcaagaucagcguccaguacaaccugucccacagcuacgccggggacgcggccaagcacugcggcaccguggccaacggggugcugcagacguucaugcgcauggccuggggcggcuccuacaucgcgcucgacagcgggugcggcaacugggacugcaucaugaccuccuaccaguaccugaucauccagaacaccaccugggaggaccacugccaguucagccggcccucccccaucggguaccugggccuccugagccagcgcacgcgggacaucuacaucagccgccggcgccggggcaccuucaccuggacccuguccgacagcgaggggaacgacgccccgggcggguacugccucacgcgcuggaugcugauccaggccgagcugaagugcuucggcaacaccgccgucgccaagugcaacgagaagcacgacgaggaguucugcgacaugcuccggcuguucgacuucaacaagcaggcgauccagcgccugaaggcccccgcccagauguccauccagcucaucaacaaggccgugaacgcccugaucaacgaccagcugaucaugaagaaccaccuccgggacaucaugugcauccccuacugcaacuacagcaaguacugguaccugaaccacaccaccacggggcgcaccucccugccccggugcuggcucgugagcaacggcuccuaccugaacgagacccacuucagcgacgacaucgagcagcaggcggacaacaugaucaccgagaugcugcagaaggaguacauggagcgccagggcaagacgccgcucgggcuggucgaccuguucguguucuccaccagcuucuaccucaucuccaucuuccugcaccuggugaagauccccacccaccggcacaucgucggcaagagcugccccaagccccaccgccugaaccacauggggaucugcuccugcggccucuucaagcagccgggggugcccgugaaguggaagcgguga

SEQ ID NO: 4555 - RNA, 1476 nt, Artificial Sequence
  derived and/or modified protein sequence (opt1) from LASV(Guinea Faranah;Clade IV)__AMZ00381__GPCstabilized
augggccagaucgugaccuucuuccaggaggucccccacgugaucgaggaggugaugaacaucguccugaucgcccucagcauccuggccgugcugaaggggcucuacaacguggcgaccugcggccugaucgggcugaucgccuuccuccugcugugcggccgcuccugcacgagcacccucuacaagggggucuacgagcugcaggcccuggagcucaacauggagacccugaacaugaccaugccgcuguccugcacgaagaacaacagccaccacuacaucauggugggcaacgagaccggccucgagcugacccugaccaacacguccaucaucaaccacaaguucugcaaccucagcgacgcccacaagaagaaccuguacaaccacgcccugauguccaucaucagcaccuuccaccucuccauccccaacuucaaccaguacgaggcgaugagcugcgacuucaacgggggcaagaucuccgugcaguacaaccugagccacuccuacgccgucgacgccgccaaccacugcgggaccguggcgaacggcauccugcagaccuucaugcggauggccuggggcgggagcuacaucgcccucgacuccggcugcgggggcugggacugcaucaugagcuccuaccaguaccuggugauccagaacacgaccugggaggaccacugccaguucagccgccccucccccaucggguaccugggccuccugagccagcggacccgcgacaucuacaucagccggcgccggcgcggcaccuucacguggacccuguccgacagcgaggggaaggacaccccgggcggguacugccucacccgguggaugcugaucgaggccgagcugaagugcuucggcaacacggccgucgcgaagugcaacgagaagcacgacgaggaguucugcgacaugcuccgccuguucgacuucaacaagcaggccauccagcggcugaaggcccccgcccagauguccauccagcucaucaacaaggccgugaacgcgcugaucaacgaccagcugaucaugaagaaccaccuccgcgacaucaugugcauccccuacugcaacuacagcaaguacugguaccugaaccacaccaucaccgggcggaccucccugcccaagugcuggcucgugagcaacggcuccuaccugaacgagacgcacuucagcgacgacaucgagcagcaggccgacaacaugaucaccgagaugcugcagaaggaguaccucgagcgccagggcaagaccccgcuggggcuggucgaccucuucguguucuccaccagcuucuaccugaucuccaucuuccugcaccugaucaagauccccacgcaccggcacaucgugggcaagagcugccccaagccccaccgccucaaccacaugggggucugcuccugcggccuguacaagcagccgggggugcccgugcgguggaagcgcuga

SEQ ID NO: 4556 - RNA, 1476 nt, Artificial Sequence
  derived and/or modified protein sequence (opt1) from LASV(GUINEA Z-185a;Clade IV)__AMZ00377__GPCstabilized
augggccagaucgugaccuucuuccaggaggucccccacgugaucgaggaggugaugaacaucguccugaucgcccucagcauccuggccgugcugaaggggcucuacaacguggcgaccugcggccugaucgggcuggucacguuccucuuccugugcggccgcuccugcagcaccucccuguacaaggggguguacgagcuccagacccuggagcugaacauggagacccucaacaugacgaugccgcugagcugcaccaagaacaacucccaccacuacaucauggugggcaacgagaccggccuggagcucacccugacgaacaccagcaucaucaaccacaaguucugcaaccuguccgacgcccacaagaagaaccucuacgaccacacccugaugagcaucaucuccaccuuccaccugagcauccccaacuucaaccaguacgaggccauguccugcgacuucaacgggggcaagaucagcguccaguacaaccucucccacagcuacgccguggacgccgcgaaccacugcgggacgguggccaacggcguccugcagaccuucaugcggauggccuggggcggguccuacaucgcccuggacagcggcugcgggaacugggacugcaucaugaccuccuaccaguaccucgugauccagaacaccacgugggaggaccacugccaguucagccgccccucccccaucggcuaccuggggcugcucagccagcggacccgcgacaucuacaucagccggcgccggcgcggcaccuucaccuggacgcuguccgacagcgagggcaaggacacccccgggggcuacugccugacccgguggaugcucaucgaggcggagcugaagugcuucgggaacaccgccguggccaagugcaacgagaagcacgacgaggaguucugcgacaugcugcgccucuucgacuucaacaagcaggccauccagcggcugaaggccccggcgcagauguccauccagcugaucaacaaggccgucaacgcccucaucaacgaccagcugaucaugaagaaccaccuccgcgacaucaugugcauccccuacugcaacuacagcaaguacugguaccugaaccacacggugaccggcaagaccucccugcccaagugcuggcuggugagcaacggguccuaccucaacgagacccacuucagcgacgacaucgagcagcaggccgacaaccugaucacggagaugcugcagaaggaguacauggagcggcagggcaagaccccgcucggccuggucgaccuguucguguucuccaccagcuucuaccucaucuccaucuuccugcaccuggugaagauccccacccaccgccacaucgucgggaagcccugccccaagccgcaccggcugaaccacaugggcaucugcagcugcgggguguacaagcagcccggcgugcccguccgcuggaagcgguga

SEQ ID NO: 4557 - RNA, 1476 nt, Artificial Sequence
  derived and/or modified protein sequence (opt1) from MOPV/LASV reassortant(IGS-1;Clade IV)__AFY05576__GPCstabilized
augggccagaucgugaccuucuuccaggaggucccccacgugaucgaggaggugaugaacaucguccugaucgcccucagcgugcuggccgugcugaaggggcucuacaacuucgcgaccugcggccuggucgggcuggugacguuccuccugcugugcggccgcuccugcaccaccagccucuacaaggggguguacgagcugcagacccuggagcucaacauggagacgcugaacaugaccaugccgcuguccugcaccaagaacaacagccaccacuacaucauggucggcaacgagaccggccucgagcugacgcugaccaacaccuccaucaucaaccacaaguucugcaaccucagcgacgcccacaagaagaaccuguacgaccacgcccugauguccaucaucagcaccuuccaccucuccauccccaacuucaaccaguacgaggccaugagcugcgacuucaacgggggcaagaucuccgugcaguacaaccugagccacuccuacgccggggacgcggccaaccacugcggcacgguggccaacgggguccugcagaccuucaugcggauggccuggggcggcagcuacaucgcgcucgacuccgggugcggcaacugggacugcaucaugaccagcuaccaguaccugaucauccagaacaccacgugggaggaccacugccaguucucccgccccagccccaucggguaccugggccuccugucccagcggacccgcgacaucuacaucagccggcgccggcgcggcaccuucaccuggacgcugagcgacuccgagggggaggacaccccgggcggguacugccucacccgguggaugcugaucgaggccgagcugaagugcuucggcaacaccgccguggccaagugcaacgagaagcacgacgaggaguucugcgacaugcuccgccuguucgacuucaacaagcaggccauccagcggcugaaggcgcccgcccagaugagcauccagcucaucaacaaggccgugaacgcccugaucaacgaccagcugaucaugaagaaccaccuccgcgacaucaugugcauccccuacugcaacuacuccaaguacugguaccugaaccacacgaccaccgggcggaccagccugcccaagugcuggcucgucuccaacggcagcuaccugaacgagacgcacuucuccgacgacaucgagcagcaggccgacaacaugaucaccgagaugcugcagaaggaguacauggagcgccagggcaagaccccgcucgggcugguggaccuguucguguucagcaccuccuucuaccucaucagcaucuuccugcaccuggucaagauccccacgcaccggcacaucgugggcaaguccugccccaagccccaccgccugaaccacauggggaucugcagcugcggccucuacaagcagccgggggugcccgucaaguggaagcgguga

SEQ ID NO: 4558 - RNA, 1476 nt, Artificial Sequence
  derived and/or modified protein sequence (opt1) from MOPV/LASV reassortant(IGS-11;Clade IV)__AFY05588__GPCstabilized
augggccagaucgugaccuucuuccaggaggucccccacgugaucgaggaggugaugaacaucguccugaucgcccucagcgugcuggccgugcugaaggggcucuacaacuucgcgaccugcggccuggucgggcuggugacguuccuccugcugugcggccgcuccugcaccaccagccucuacaaggggguguacgagcugcagacccuggagcucaacauggagacgcugaacaugaccaugccgcuguccugcaccaagaacaacagccaccacuacaucauggucggcaacgagaccggccucgagcugacgcugaccaacaccuccaucaucaaccacaaguucugcaaccucagcgacgcccacaagaagaaccuguacgaccacgcccugauguccaucaucagcaccuuccaccucuccauccccaacuucaaccaguacgaggccaugagcugcgacuucaacgggggcaagaucuccgugcaguacaaccugagccacuccuacgccggggacgcggccaaccacugcggcacgguggccaacgggguccugcagaccuucaugcggauggccuggggcggcagcuacaucgcgcucgacuccgggugcggcaacugggacugcaucaugaccagcuaccaguaccugaucauccagaacaccacgugggaggaccacugccaguucucccgccccagccccaucggguaccugggccuccugucccagcggacccgcgaccuguacaucagccggcgccggcgcggcaccuucaccuggacgcucagcgacuccgagggggaggacaccccgggcggguacugccugacccgguggaugcugaucgaggccgagcucaagugcuucggcaacaccgccguggccaagugcaacgagaagcacgacgaggaguucugcgacaugcugcgccuguucgacuucaacaagcaggccauccagcggcucaaggcgcccgcccagaugagcauccagcugaucaacaaggccgugaacgcccugaucaacgaccagcucaucaugaagaaccaccuccgcgacaucaugugcauccccuacugcaacuacuccaaguacugguaccugaaccacacgaccaccgggcggaccagccugcccaagugcuggcuggucuccaacggcagcuaccugaacgagacgcacuucuccgacgacaucgagcagcaggccgacaacaugaucaccgagaugcuccagaaggaguacauggagcgccagggcaagaccccgcuggggcugguggaccucuucguguucagcaccuccuucuaccugaucagcaucuuccugcaccuggucaagauccccacgcaccggcacaucgugggcaaguccugccccaagccccaccgccucaaccacauggggaucugcagcugcggccuguacaagcagccgggggugcccgucaaguggaagcgguga

SEQ ID NO: 4559 - RNA, 1476 nt, Artificial Sequence
  derived and/or modified protein sequence (opt1) from MOPV/LASV reassortant(IGS-12;Clade IV)__AFY05590__GPCstabilized
augggccagaucgugaccuucuuccaggaggucccccacgugaucgaggaggugaugaacaucguccugaucgcccucagcgugcuggccgugcugaaggggcucuacaacuucgcgaccugcggccuggucgggcuggugacguuccuccugcugugcggccgcuccugcaccaccagccucuacaaggggguguacgagcugcagacccuggagcucaacauggagacgcugaacaugaccaugccgcuguccugcaccaagaacaacagccaccacuacaucauggucggcaacgagaccggccucgagcugacgcugaccaacaccuccaucaucaaccacaaguucugcaaccucagcgacgcccacaagaagaaccuguacgaccacgcccugauguccaucaucagcaccuuccaccucuccauccccaacuucaaccaguacgaggccaugagcugcgacuucaacgggggcaagaucuccgugcaguacaaccugagccacuccuacgccggggacgcggccaaccacugcggcacgguggccaacgggguccugcagaccuucaugcggauggccuggggcggcagcuacaucgcgcucgacuccgggugcggcaacugggacugcaucaugaccagcuaccaguaccugaucauccagaacaccacgugggaggaccacugccaguucucccgccccagccccaucggguaccugggccuccugucccagcggacccgcgacauguacaucagccggcgccggcgcggcaccuucaccuggacgcugagcgacuccgagggggaggacaccccgggcggguacugccucacccgguggaugcugaucgaggccgagcugaagugcuucggcaacaccgccguggccaagugcaacgagaagcacgacgaggaguucugcgacaugcuccgccuguucgacuucaacaagcaggccauccagcggcugaaggcgcccgcccagaugagcauccagcucaucaacaaggccgugaacgcccugaucaacgaccagcugaucaugaagaaccaccuccgcgacaucaugugcauccccuacugcaacuacuccaaguacugguaccugaaccacacgaccaccgggcggaccagccugcccaagugcuggcucgucuccaacggcagcuaccugaacgagacgcacuucuccgacgacaucgagcagcaggccgacaacaugaucaccgagaugcugcagaaggaguacauggagcgccagggcaagaccccgcucgggcugguggaccuguucguguucagcaccuccuucuaccucaucagcaucuuccugcaccuggucaagauccccacgcaccggcacaucgugggcaaguccugccccaagccccaccgccugaaccacauggggaucugcagcugcggccucuacaagcagccgggggugcccgucaaguggaagcgguga

SEQ ID NO: 4560 - RNA, 1476 nt, Artificial Sequence
  derived and/or modified protein sequence (opt1) from LASV(LM032-SLE-2010;Clade IV)__AIT17802__GPCstabilized
augggccagaucgugaccuucuuccaggaggucccccacgugaucgaggaggugaugaacaucguccugaucgcccucagcauccuggccgugcugaaggggcucuacaaccuggcgaccugcggccugguggggcucgucacguuccugcugcucugcggccgcuccugcaccaccagccuguacaaggggguguacgagcugcagacccucgagcugaacauggagacgcugaacaugaccaugccgcucuccugcaccaagaacaacagccaccacuacaucauggugggcaacgagaccggccuggagcugacgcucaccaacaccuccaucaucaaccacaaguucugcaaccugagcgacgcccacaagaagaaccuguacaaccacgcccucauguccaucaucagcaccuuccaccuguccauccccaacuucaaccaguacgaggccaugagcugcgacuucaacgggggcaagaucuccguccaguacaaccugagccacuccuacgccggggacgcggccaaccacugcggcacgguggccaacggggugcuccagaccuucaugcggauggccuggggcggcagcuacaucgcgcuggacuccgggugcgaccgcugggacugcaucaugaccagcuaccaguaccugaucauccagaacaccacgugggaggaccacugccaguucucccggcccagccccaucggcuaccucgggcugcugucccagcgcacccgggacaucuacaucagccgccggcgccggggcaccuucaccuggacgcucagcgacuccgagggcaaggacacccccgggggcuacugccugacccgcuggaugcugaucgaggccgagcucaagugcuucgggaacaccgccgucgccaagugcaacgagaagcacgacgaggaguucugcgacaugcugcggcuguucgacuucaacaagcaggccauccagcgccucaaggcgccggcccagaugagcauccagcugaucaacaaggccgugaacgcccugaucaacgaccagcucaucaugaagaaccaccuccgggacaucaugugcauccccuacugcaacuacuccaaguacugguaccugaaccacacgaccaccggcaagaccagccugcccaagugcuggcugguguccaacgggagcuaccugaacgagacgcacuucuccgacgacaucgagcagcaggccgacaacaugaucaccgagaugcuccagaaggaguacauggagcgccugggcaagaccccgcugggccucgucgaccuguucguguucagcaccuccuucuaccugaucagcaucuuccugcaccucgugaagauccccacgcaccggcacaucgucgggcgcuccugccccaagccccaccggcugaaccacaugggcaucugcagcugcgggcuguacaagcagccgggcgugcccgugaaguggaagcgcuga

SEQ ID NO: 4561 - RNA, 1476 nt, Artificial Sequence
  derived and/or modified protein sequence (opt1) from LASV(LM222-SLE-2010;Clade IV)__AIT17806__GPCstabilized
augggccagaucgugaccuucuuccaggaggucccccacgugaucgaggaggugaugaacaucguccugaucgcccucagcauccuggccgugcugaaggggcucuacaacuucgcgaccugcggccugaucgggcuggugacguuccuccugcugugcggccgcuccugcaccaccagccucuacaagggggucuacgagcugcagacccuggagcucaacauggagacgcugaacaugaccaugccgcuguccugcaccaagaacaacagccaccacuacaucauggugggcaacgagaccggccucgagcugacgcugaccaacaccuccaucaucaaccacaaguucugcaaccucagcgacgcccacaagaagaaccuguacgaccacgcccugauguccaucaucagcaccuuccaccucuccauccccaacuucaaccaguacgaggccaugagcugcgacuucaacgggggcaagaucuccgugcaguacaaccugagccacuccuacgccggggacgcggccaaccacugcggcacggucgccaacggggugcugcagaccuucaugcggauggccuggggcggcagcuacaucgcgcucgacuccgggugcggcaagugggacugcaucaugaccagcuaccaguaccugaucauccagaacaccacgugggaggaccacugccaguucucccgccccagccccaucggguaccugggccuccugucccagcggacccgcgacaucuacaucagccggcgccggcgcggcaccuucaccuggacgcugagcgacuccgaggggaaggacaccccgggcggguacugccucacccgguggaugcugaucgaggccgagcugaagugcuucggcaacaccgccguggccaagugcaacgagaagcacgacgaggaguucugcgacaugcuccgccuguucgacuucaacaagcaggccauccagcggcugaaggcgcccgcccagaugagcauccagcucaucaacaaggccgucaacgcccugaucaacgaccagcugaucaugaagaaccaccuccgcgacaucaugugcauccccuacugcaacuacuccaaguacugguaccugaaccacacgaccaccgggaagaccagccugcccaagugcuggcucguguccaacggcagcuaccugaacgagacgcacuucuccgacgacaucgagcagcaggccgacaacaugaucaccgagaugcugcagaaggaguacauggagcggcagggcaagaccccgcucgggcugguggaccuguucgucuucagcaccuccuucuaccucaucagcaucuuccugcaccuggugaagauccccacgcaccgccacaucgugggcaaguccugccccaagccccaccggcugaaccacauggggaucugcagcugcggccucuacaagcagccggggguccccgugaaguggaagcgcuga

SEQ ID NO: 4562 - RNA, 1476 nt, Artificial Sequence
  derived and/or modified protein sequence (opt1) from LASV(LM395-SLE-2009;Clade IV)__AIT17810__GPCstabilized
augggccagaucgugaccuucuuccaggaggucccccacgugaucgaggaggugaugaacaucguccugaucgcccucagcauccuggccgugcugaaggggcucuacaaccuggcgaccugcggccugguggggcucgucacguuccugcugcucugcggccgcuccugcaccaccagccuguacaaggggguguacgagcugcagacccucgagcugaacauggagacgcugaacaugaccaugccgcucuccugcaccaaggacaacagccaccacuacauccgggugggcaacgagaccggccuggagcugacgcucaccaacaccuccauccugaaccacaaguucugcaaccugagcgacgcccacaagaagaaccucuacgaccacgcccugauguccaucaucagcaccuuccaccuguccauccccaacuucaaccaguacgaggccaugagcugcgacuucaacgggggccgcaucuccguccaguacaaccucagccacuccuacgccggggacgcggccaaccacugcggcacgguggccaacggggugcugcagaccuucaugcggauggccuggggcggcagcuacaucgcgcuggacuccgggugcggccgcugggacugcaucaugaccagcuaccaguaccucaucauccagaacaccacgugggaggaccacugccaguucucccggcccagccccaucggguaccugggccugcucucccagcgcacccgggacaucuacaucagccgccggcgccggggcaccuucaccuggacgcugagcgacuccgaggggaaggacaccccgggcggguacugccugacccgcuggaugcucaucgaggccgagcugaagugcuucggcaacaccgccgucgccaagugcaacgagaagcacgacgaggaguucugcgacaugcugcggcuguucgacuucaacaagcaggccauccagcgccugaaggcgcccgcccagaugagcauccagcugaucaacaaggccgugaacgcccucaucaacgaccagcugaucaugaagaaccaccuccgggacaucaugugcauccccuacugcaacuacuccaaguacugguaccucaaccacacgaccaccgggaagaccagccugccccgcugcuggcugguguccaacggcagcuaccucaacgagacgcacuucuccgacgacaucgagcagcaggccgacaacaugaucaccgagaugcugcagaaggaguacauggagcggcagggcaagaccccgcuggggcucgucgaccuguucguguucagcaccuccuucuaccugaucagcaucuuccugcaccucgugaagauccccacgcaccgccacgucgugggcaagcccugccccaagccgcaccggcugaaccacauggggaucugcuccugcggccuguacaagcagcccggggugcccgucaaguggaagcgcuga

SEQ ID NO: 4563 - RNA, 1476 nt, Artificial Sequence
  derived and/or modified protein sequence (opt1) from LASV(LM765-SLE-2012;Clade IV)__AIT17814__GPCstabilized
augggccagaucgugaccuucuuccaggaggucccccacgugaucgaggaggugaugaacaucguccugaucgcccucagcauccuggccgugcugaaggggcucuacaacuucgcgaccugcggccugguggggcuggucacguuccuccugcugugcggccgcuccugcaccaccagccucuacaaggggguguacgagcugcagacccuggagcucaacauggagacgcugaacaugaccaugccgcuguccugcaccaagaacaacagccaccacuacaucauggugggcaacgagaccggccucgagcugacgcugaccaacaccuccaucaucgaccacaaguucugcaaccucagcgacgcccaccggaagaaccuguacgaccacgcccugauguccaucaucagcaccuuccaccucuccauccccaacuucaaccaguacgaggccaugagcugcgacuucaacgggggcaagaucuccguccaguacaaccugagccacuccuacgccaaggacgcggccgaccacugcgggacgguggccaacggcgugcugcagaccuucaugcgcauggccuggggcgggagcuacaucgcgcucgacuccggcugcgggcggugggacugcaucaugaccagcuaccaguaccugaucauccagaacaccacgugggaggaccacugccaguucucccgccccagccccaucggcuaccuggggcuccugucccagcggacccgcgacaucuacaucagccggcgccggcgcggcaccuucaccuggacgcugagcgacuccgagggcaaggacacccccgggggcuacugccucacccgguggaugcugaucgaggccgagcugaagugcuucgggaacaccgccgucgccaagugcaacgagaagcacgacgaggaguucugcgacaugcuccgccuguucgacuucaacaagcaggccauccagcggcugaaggcgccggcccagaugagcauccagcucaucaacaaggccgugaacgcccugaucaacgaccagcugaucaugaagaaccaccuccgcgacaucaugugcauccccuacugcaacuacuccaaguacugguaccugaaccacacgaccaccggcaagaccagccugcccaagugcuggcucguguccaacgggagcuaccugaacgagacgcacuucuccgacgacaucgagcagcaggccgacaacaugaucaccgagaugcugcagaaggaguacauggagcggcagggcaagaccccgcucggccuggucgaccuguucguguucagcaccuccuucuaccucaucagcaucuuccugcaccuggugaagauccccacgcaccgccacaucgucgggaagcccugccccaagccgcaccggcugaaccacaugggcaucugcuccugcgggcucuacaagcagcccggcgugcccgugaaguggaagcgcuga

SEQ ID NO: 4564 - RNA, 1476 nt, Artificial Sequence
  derived and/or modified protein sequence (opt1) from LASV(LM774-SLE-2012;Clade IV)__AIT17820__GPCstabilized
augggccagaucgugaccuucuuccaggaggucccccacgugaucgaggaggugaugaacaucguccugaucgcccucagcauccuggccgugcugaaggggcucuacaacuucgcgaccugcggccugguggggcuggucacguuccuccugcugugcggccgcuccugcaccaccagccucuacaaggggguguacgagcugcagacccuggagcucaacauggagacgcugaacaugaccaugccgcuguccugcaccaagaacaacagccaccacuacaucauggugggcaacgagaccggccucgagcugacgcugaccaacaccuccaucaucaaccacaaguucugcaaccucagcgacgcccacaagaagaaccuguacgaccacgcccugauguccaucaucagcaccuuccaccucuccauccccaacuucaaccaguacgaggccaugagcugcgacuucaacgggggcaagaucuccguccaguacaaccugagccacuccuacgccgaggacgcggccaaccacugcgggacgguggccaacggcgugcugcagaccuucaugcggauggccuggggcgggagcuacaucgcgcucgacuccggcugcgggaacugggacugcaucaugaccagcuaccaguaccugaucauccagaacaccacgugggaggaccacugccaguucucccgccccagccccaucggcuaccuggggcuccugucccagcggacccgcgacaucuacaucagccggcgccggcgcggcaccuucaccuggacgcugagcgacuccgagggcaaggacacccccgggggcuacugccucacccgguggaugcugaucgaggccgagcugaagugcuucgggaacaccgccgucgccaagugcaacgagaagcacgacgaggaguucugcgacaugcuccgccuguucgacuucaacaagcaggccauccagcggcugaaggcgccggcccagaugagcauccagcucaucaacaaggccgugaacgcccugaucaacgaccagcugaucaugaagaaccaccuccgcgacaucaugugcauccccuacugcaacuacuccaaguacugguaccugaaccacacgaccaccggcaagaccagccugcccaagugcuggcucguguccaacgggagcuaccugaacgagacgcacuucuccgacgacaucgagcagcaggccgacaacaugaucaccgagaugcugcagaaggaguacauggagcggcagggcaagaccccgcucggccuggucgaccuguucguguucagcaccuccuucuaccucaucagcaucuuccugcaccuggugaagauccccacgcaccgccacaucgucgggaaguccugccccaagccccaccggcugaaccacaugggcaucugcagcugcgggcucuacaagcagccgggcgugcccgugaaguggaagcgcuga

SEQ ID NO: 4565 - RNA, 1476 nt, Artificial Sequence
  derived and/or modified protein sequence (opt1) from LASV(LM776-SLE-2012;Clade IV)__AIT17824__GPCstabilized
augggccagaucgugaccuucuuccaggaggucccccacgugaucgaggaggugaugaacaucguccugaucgcccucagcauccuggccgugcugaaggggcucuacaacuucgcgaccugcggccugguggggcuggucacguuccuccugcugugcggccgcuccugcaccaccagcguguacaaggggguguacgagcuccagacccuggagcugaacauggagacgcucaacaugaccaugccgcuguccugcaccaagaacaacagccaccacuacaucauggucggcaacgagaccggccuggagcucacgcugaccaacaccuccaucaucaaccacaaguucugcaaccugagcgacgcccacaagaagaaccucuacgaccacgcccugauguccaucaucagcaccuuccaccuguccauccccaacuucaaccaguacgaggccaugagcugcgacuucaacgggggcaagaucuccgugcaguacaaccucagccacuccuacgccggggacgcggccaaccacugcggcacgguggccaacgggguccugcagaccuucaugcggauggccuggggcggcagcuacaucgcgcuggacuccgggugcggcaagugggacugcaucaugaccagcuaccaguaccucaucauccagaacaccacgugggaggaccacugccaguucucccgccccagccccaucggguaccugggccugcucucccagcggacccgcgacaucuacaucagccggcgccggcgcggcaccuucaccuggacgcugagcgacuccgaggggaaggacaccccgggcggguacugccugacccgguggaugcucaucgaggccgagcugaagugcuucggcaacaccgccguggccaagugcaacgagaagcacgacgaggaguucugcgacaugcugcgccucuucgacuucaacaagcaggccauccagcggcugaaggcgcccgcccagaugagcauccagcugaucaacaaggccgugaacgcccucaucaacgaccagcugaucaugaagaaccaccuccgcgacaucaugugcauccccuacugcaacuacuccaaguacugguaccugaaccacacgaccaccgggaagaccagccugcccaagugcuggcuggucuccaacggcagcuaccucaacgagacgcacuucuccgacgacaucgagcagcaggccgacaacaugaucaccgagaugcugcagaaggaguacauggagcggcagggcaagaccccgcuggggcucguggaccuguucguguucagcaccuccuucuaccugaucagcaucuuccuccaccuggucaagauccccacgcaccgccacaucgugggcaaguccugccccaagccccaccggcugaaccacauggggaucugcagcugcggccuguacaagcagccgggggugcccguccgcuggaagcgguga

SEQ ID NO: 4566 - RNA, 1476 nt, Artificial Sequence
  derived and/or modified protein sequence (opt1) from LASV(LM778-SLE-2012;Clade IV)__AIT17828__GPCstabilized
augggccagaucgugaccuucuuccaggaggucccccacgugaucgaggaggugaugaacaucguccugaucgcccucagcauccuggccgugcugaaggggcucuacaacuucgcgaccugcggccugguggggcuggucacguuccuccugcugugcggccgcuccugcaccaccagccucuacaagggggacuacgagcugcagacccuggagcucaacauggagacgcugaacaugaccaugccgcuguccugcaccaagaacaacagccaccacuacaucauggugggcaacgagaccggccucgagcugacgcugaccaacaccuccaucaucaaccacaaguucugcaaccucagcgacgcccacaagaagaaccuguacgaccacgcccugauguccaucaucagcaccuuccaccucuccauccccaacuucaaccaguacgaggccaugagcugcgacuucaacgggggcaagaucuccgugcaguacaaccugagccacuccuacgccggggacgcggccaaccacugcggcacggucgccaacggggugcugcagaccuucaugcggauggccuggggcggcagcuacaucgcgcucgacuccgggugcggcaacugggacugcaucaugaccagcuaccaguaccugaucauccagaacaccacgugggaggaccacugccaguucucccgccccagccccaucggguaccugggccuccugucccagcggacccgcgacaucuacaucagccggcgccggcgcggcaccuucaccuggacgcugagcgacuccgaggggaaggacaccccgggcggguacugccucacccgguggaugcugaucgaggccgagcugaagugcuucggcaacaccgccguggccaagugcaacgagaagcacgacgaggaguucugcgacaugcuccgccuguucgacuucaacaagcaggccauccagcggcugaaggcgcccgcccagaugagcauccagcucaucaacaaggccgucaacgcccugaucaacgaccagcugaucaugaagaaccaccuccgcgacaucaugugcauccccuacugcaacuacuccaaguacugguaccugaaccacacgaccaccgggaagaccagccugcccaagugcuggcucguguccaacggcagcuaccugaacgagacgcacuucuccgacgacaucgagcagcaggccgacaacaugaucaccgagaugcugcagaaggaguacauggagcggcagggcaagaccccgcucgggcugguggaccuguucgucuucagcaccuccuucuaccucaucagcaucuuccugcaccuggugaagauccccacgcaccgccacaucgugggcaaguccugccccaagccccaccggcugaaccacauggggaucugcagcugcggccucuacaagcagccggggguccccgugaaguggaagcgcuga

SEQ ID NO: 4567 - RNA, 1476 nt, Artificial Sequence
  derived and/or modified protein sequence (opt1) from LASV(Mad39;Clade IV)__ANH09722__GPCstabilized
augggccagaucgugaccuucuuccaggaggucccccacgugaucgaggaggugaugaacaucguccugaucgcccucagcauccuggccgugcugaaggggcucuacaacguggcgaccugcggccugaucgggcuggucacguuccuccugcugugcggccgcuccugcaccaccacccucuacaaggggguguacgagcugcaggcccuggagcucaacauggagacgcugaacaugaccaugccgcugagcugcaccaagaacaacucccaccacuacauccgggugggcaacgagaccggccucgagcugacgcugaccaacaccagccucaucaaccacaaguucugcaaccuguccgacgcccacaagaagaaccuguacgaccacgcccucaugagcaucaucuccaccuuccaccugagcauccccaacuucaaccaguacgaggccauguccugcgacuucaacgacgggaagaucagcguccaguacaaccugucccacacguacgcgggcgacaccgccaaccacugcgggaccguggccaacggcgugcuccagaccuucaugcgcauggccuggggcgggagcuacaucgcgcuggacuccggcugcgggggcugggacugcaucaugacgagcuaccaguaccugaucauccagaacaccaccugggaggaccacugccaguucucccggcccagccccaucggguaccucggccugcugucccagcgcacccgggacaucuacaucagccgccggcgccggggcacguucaccuggacccucuccgacagcgaggggaaggacaccccgggcggguacugccugacgcgcuggaugcugaucgaggccgagcucaagugcuucggcaacaccgccgucgccaagugcaacgagaagcacgacgaggaguucugcgacaugcugcggcuguucgacuucaacaagcaggccauccagcgccucaaggcgcccgcccagaugagcauccagcugaucaacaaggccgugaacgcccugaucaacgaccagcucaucaugaagaaccaccuccgggacaucaugugcauccccuacugcaacuacuccaaguacugguaccugaaccacaccgugaccgggaagacgagccugcccaagugcuggcuggucuccaacggcagcuaccugaacgagacccacuucuccgacgacaucgagcagcaggccgacaacaugaucaccgagaugcuccagaaggaguacauggagcgccagggcaagaccccgcuggggcugguggaccucuucguguucagcacguccuucuaccugaucagcaucuuccugcaccuggucaagauccccacccaccggcacguggugggcaagcccugccccaagccgcaccgccucaaccacauggggaucugcuccugcggcuucuacaagcagcccgggguccccgugcgguggaagcgcuga

SEQ ID NO: 4568 - RNA, 1476 nt, Artificial Sequence
  derived and/or modified protein sequence (opt1) from LASV(Mad41;Clade IV)__ANH09724__GPCstabilized
augggccagaucgugaccuucuuccaggaggucccccacgugaucgaggaggugaugaacaucguccugaucgcccucagcauccuggccgugcugaaggggcucuacaacguggcgaccugcggccugaucgggcuggucacguuccuccugcugugcggccgcuccugcaccaccacccucuacaaggggguguacgagcugcaggcccuggagcucaacauggagacgcugaacaugaccaugccgcugagcugcaccaagaacgacucccaccacuacaucauggugggcaacgagaccggccucgagcugacgcugaccaacaccagcaucaucucccacaaguucugcaaccucagcgacgcccacaagcagaaccuguacgaccacgcccugauguccaucaucagcaccuuccaccucuccauccccaacuucaaccaguacgaggccaugagcugcgacuucaacgggggcaagaucuccguccaguacaaccugagccacacguacgcgggggacgccgccaaccacugcggcaccguggccaacggggugcugcagaccuucaugcggauggcguggggcggcuccuacaucgcccucgacagcgggugcggcgggugggacugcaucaugaccuccuaccaguaccugaucauccagaacacgaccugggaggaccacugccaguucagccgccccucccccaucggcuaccugggccuccugagccagcggacccgcgacaucuacaucucccggcgccggcgcgggaccuucacguggacccugagcgacagcgagggcaaggacacccccgggggcuacugccucacccgguggaugcugaucgaggccgagcugaagugcuucgggaacacggccgucgccaagugcaacgagaagcacgacgaggaguucugcgacaugcuccgccuguucgacuucaacaagcaggcgauccagcggcugaaggccccggcccagauguccauccagcucaucaacaaggccgugaacgcccugaucaacgaccagcugaucaugaagaaccaccuccgcgacaucaugugcauccccuacugcaacuacagcaaguacugguaccugaaccacaccgugaccggcaagaccucccugcccaagugcuggcucgucagcaacggcuccuaccugaacgagacgcacuucagcgacgacaucgagcagcaggcggacaacaugaucaccgagaugcugcagaaggaguacauggagcggcaggggaagaccccgcucggccugguggaccuguucguguucuccaccagcuucuaccucaucuccaucuuccugcaccuggucaagauccccacgcaccgccacgugguggggaagcccugccccaagccgcaccggcugaaccacaugggcaucugcagcugcggguucuacggccagcccggcguccccgugcgcuggaagcgguga

SEQ ID NO: 4569 - RNA, 1476 nt, Artificial Sequence
  derived and/or modified protein sequence (opt1) from LASV(Mad63;Clade IV)__ANH09728__GPCstabilized
augggccagaucgugaccuucuuccaggaggucccccacgugaucgaggaggugaugaacaucguccugaucgcccucagcgugcuggccgugcugaaggggcucuacaacgucgcgaccugcggccugaucgggcuggugacguuccuccugcugugcggccgcuccugcaccaccacccucuacaaggggguguacgagcugcaggcccuggagcucaacaugggcacgcugaacaugaccaugccgcugagcugcaccaagaacaacucccaccacuacaucauggucggcaacgagaccgggcucgagcugacgcugaccaacaccagcaucaucaaccacaaguucugcaaccucuccgacgcccacaagaaggaccuguacgaccacgcccugaugagcaucaucuccaccuuccaccucagcgugcccaacuucaaccaguacgaggccauguccugcgacuucaacggcgggaagaucagcgugcaguacaaccugucccacgcguacgccggcgacacggccaaccacugcgggaccgucgccaacggcgugcugcagaccuucaugcggauggcguggggcgggagcuacaucgcccucgacuccggcugcgggggcugggacugcaucaugaccagcuaccaguaccugaucauccagaacacgaccugggaggaccacugccaguucucccgccccagccccaucggcuaccuggggcuccugucccagcggacccgcgacaucuacaucagccggcgccggcgcggcaccuucacguggacccuguccgacagcgagggggaguacaccccgggcggguacugccucacccgguggaugcugaucgaggccgagcugaagugcuucggcaacacggccguggccaagugcaacgagaagcacgacgaggaguucugcgacaugcuccgccuguucgacuucaacaagcaggcgauccagcggcugaaggcccccgcccagaugagcauccagcucaucaacaaggccgucaacgcccugaucaacgaccagcugaucaugaagaaccaccuccgcgacaucaugugcauccccuacugcaacuacuccaaguacugguaccugaaccacaccgugaccggcaagaccagccugcccaagugcuggcucguguccaacgggagcuaccugaacgagacgcacuucuccgacgacaucgagcagcaggcggacaacaugaucaccgagaugcugcagaaggaguacauggagcggcagggcaagaccccgcucgggcuggucgaccuguucguguucagcaccuccuucuaccucaucagcaucuuccugcaccuggugaagauccccacgcaccgccacgucgugggcaagcccugccccaagccgcaccggcugaaccacauggggaucugcuccugcggcuucuacaagcagcccggcgugcccguccgcuggaagcgguga

SEQ ID NO: 4570 - RNA, 1476 nt, Artificial Sequence
  derived and/or modified protein sequence (opt1) from LASV(Mad69;Clade IV)__ANH09730__GPCstabilized
augggccagaucgugaccuucuuccaggaggucccccacgugaucgaggaggugaugaacaucguccugaucgcccucagcgugcuggccgugcugaaggggcucuacaacgucgcgaccugcggccugaucgggcuggugacguuccuccugcugugcggccgcuccugcaccaccacccucuacaaggggguguacgagcugcaggcccuggagcucaacauggagacgcugaacaugaccaugccgcugagcugcaccaagaacaacucccaccacuacaucauggucggcaacgagaccggccucgagcugacgcugaccaacaccagcaucaucaaccacaaguucugcaaccucuccgacgcccacaagaagaaccuguacgaccacgcccugaugagcaucaucuccaccuuccaccucagcauccccaacuucaaccaguacgaggccauguccugcgacuucaaccaggggaagaucagcgugcaguacaaccugucccacgcguacgccggcgacgccgccaaccacugcgggacgguggcgaacggcguccugcagaccuucaugcggauggccuggggcgggagcuacaucgcccucgacuccggcugcgggggcugggacugcaucaugaccagcuaccaguaccugaucauccagaacaccacgugggagaaccacugccaguucucccgccccagccccaucggguaccugggccuccugucccagcggacccgcgacaucuacaucagccggcgccggcgcggcaccuucaccuggacgcuguccgacagcgaggggaagggcacccccgggggcuacugccucacccgguggaugcugaucgaggccgagcugaagugcuucgggaacaccgccguggcgaagugcaacgagaagcacgacgaggaguucugcgacaugcuccgccuguucgacuucaacaagcaggccauccagcgguucaaggccccggcccagaugagcauccagcugaucaacaaggccgugaacgcgcucaucaacgaccagcugaucaugaagaaccaccuccgcgacaucaugugcauccccuacugcaacuacuccaaguacugguaccugaaccacacggucaccggcaagaccagccugcccaagugcuggcugguguccaacggcagcuaccucaacgagacccacuucuccgacgacaucgagcagcaggccgacaacaugaucacggagaugcugcagaaggaguacauggagcggcaggggcgcaccccgcugggccucguggaccuguucgucuucagcaccuccuucuaccugaucagcaucuuccuccaccuggugaagauccccacccaccggcacguggucgggaagcccugccccaagccgcaccgccugaaccacaugggcaucugcuccugcggguucuacaagcagcccggcgugcccgugcgguggaagcgcuga

SEQ ID NO: 4571 - RNA, 1476 nt, Artificial Sequence
  derived and/or modified protein sequence (opt1) from LASV(Mad83;Clade IV)__ANH09732__GPCstabilized
augggccagaucgugaccuucuuccaggaggucccccacgugaucgaggaggugaugaacaucguccugaucgcccucagcauccuggccgugcugaaggggguguacaacgucgcgaccugcggccucaucgggcuggugacguuccugcuccuguccggccgcagcugcaccaccaccaucuacaaggggguguacgagcugcaggcccucgagcugaacauggagacgcugaacaugaccaugccgcucuccugcaccaagaacaacagccaccacuacaucauggucggcaacgagaccggccuggagcugacgcucaccaacaccuccaucaucaaccacaaguucugcaaccugagcgacgcccacaagaagaaccuguacgaccacgcccucauguccaucaucagcaccuuccaccuguccauccccaacuucaaccaguacgaggccaugagcugcgacuucaacgggggcaagaucuccgugcaguacaaccugagccacacguacgcgggggacgccgccaaccacugcggcaccguggccaacgggguccuccagaccuucaugcggauggcguggggcggcuccuacaucgcccuggacagcgggugcggcgggugggacugcaucaugaccuccuaccaguaccugaucauccagaacacgaccugggagaaccacugccaguucagccgccccucccccaucggcuaccucggccugcugagccagcggacccgcgacaucuacaucucccggcgccggcgcgggaccuucacguggacccucagcgacagcgagggcaaggacacccccgggggcuacugccugacccgguggaugcugaucgaggccgagcucaagugcuucgggaacacggccguggccaagugcaacgagaagcacgacgaggaguucugcgacaugcugcgccuguucgacuucaacaagcaggcgauccagcggcucaaggccccggcccagauguccauccagcugaucaacaaggccgugaacgcccugaucaacgaccagcucaucaugaagaaccaccuccgcgacaucaugugcauccccuacugcaacuacagcaaguacugguaccugaaccacaccgucaccggcaagaccucccugcccaagugcuggcuggugagcaacggcuccuaccugaacgagacgcacuucagcgacgacaucgagcagcaggcggacaacaugaucaccgagaugcuccagaaggaguacauggagcggcaggggaagaccccgcugggccugguggaccucuucgucuucuccaccagcuucuaccugaucuccaucuuccugcaccucgugaagauccccacgcaccgccacaucguggggaagcccugccccaagccgcaccggcugaaccacaugggcaucugcagcugcggguucuacaagcagcccggcguccccgugcgcuggaagcgguga

SEQ ID NO: 4572 - RNA, 1476 nt, Artificial Sequence
  derived and/or modified protein sequence (opt1) from LASV(NL;Clade IV)__AAO59512__GPCstabilized
augggccagaucgugaccuucuuccaggaggucccccacgugaucgaggaggugaugaacaucguccugaucgcccucagcauccuggccgugcugaaggggcucuacaacuucgcgaccugcggccugguggggcuggucgccuuccuccugcugugcggccgcuccugcacgagcucccucuacaaggggguguacgagcugcagacccuggagcucaacauggagacccugaacaugaccaugccgcugagcugcacgaagaacaacucccaccacuacauccgggugggcaacgagaccggccucgagcugacccugaccaacacgagcaucaucaaccacaaguucugcaaccucuccgacgcccacaagaagaaccuguacgaccacgcccugaugagcaucaucuccaccuuccaccucagcauccccaacuucaaccaguacgaggccauguccugcgacuucaacgggggcaagaucagcguccaguacaaccugucccacagcuacgcgguggacgccgccaagcacugcgggaccguggccaacggcguccugcagaccuucaugcgcauggcguggggcggguccuacaucgcccucgacagcggcugcgggcggugggacugcaucaugacguccuaccaguaccugaucauccagaacaccaccugggaggaccacugccaguucagccgccccucccccaucggcuaccuggggcuccugagccagcggacccgcgacaucuacaucagccggcgccggcgcggcacguucaccuggacccuguccgacagcgagggcaaggacacccccgggggcuacugccucacgcgguggaugcugaucgaggccgagcugaagugcuucgggaacaccgccguggccaagugcaacgagaagcacgacgaggaguucugcgacaugcuccgccuguucgacuucaacaagcaggcgauccagcggcugaagaccccggcccagauguccauccagcucaucaacaaggccgugaacgcccugaucaacgaccagcugaucaugaagaaccaccuccgcgacaucaugugcauccccuacugcaacuacagccgguacugguaccugaaccacaccacgaccggcaagaccucccugcccaagugcuggcucgucagcaacggguccuaccugaacgagacccgcuucagcgacgacaucgagcagcaggccgacaacaugaucacggagaugcugcagaaggaguacauggagcggcagggcaagaccccgcucggccugguggaccuguucguguucuccaccagcuucuaccucaucuccaucuuccugcaccuggucaagauccccacccaccgccacaucgugggcaagagcugccccaagccccaccggcugaaccacauggggaucugcuccugcgggcucuacaagcagccgggcgugcccgucaaguggaagcgcuga

SEQ ID NO: 4573 - RNA, 1476 nt, Artificial Sequence
  derived and/or modified protein sequence (opt1) from LASV(Z0947-SLE-2011;Clade IV)__AIT17840__GPCstabilized
augggccagaucgugaccuucuuccaggaggucccccacgugaucgaggaggugaugaacaucguccugaucgcccucagcauccuggccgugcugaaggggcucuacaacuucgcgaccugcggccugguggggcuggucacguuccuccugcugugcggccgcuccugcaccaucagccucuacaaggggguguacgagcugcagacccuggagcucaacauggagacccugaacaugacgaugccgcuguccugcaccaagaacaacagccaccacuacaucauggugggcaacgagaccggccucgagcugacccugacgaacaccuccaucaucaaccacaaguucugcaaccucagcgacgcccacaagaagaaccuguacgaccacgcccugauguccaucaucagcaccuuccaccucuccauccccaacuucaaccaguacgaggccaugagcugcgacuucaacgggggcaagaucuccguccaguacaaccugagccacuccuacgccggggacgcggccaaccacugcggcaccguggccaacggggugcugcagacguucaugcggauggccuggggcggcagcuacaucgcgcucgacuccgggugcgaccgcugggacugcaucaugaccagcuaccaguaccugaucauccagaacaccaccugggaggaccacugccaguucucccggcccagccccaucggcuaccuggggcuccugucccagcgcacgcgggacaucuacaucagccgccggcgccggggcaccuucaccuggacccugagcgacuccgagggcaaggacacgcccgggggcuacugccucacccgcuggaugcugaucgaggccgagcugaagugcuucgggaacaccgccgucgccaagugcaacgagaagcacgacgaggaguucugcgacaugcuccggcuguucgacuucaacaagcaggccauccagcgccugaaggcgccggcccagaugagcauccagcucaucaacaaggccgugaacgcccugaucaacgaccagcugaucaugaagaaccaccuccgggacaucaugugcauccccuacugcaacuacuccaaguacugguaccugaaccacaccacgaccggcaagaccagccugcccaagugcuggcucguguccaacgggagcuaccugaacgagacccacuucuccgacgacaucgagcagcaggccgacaacaugaucacggagaugcugcagaaggaguacauggagcgccagggcaagaccccgcucggccuggucgaccuguucguguucagcaccuccuucuaccucaucagcaucuuccugcaccuggugaagauccccacccaccggcacaucgucgggaagcccugccccaagccgcaccgccugaaccacaugggcaucugcuccugcgggcucuacaagcagcccggcgugcccgugaaguggaagcgguga

SEQ ID NO: 4574 - RNA, 1476 nt, Artificial Sequence
  derived and/or modified protein sequence (opt1) from LASV(Z0948-SLE-2011;Clade IV)__AIT17844__GPCstabilized
augggccagaucgugaccuucuuccaggaggucccccacgugaucgaggaggugaugaacaucguccugaucgcccucagcauccuggccgugcugaaggggcucuacaacuucgcgaccugcggccugguggggcuggucacguuccuccugcugugcggccgcuccugcaccaucagccucuacaaggggguguacgagcugcagacccuggagcucaacauggagacccugaacaugacgaugccgcuguccugcaccaagaacaacagccaccacuacaucauggugggcaacgagaccggccucgagcugacccugacgaacaccuccaucaucaaccacaaguucugcaaccucagcgacgcccacaagaagaaccuguacgaccacgcccugauguccaucaucagcaccuuccaccucuccauccccaacuucaaccaguacgaggccaugagcugcgacuucaacgggggcaagaucuccguccaguacaaccugagccacuccuacgccggggacgcggccaaccacugcggcaccguggccaacggggugcugcagacguucaugcggauggccuggggcggcagcuacaucgcgcucgacuccgggugcgaccgcugggacugcaucaugaccagcuaccaguaccugaucauccagaacaccaccugggaggaccacugccaguucucccggcccagccccaucggcuaccuggggcuccugucccagcgcacgcgggacaucuacaucagccgccggcgccggggcaccuucaccuggacccugagcgacuccgagggcaaggacacgcccgggggcuacugccucacccgcuggaugcugaucgaggccgagcugaagugcuucgggaacaccgccgucgccaagugcaacgagaagcacgacgaggaguucugcgacaugcuccggcuguucgacuucaacaagcaggccauccagcgccugaaggcgccggcccagaugagcauccagcucaucaaccgggccgugaacgcccugaucaacgaccagcugaucaugaagaaccaccuccgcgacaucaugugcauccccuacugcaacuacuccaaguacugguaccugaaccacaccacgaccggcaagaccagccugcccaagugcuggcucguguccaacgggagcuaccugaacgagacccacuucuccgacgacaucgagcagcaggccgacaacaugaucacggagaugcugcagaaggaguacauggagcggcagggcaagaccccgcucggccuggucgaccuguucguguucagcaccuccuucuaccucaucagcaucuuccugcaccuggugaagauccccacccaccgccacaucgucgggaagcccugccccaagccgcaccggcugaaccacaugggcaucugcuccugcgggcucuacaagcagcccggcgugcccgugaaguggaagcgcuga

SEQ ID NO: 4575 - RNA, 1476 nt, Artificial Sequence
  derived and/or modified protein sequence (opt1) from LASV(Z148;Clade IV)__AAT49008__GPCstabilized
augggccagaucgugaccuucuuccaggaggucccccacgugaucgaggaggugaugaacaucguccugaucgcccucagcauccuggccgugcugaaggggcucuacaacguggcgaccugcggccugaucgggcuggucacguuccucuuccugugcggccgcuccugcagcaccacccuguacaaggggguguacgagcuccagacccuggagcugaacauggagacgcucaacaugaccaugccgcuguccugcaccaagaacaacagccaccacuacaucauggugggcaacgagaccggccuggagcucacgcugaccaacaccuccaucaucaaccacaaguucugcaaccugagcgacgcccacaagaagaaccucuacgaccacacccugauguccaucaucagcacguuccaccuguccauccccaacuucaaccaguacgaggccaugagcugcgacuucaacgggggcaagaucuccguccaguacaaccucagccacuccuacgccguggacgccgcgaaccacugcgggaccguggccaacggcguccugcagaccuucaugcggauggccuggggcgggagcuacaucgcccuggacuccggcugcgggaacugggacugcaucaugaccagcuaccaguaccucaucauccagaacacgaccugggaggaccacugccaguucucccgccccagccccaucggcuaccuggggcugcucucccagcggacccgcgacaucuacaucagccggcgccggcgcggcaccuucacguggacccugagcgacuccgagggcaaggacacccccgggggcuacugccugacccgguggaugcucaucgaggcggagcugaagugcuucgggaacacggccguggccaagugcaacgagaagcacgacgaggaguucugcgacaugcugcgccucuucgacuucaacaagcaggccauccagcggcugaaggccccggcgcagaugagcauccagcugaucaacaaggccgugaacgcccucaucaacgaccagcugaucaugaagaaccaccuccgcgacaucaugugcauccccuacugcaacuacucccgguacugguaccugaaccacaccgucaccggcaagaccagccugcccaagugcuggcugguguccaacgggagcuaccucaacgagacgcacuucuccgacgacaucgagcagcaggccgacaaccugaucaccgagaugcugcagaaggaguacauggagcgccagggcaagaccccgcucggccugguggaccuguucgucuucagcaccuccuucuaccucaucagcaucuuccugcaccuggugaagauccccacgcaccggcacaucguggggaagcccugccccaagccgcaccgccugaaccacaugggcaucugcuccugcggggucuacaagcagcccggcgugcccgugcgguggaagcgcuga

SEQ ID NO: 4576 - RNA, 1476 nt, Artificial Sequence
  derived and/or modified protein sequence (opt1) from LASV(Bamba-R114;Clade V)__AHC95555__GPCstabilized
augggccagaucgugaccuucuuccaggaggucccccacgugaucgaggaggugaugaacaucguccugaucgcccucagcauccuggccgugcugaaggggcucuacaacaucgcgaccugcggccugaucgggcuggugacguuccuccugcugugcggccgcuccugcagcuccaaccucuacaagggggucuacgagcugcagagccuggaccucaacauggagacccugaacaugaccaugccgcuguccugcaccaagaacaacagccaccacuacauccgggccggcaacgagacgggccucgagcugacccugaccaacaccucccucaucaaccacaaguucugcaaccugagcgacgcccacaagaagaaccuguacgaccacacgcucauguccaucaucagcaccuuccaccuguccauccccaacuucaaccaguacgaggccaugagcugcgacuucaacgggggcaagaucuccgugcaguacaaccugagccacgccuacgcgaucgacgccgccgagcacugcgggaccguggccaacggcguccuccagaccuucaugcgcauggcguggggcggguccuacaucgcccuggacagcggcugcgggaacugggacugcaucaugacguccuaccaguaccugaucauccagaacaccaccugggaggaccacugccaguucagccggcccucccccaucggcuaccucgggcugcugagccagcgcacccgggacaucuacaucagccgccggcgccggggcacguucaccuggacccucuccgacagcgagggcaacgccacccccgggggcuacugccugacgcgcuggaugcugaucgaggccgagcucaagugcuucgggaacaccgccguggcgaagugcaacgagaagcacgacgaggaguucugcgacaugcugcggcuguucgacuucaacaagcaggccaucucccgccucaagagcccggcccagauguccauccagcugaucaacaaggccgugaacgcccugaucaacgaccagcucaucaugaagaaccaccuccgggacaucaugugcauccccuacugcaacuacagcaaguacugguaccugaaccacaccaucaccggccgcacgucccugcccaagugcuggcuggucagcaacggguccuaccugaacgagacccacuucagcgacgacaucgagcagcaggcggacaacaugaucaccgagaugcuccagaaggaguacauggagcggcagggcaagaccccgcugggccugguggaccucuucguguucuccacgagcuucuaccugaucuccaucuuccugcaccuggucaagauccccacccaccgccacaucguggggaagcccugccccaagccgcaccggcucaaccacaugggcaucugcagcugcgggcuguacaagcagcccggcgugccccugaaguggaagcgcuga

SEQ ID NO: 4577 - RNA, 1476 nt, Artificial Sequence
  derived and/or modified protein sequence (opt1) from LASV(Komina-R16;Clade V)__AHC95557__GPCstabilized
augggccagaucgugaccuucuuccaggaggucccccacgugaucgaggaggugaugaacaucguccugaucgcccucagcauccuggccgugcugaaggggcucuacaacaucgcgaccugcggccugaucgggcuggugacguucuuccuccugugcggccgcuccugcagcuccaaccuguacaagggggucuacgagcuccagagccuggaccugaacauggagacccucaacaugaccaugccgcuguccugcaccaagaacaacagccaccacuacauccgggugggcaacgagacgggccuggagcucacccugaccaacaccucccugcucaaccacaaguucugcaaccugagcgacgcccacaagcgcaaccuguacgaccacgcccucauguccaucaucagcacguuccaccuguccauccccaacuucaaccaguacgaggccaugagcugcgacuucaacgggggcaagaucaccgugcaguacaaccugucccacagcuacgccggggacaccgcgaagcacugcggcaccaucgccaacgggguccuccagacguucaugcggauggccuggggcggcuccuacaucgcccuggacagcgggugcggcaacugggacugcaucaugaccuccuaccaguaccugaucauccagaacaccaccugggaggaccacugccaguucagccgccccucccccaucggguaccucggccugcugagccagcggacgcgcgacaucuacaucagccggcgccggcgcggcaccuucaccuggacccucuccgacagcgaggggaacgcgacgccgggcggguacugccugacccgguggaugcugaucgaggccgagcucaagugcuucggcaacaccgccguggccaagugcaacgagaagcacgacgaggaguucugcgacaugcugcgccuguucgacuucaacaagcaggccaucucccggcuccgcagccccgcgcagauguccauccagcugaucaacaaggccgugaacgcccugaucaacgaccagcucaucaugaagaaccaccuccgggacaucaugugcauccccuacugcaacuacagcaaguacugguaccugaaccacaccgucacggggcgcaccucccugcccaagugcuggcuggugagcaacggcuccuaccugaacgagacccacuucagcgacgacaucgagcagcaggccgacaacaugaucaccgagaugcuccagaaggaguacauggaccggcagggcaagacgccgcuggggcugguggaccucuucgucuucuccaccagcuucuaccugaucuccaucuuccugcaccuggugaagauccccacccaccgccacaucgugggcaagcccugccccaagccgcaccggcucaaccgcauggggaucugcagcugcggccuguacaagcagcccgggguccccgugaaguggaagcgguga

SEQ ID NO: 4578 - RNA, 1476 nt, Artificial Sequence
  derived and/or modified protein sequence (opt1) from LASV(Ouoma-R123;Clade V)__AHC95559__GPCstabilized
augggccagaucaucaccuucuuccaggaggugccccacgucaucgaggaggugaugaacaucgugcugaucgcccucagcauccuggccguccugaaggggcucuacaacaucgcgaccugcggccugaucgggcuggugacguuccuccugcugugcggccgcuccugcagcuccagccucuacaaggggguguacgagcugcagucccuggaccucaacauggagacccugaacaugaccaugccgcugagcugcaccaagaacaacucccaccacuacauccgggucggcaacgagacgggccucgagcugacccugaccaacaccagccucaucaaccacaaguucugcaaccuguccgacgcccacaagaagaaccuguacgaccacgcccucaugagcaucaucuccacguuccaccugagcauccccaacuucaaccaguacgaggccauguccugcgacuucaacgggggcaagaucagcgugcaguacaaccugucccacgccuacgcgaucgacgccgccagccacugcgggaccguggccaacggcguccuccagaccuucaugcgcauggcguggggcggguccuacaucgcccuggacagcggcugcgggaacugggacugcaucaugaccuccuaccaguaccugaucauccagaacacgaccugggaggaccacugccaguucagccggcccagccccaucggcuaccucgggcugcugucccagcgcacccgggacaucuacaucagccgccggcgccggggcaccuucacguggacccucuccgacagcgagggcaacgccacccccgggggcuacugccugacccgcuggaugcugaucgaggccgagcucaagugcuucgggaacacggccguggcgaagugcaacgagaagcacgacgaggaguucugcgacaugcugcggcuguucgacuucaacaagcaggccaucucccgccucaagagcccggcccagauguccauccagcugaucaacaaggccgugaacgcccugaucaacgaccagcucaucaugaagaaccaccuccgggacaucaugugcauccccuacugcaacuacagcaaguacugguaccugaaccacaccgucaccggcaagaccucccugcccaagugcuggcuggugagcaacggguccuaccugaacgagacgcacuucagcgacgacaucgagcagcaggcggacaacaugaucaccgagaugcuccagaaggaguacauggagcgccagggcaagaccccgcugggccugguggaccucuucgucuucuccaccagcuucuaccugaucuccaucuuccugcaccuggugaagauccccacgcaccggcacaucguggggaagcccugccccaagccgcaccgccucaaccacaugggcaucugcagcugcgggcuguacaagcagcccggcguccccgugaaguggaagcgguga

SEQ ID NO: 4579 - RNA, 1476 nt, Artificial Sequence
  derived and/or modified protein sequence (opt1) from LASV(Soromba-R;Clade V)__AHC95553__GPCstabilized
augggccagaucgugaccuucuuccaggaggucccccacgugaucgaggaggugaugaacaucguccugaucgcccucagcauccuggccgugcugaaggggcucuacaacaucgcgaccugcggccugaucgggcuggugacguucuuccuccugugcggccgcuccugcagcuccaaccuguacaagggggucuacgagcuccagagccuggaccugaacauggagacccucaacaugaccaugccgcuguccugcaccaagaacaacagccaccacuacauccgggugggcaacgagacgggccuggagcucacccugaccaacaccucccugcucgaccacaaguucugcaaccugagcgacgcccacaagaagaaccuguacgaccacgcccucauguccaucaucagcacguuccaccuguccauccccaacuucaaccaguacgaggccaugagcugcgacuucaacgggggcaagaucaccgugcaguacaaccugucccacagcuacgccggggacgcggcccgccacugcggcaccaucgccaacgggguccuccagaccuucaugcggauggccuggggcggcuccuacaucgcgcuggacagcgggugcggcaacugggacugcaucaugacguccuaccaguaccugaucauccagaacaccaccugggaggaccacugccaguucagccgccccucccccaucggguaccucagccugcugagccagcggacccgcgacaucuacaucucccggcgccggcgcggcacguucaccuggacccucagcgacuccgagggcaacgccacccccgggggcuacugccugacgcgguggaugcugaucgaggccgagcucaagugcuucgggaacaccgccguggccaagugcaacgagaagcacgacgaggaguucugcgacaugcugcgccuguucgacuucaacaagcaggcgaucagccggcuccgcuccccggcccagaugagcauccagcugaucaacaaggccgugaacgcccugaucaacgaccagcucaucaugaagaaccaccuccgggacaucaugugcauccccuacugcaacuacuccaaguacugguaccugaaccacaccgucaccggccgcacgagccugcccaagugcuggcugguguccaacgggagcuaccugaacgagacccacuucuccgacgacaucgagcagcaggccgacaacaugaucaccgagaugcuccagaaggaguacauggaccggcagggcaagaccccgcugggccugguggaccucuucgucuucagcacguccuucuaccugaucagcaucuuccugcaccuggugaagauccccacccaccgccacaucguggggaagcccugccccaagccgcaccggcucaaccgcaugggcaucugcuccugcgggcuguacaagcagcccggcguccccgugaaguggaagcgguga

SEQ ID NO: 4580 - RNA, 1473 nt, Artificial Sequence; identical to SEQ ID NO: 4334
  derived and/or modified protein sequence (opt1) from LASV(Alzey;Clade VI)__SCA79105__GPCstabilized

SEQ ID NO: 4581 - RNA, 1473 nt, Artificial Sequence
  derived and/or modified protein sequence (opt1) from LASV(Lassa/H.sapiens-wt/TGO/2016/201600568;Clade VI)__AVN98153__GPCstabilized
augggccagaucaucaccuucuuccaggaggugccccacgucaucgaggaggugaugaacaucgugcugaucgcccucagccugcuggccauccucaagggggucuacaacguggcgaccugcggcaucaucgggcuggugacguuccuguuccucugcggccgcuccugcagccugaucuacaagggguccuacgagcugcagacccucgagcugaacauggagacccugaacaugaccaugccgcucagcugcacgaagaacuccagccaccacuacauccgggucggcaacgagaccggccuggagcugacccucaccaacacguccaucaucaaccacaaguucugcaaccugagcgacgcccacaagcgcaaccuguacgaccacgcccucauguccauccugagcaccuuccaccuguccauccccaacuucaaccaguacgaggccaugagcugcgacuucaacgggggcaagaucuccgugcaguacaaccucagccacgccuacgcgguggacgccgccgagcacugcgggaccgucgccaacggcgugcugcagaccuucaugcggauggcguggggcggguccuacaucgcccuggacagcggcugcgggaacugggacugcaucaugacguccuaccaguaccucaucauccagaacaccaccugggaggaccacugccaguucagccgccccucccccaucggcuaccuggggcugcucagccagcggacccgcgacaucuacaucagccggcgccggcgcggcacguucaccuggacccuguccgacagcgagggcaacgagacccccgggggcuacugccugacgcgguggaugcucaucgaggccgagcugaagugcuucgggaacaccgccguggccaagugcaacgagaagcacgacgaggaguucugcgacaugcugcgccucuucgacuucaacaagcaggcgauccagcggcugaaguccccggcccagaugagcauccagcugaucaacaaggccgucaacgcccucaucaacgaccagcugaucaugaagaaccaccuccgcgacaugaugugcauccccuacugcaacuacuccaaguacugguaccugaaccacaccagcuccggccgggccagccugcccaagugcuggcugguguccaacgggagcuaccucaacgagacccacuucuccgacgacaucgagcagcaggcggacaacaugaucacggagaugcugcagaaggaguacaucgaccgccagggcaagaccccgcugggccucguggaccuguucgucuucagcaccuccuucuaccugaucagcaucuuccuccaccugaucaagauccccacccaccggcacaucguggggaagcccugccccaagccgcaccgccugaaccacaugggcaucugcuccugcgggcuguacaagcagcccggcgugcccacgcgguggaagcgcuga

SEQ ID NO: 4582 - RNA, 1473 nt, Artificial Sequence
  derived and/or modified protein sequence (opt1) from LASV(NIGERIA IKEJI;Clade II)__AMZ00373__GPCstabilized
augggccagaucaucaccuucuuccaggaggugccccacgucaucgaggaggugaugaacaucgugcugaucgcccucagccugcuggccauccucaaggggaucuacaacgucgcgaccugcggccuguucgggcugaucuccuuccucuuccugugcggccgcagcugcuccacgauguacaaggggguguacgagcugcagacccucgagcuggacauggccaaccugaacaugaccaugccgcucagcugcaccaagaacaacucccaccacuacaucauggugggcaacgagacgggccuggagcugacccucaccaaccagagcaucaucaaccacaaguucugcaaccuguccgacgcccacaagaagaaccuguacgaccacacccucaugagcaucaucuccacguuccaccugagcauccccaacuucaaccaguacgaggccauguccugcgacuucaacgggggcaagaucagcguccaguacaaccugucccacagcuacgccguggacgcggccaaccacugcgggaccguggccaacggcguccuccagaccuucaugcggauggccuggggcggguccuacaucgcgcuggacagcggcugcgggaacugggacugcaucaugaccuccuaccaguaccugaucauccagaacacgaccugggaggaccacugccaguucagccgccccucccccaucggcuaccucgggcugcugagccagcggacccgcgacaucuacaucagccggcgccggcgcggcaccuucacguggacccucuccgacagcgagggcaacgacgcccccgggggcuacugccugacccgguggaugcugaucgaggccgagcucaagugcuucgggaacaccgccaucgccaagugcaacgagaagcacgacgaggaguucugcgacaugcugcgccuguucgacuucaacaagcaggcgaucaagcggcucaaggccccggcccagauguccauccagcugaucaacaaggccgugaacgcccugaucaacgaccagcucaucaugaagaaccaccuccgcgacaucaugugcauccccuacugcaacuacagcaaguacugguaccugaacaacacggugaccggcaaguccagccugcccaagugcuggcuggucuccaacgggagcuaccugaacgagacccacuucuccgacgacaucgagcagcaggcggacaacaugaucaccgagaugcuccagaaggaguacauggaccggcagggcaagacgccgcugggccugguggaccucuucguguucagcaccuccuucuaccugaucagcaucuuccugcaccucgucaagauccccacccaccgccacaucaccgggaagcccugccccaagccgcaccggcugaaccacaugggcaucugcuccugcgggcuguacaagcagcccggcgugcccgugaaguggaagcgcuga

SEQ ID NO: 4583 - RNA, 1476 nt, Artificial Sequence
  derived and/or modified protein sequence (opt2) from LASV(Josiah;Clade IV)__NP_694870__GPCstabilized
augggccagaucgucaccuucuuccaggaggucccccacgucaucgaggaggucaugaacaucguccucaucgcccucuccguccucgccguccucaagggccucuacaacuucgccaccugcggccucgucggccucgucaccuuccuccuccucugcggccgcuccugcaccaccucccucuacaagggcgucuacgagcuccagacccucgagcucaacauggagacccucaacaugaccaugccccucuccugcaccaagaacaacucccaccacuacaucauggucggcaacgagaccggccucgagcucacccucaccaacaccuccaucaucaaccacaaguucugcaaccucuccgacgcccacaagaagaaccucuacgaccacgcccucauguccaucaucuccaccuuccaccucuccauccccaacuucaaccaguacgaggccauguccugcgacuucaacggcggcaagaucuccguccaguacaaccucucccacuccuacgccggcgacgccgccaaccacugcggcaccgucgccaacggcguccuccagaccuucaugcgcauggccuggggcggcuccuacaucgcccucgacuccggcugcggcaacugggacugcaucaugaccuccuaccaguaccucaucauccagaacaccaccugggaggaccacugccaguucucccgccccucccccaucggcuaccucggccuccucucccagcgcacccgcgacaucuacaucucccgccgccgccggggcaccuucaccuggacccucuccgacuccgagggcaaggacacccccggcggcuacugccucacccgcuggaugcucaucgaggccgagcucaagugcuucggcaacaccgccgucgccaagugcaacgagaagcacgacgaggaguucugcgacaugcuccgccucuucgacuucaacaagcaggccauccagcgccucaaggcccccgcccagauguccauccagcucaucaacaaggccgucaacgcccucaucaacgaccagcucaucaugaagaaccaccuccgcgacaucaugugcauccccuacugcaacuacuccaaguacugguaccucaaccacaccaccaccggccgcaccucccuccccaagugcuggcucgucuccaacggcuccuaccucaacgagacccacuucuccgacgacaucgagcagcaggccgacaacaugaucaccgagaugcuccagaaggaguacauggagcgccagggcaagaccccccucggccucgucgaccucuucgucuucuccaccuccuucuaccucaucuccaucuuccuccaccucgucaagauccccacccaccgccacaucgucggcaaguccugccccaagccccaccgccucaaccacaugggcaucugcuccugcggccucuacaagcagcccggcguccccgucaaguggaagcgcuga

SEQ ID NO: 4584 - RNA, 1473 nt, Artificial Sequence
  derived and/or modified protein sequence (opt2) from LASV(LP;Clade I)__AAF86701__GPCstabilized
augggccagaucaucaccuucuuccaggaggucccccacgucaucgaggaggucaugaacaucguccucaucgcccucucccuccucgccauccucaagggccucuacaacaucgccaccugcggcaucaucggccucgucgccuuccucuuccucugcggcaaguccugcucccucacccucaagggcggcuacgagcuccagacccucgagcucaacauggagacccucaacaugaccaugccccucuccugcaccaagaacuccucccaccacuacauccgcgucggcaacgagaccggccucgagcucacccucaccaacaccuccaucaucaaccacaaguucugcaaccucuccgacgcccacaagaagaaccucuacgaccacgcccucauguccaucaucuccaccuuccaccucuccauccccaacuucaaccaguacgaggccauguccugcgacuucaacggcggcaagaucuccguccaguacaaccucucccacuccuacgccggcgacgccgccgagcacugcggcaccgucgccaacggcguccuccagaccuucaugcgcauggccuggggcggccgcuacaucgcccucgacuccggcugcggcaacugggacugcaucaugaccuccuaccaguaccucaucauccagaacaccaccugggaggaccacugccaguucucccgccccucccccaucggcuaccucggccuccucucccagcgcacccgcgacaucuacaucucccgccgccgccggggcaccuucaccuggacccucuccgacuccgagggcaacgagacccccggcggcuacugccucacccgcuggaugcucaucgaggccgagcucaagugcuucggcaacaccgccgucgccaagugcaacgagaagcacgacgaggaguucugcgacaugcuccgccucuucgacuucaacaagcaggccauccgccgccucaaggcccccgcccagauguccauccagcucaucaacaaggccgucaacgcccucaucaacgaccagcucaucaugaagaaccaccuccgcgacaucaugugcauccccuacugcaacuacuccaaguacugguaccucaaccacaccuccuccggccgcaccucccuccccaagugcuggcucaucuccaacggcuccuaccucaacgagacccaguucuccgacgacaucgagcagcaggccgacaacaugaucaccgagaugcuccagaaggaguacaucgagcgccagggcaagaccccccucggccucgucgacaucuucaucuucuccaccuccuucuaccucaucuccaucuuccuccaccucaucaagauccccacccaccgccacaucgucggcaagcccugccccaagccccaccgccucaaccacaugggcgucugcuccugcggccucuacaagcaccccggcguccccaccaaguggaagcgcuga

SEQ ID NO: 4585 - RNA, 1473 nt, Artificial Sequence
  derived and/or modified protein sequence (opt2) from LASV(803213;Clade II)__AAF86703__GPCstabilized
augggccagaucaucaccuucuuccaggaggucccccacgucaucgaggaggucaugaacaucguccucaucgcccucucccuccucgccauccucaagggcaucuacaacgucgccaccugcggccucuucggccucaucuccuuccuccuccucugcggccgcuccugcuccgucaccuacaagggcgucuacgagcuccagacccucgagcucaacauggccaaccucaacaugaccaugccccucuccugcaccaagaacaacucccaccacuacaucauggucggcaacgagaccggccucgagcucacccucaccaacaccuccaucaucaaccacaaguucugcaaccucuccgacgcccacaagaagaaccucuacgaccacgcccucauguccaucaucuccaccuuccaccucuccauccccaacuucaaccaguacgaggccauguccugcgacuucaacggcggcaagaucuccguccaguacaaccucucccacuccuucgccgucgacgccgccaaccacugcggcaccaucgccaacggcguccuccagaccuucaugcgcauggccuggggcggcuccuacaucgcccucgacuccggcugcggcaacugggacugcaucaugaccuccuaccaguaccucaucauccagaacaccaccugggaggaccacugccaguucucccgccccucccccaucggcuaccucggccuccucucccagcgcacccgcgacaucuacaucucccgccgccgccggggcaccuucaccuggacccucuccgacuccgagggcaacgaggcccccggcggcuacugccucacccgcuggaugcucaucgaggccgagcucaagugcuucggcaacaccgccgucgccaagugcaacgagaagcacgacgaggaguucugcgacaugcuccgccucuucgacuucaacaagcaggccaucaagcgccucaagacccccgcccagauguccauccagcucaucaacaaggccgucaacgcccucaucaacgaccagcucaucaugaagaaccaccuccgcgacaucaugugcauccccuacugcaacuacucccgcuacugguaccucaaccacaccgucaccggcaagaccucccucccccgcugcuggcucgucuccaacggcuccuaccucaacgagacccacuucuccgacgacaucgagcagcaggccgacaacaugaucaccgagaugcuccagaaggaguacauggaccgccagggcaagaccccccucggccucgucgaccucuucgucuucuccaccuccuucuaccucaucuccaucuuccuccaccucgucaagauccccacccaccgccacaucgucggcaagcccugccccaagccccaccgccucaaccacaugggcaucugcuccugcggccucuacaagcaccccggcguccccgucaaguggaagcgcuga

SEQ ID NO: 4586 - RNA, 1473 nt, Artificial Sequence
  derived and/or modified protein sequence (opt2) from LASV(GA391;Clade III)__CAA36645__GPCstabilized
augggccagaucgucaccuucuuccaggaggucccccacgucaucgaggaggucaugaacaucguccucaucgcccucuccauccucgccauccucaagggccucuacaacgucgccaccugcggccucaucggccucgucaccuuccuccuccucuccggccgcuccugcucccucaucuacaagggcaccuacgagcuccagacccucgagcucaacauggagacccucaacaugaccaugccccucuccugcaccaagaacaacucccaccacuacauccgcgucggcaacgagaccggccucgagcucacccucaccaacaccuccauccucaaccacaaguucugcaaccucuccgacgcccacaagcgcaaccucuacgaccacucccucauguccaucaucuccaccuuccaccucuccauccccaacuucaaccaguacgaggccauguccugcgacuucaacggcggcaagaucaccguccaguacaaccucucccacuccuucgccgucgacgccgccggccacugcggcacccucgccaacggcguccuccagaccuucaugcgcauggccuggggcggcuccuacaucgcccucgacuccggcugcggcaacugggacugcaucaugaccuccuaccaguaccucaucauccagaacaccaccugggacgaccacugccaguucucccgccccucccccaucggcuaccucggccuccucucccagcgcacccgcgacaucuacaucucccgccgccgccggggcaccuucaccuggacccucuccgacuccgagggcaacgagacccccggcggcuacugccucacccgcuggaugcucaucgaggccgagcucaagugcuucggcaacaccgccgucgccaagugcaacgagaagcacgacgaggaguucugcgacaugcuccgccucuucgacuucaacaagcaggccauccgccgccucaagacccccgcccagauguccauccagcucaucaacaaggccgucaacgcccucaucaacgaccagcucaucaugaagaaccaccuccgcgacaucaugugcauccccuacugcaacuacucccgcuacugguaccucaaccacaccuccaccggcaagaccucccucccccgcugcuggcucaucuccaacggcuccuaccucaacgagaccaaguucuccgacgacaucgagcagcaggccgacaacaugaucaccgagaugcuccagaaggaguacaucgaccgccagggcaagaccccccucggccucgucgaccucuucgucuucuccaccuccuucuaccucaucuccaucuuccuccaccucgucaagauccccacccaccgccacaucgucggcaagcccugccccaagccccaccgccucaaccacaugggcaucugcuccugcggccucuacaagcagcccggcguccccguccgcuggaagcgcuga

SEQ ID NO: 4587 - RNA, 1476 nt, Artificial Sequence
  derived and/or modified protein sequence (opt2) from LASV(AV;Clade V)__CCA30314__GPCstabilized
augggccagaucgucaccuucuuccaggaggucccccacgucaucgaggaggucaugaacaucguccucaucgcccucuccauccucgccguccucaagggccucuacaacaucgccaccugcggccucaucggccucaucaccuuccuccuccucugcggccgcuccugcuccuccaaccucuacaagggcgucuacgagcuccagucccucgaccucaacauggagacccucaacaugaccaugccccucuccugcaccaagaacaacucccaccacuacauccgcgucggcaacgacaccggccucgagcucacccucaccaacaccuccauccucaaccacaaguucugcaaccucuccgacgcccacaagaaggaccucuacgaccacgcccucauguccaucaucuccaccuuccaccucuccauccccaacuucaaccaguacgaggccauguccugcgacuucaacggcggcaagaucuccguccaguacaaccucucccacuccuacgccaucgacgccgccaaccacugcggcaccgucgccaacggcauccuccagaccuucaugcgcauggccuggggcggcuccuacaucgcccucgacuccggcugcggcaacugggacugcaucaugaccuccuaccaguaccucaucauccagaacaccaccugggagaaccacugccaguucucccgccccucccccaucggcuaccucggccuccucucccagcgcacccgcgacaucuacaucucccgccgccgccggggcaccuucaccuggacccucuccgacuccgagggcaacgccacccccggcggcuacugccucacccgcuggaugcucaucgaggccgagcucaagugcuucggcaacaccgccgucgccaagugcaacgagaagcacgacgaggaguucugcgacaugcuccgccucuucgacuucaacaagcaggccaucucccgccucaagucccccgcccagauguccauccagcucaucaacaaggccgucaacgcccucaucaacgaccagcucaucaugaagaaccaccuccgcgacaucaugugcauccccuacugcaacuacuccaaguacugguaccucaaccacaccaucaccggcaagaccucccuccccaagugcuggcucgucuccaacggcuccuaccucaacgagacccacuucuccgacgacaucgagcagcaggccgacaacaugaucaccgagaugcuccagaaggaguacauggagcgccagggcaagaccccccucggccucgucgaccucuucgucuucuccaccuccuucuaccucaucuccaucuuccuccgccucgucaagauccccacccaccgccacaucgucggcaagcccugccccaagccccaccgccucaaccacaugggcaucugcuccugcggccucuacaagcagcccggcguccccguccgcuggaagcgcuga

SEQ ID NO: 4588 - RNA, 1473 nt, Artificial Sequence
  derived and/or modified protein sequence (opt2) from LASV(Togo/2016/7082;Clade VI)__AMR44577__GPCstabilized
augggccagaucaucaccuucuuccaggaggucccccacgucaucgaggaggucaugaacaucguccucaucgcccucucccuccucgccauccucaagggcgucuacaacgucgccaccugcggcaucaucggccucgucaccuuccucuuccucugcggccgcuccugcucccucaucuacaagggcuccuacgagcuccagacccucgagcucaacauggagacccucaacaugaccaugccccucuccugcaccaagaacuccucccaccacuacauccgcgucggcaacgagaccggccucgagcucacccucaccaacaccuccaucaucaaccacaaguucugcaaccucuccgacgcccacaagcgcaaccucuacgaccacgcccucauguccauccucuccaccuuccaccucuccauccccaacuucaaccaguacgaggccauguccugcgacuucaacggcggcaagaucuccguccaguacaaccucucccacgccuacgccgucgacgccgccgagcacugcggcaccgucgccaacggcguccuccagaccuucaugcgcauggccuggggcggcuccuacaucgcccucgacuccggcugcggcaacugggacugcaucaugaccuccuaccaguaccucaucauccagaacaccaccugggaggaccacugccaguucucccgccccucccccaucggcuaccucggccuccucucccagcgcacccgcgacaucuacaucucccgccgccgccggggcaccuucaccuggacccucuccgacuccgagggcaacgagacccccggcggcuacugccucacccgcuggaugcucaucgaggccgagcucaagugcuucggcaacaccgccgucgccaagugcaacgagaagcacgacgaggaguucugcgacaugcuccgccucuucgacuucaacaagcaggccauccagcgccucaagucccccgcccagauguccauccagcucaucaacaaggccgucaacgcccucaucaacgaccagcucaucaugaagaaccaccuccgcgacaugaugugcauccccuacugcaacuacuccaaguacugguaccucaaccacaccuccuccggccgcaccucccuccccaagugcuggcucgucuccaacggcuccuaccucaacgagacccacuucuccgacgacaucgagcagcaggccgacaacaugaucaccgagaugcuccagaaggaguacaucgaccgccagggcaagaccccccucggccucgucgaccucuucgucuucuccaccuccuucuaccucaucuccaucuuccuccaccucaucaagauccccacccaccgccacaucgucggcaagcccugccccaagccccaccgccucaaccacaugggcaucugcuccugcggccucuacaagcagcccggcguccccacccgcuggaagcgcuga

SEQ ID NO: 4589 - RNA, 1473 nt, Artificial Sequence
  derived and/or modified protein sequence (opt2) from LASV(KAK-428;Clade n.d. (VII))__ANH09740__GPCstabilized
augggccagaucgucaccuucuuccaggaggucccccacgucaucgaggaggucaugaacaucguccucaucgcccucucccuccucgccauccucaagggccucuacaacuucgccaccugcggcgucaucggccucaucaccuuccuccuccucugcggccgcuccugcuccgccaccuacaagggccaguacgagcuccagacccucgagcucaacauggagucccucaacaugaccaugccccucuccugcaccaagaacaacucccaccacuacauccgcgccggcaacaacaccggccucgagcucacccucaccaacaccuccaucaucucccacaaguucugcaaccucuccgacgcccacaagaagaaccucuacgaccacacccucauguccaucaucaccaccuuccaccucuccauccccaacuucaaccaguacgaggccauguccugcgacuucaacggcggcaagaucuccauccaguacaaccucucccacuccuacgccggcgacgccgcccagcacugcggcaccgucgccaacggcguccuccagaccuucaugcgcauggccuggggcggcuccuaccucgcccucgacuccggcugccgcggcugggacugcaucaucuccuccuaccaguaccucaucauccagaacaccaccugggacgaccacugccaguucucccgccccucccccaucggcuaccucggcuucgucucccagaagacccgcgacaucuacaucucccgccgccgccggggcaccuucaccuggacccucuccgacuccgagggccacgacaugcccggcggcuacugccucacccgcuggaugcucaucgaggccgaccucaagugcuucggcaacaccgccgucgccaagugcaacgagaagcacgacgaggaguucugcgacauguggcgccucuucgacuucaacaagcaggccauccagcgccucaaggcccccgcccagaugaacauccagcucaucaacaaggccgucaacgcccucaucaacgaccagcucaugaugaagaaccaccuccgcgacaucaugugcauccccuacugcaacuacuccaaguucugguaccucaacaacaccaccaccggccgcaccucccucccccgcugcuggcucaucuccaacggcuccuaccucaacgagacccacuucuccgacgacaucgagcagcaggccgacaacaugaucaccgagaugcuccagaaggaguacauggaccgccagggcaagaccccccucggccucgucgaccucuucgucuucuccaccuccuucuaccucaucaccaucuuccuccaccucgucaagauccccacccaccgccacaucgucggcaagcccugccccaagccccaccgccucaaccacaugggcaucugcuccugcggccucuacaagcagcccggcguccccguccgcuggaagcgcuga

SEQ ID NO: 4590 - RNA, 1473 nt, Artificial Sequence
  derived and/or modified protein sequence (opt2) from LASV(Acar 3080;Clade I)__AAT49014__GPCstabilized
augggccagaucaucaccuucuuccaggaggucccccacgucaucgaggaggucaugaacaucguccucaucgcccucucccuccucgccauccucaagggccucuacaacaucgccaccugcggcaucaucggccucgucgccuuccucuuccucugcggcaaguccugcucccucacccucaagggcggcuacgagcuccagacccucgagcucaacauggagacccucaacaugaccaugccccucuccugcaccaagaacuccucccaccacuacauccgcgucggcaacgagaccggccucgagcucacccucaccaacaccuccaucaucaaccacaaguucugcaaccucuccgacgcccacaagaagaaccucuacgaccacgcccucauguccaucaucuccaccuuccaccucuccauccccaacuucaaccaguacgaggccauguccugcgacuucaacggcggcaagaucuccguccaguacaaccucucccacuccuacgccggcgacgccgccgagcacugcggcaccgucgccaacggcguccuccagaccuucaugcgcauggccuggggcggccgcuacaucgcccucgacuccggcugcggcaacugggacugcaucaugaccuccuaccaguaccucaucauccagaacaccaccugggaggaccacugccaguucucccgccccucccccaucggcuaccucggccuccucucccagcgcacccgcgacaucuacaucucccgccgccgccggggcaccuucaccuggacccucuccgacuccgagggcaacgagacccccggcggcuacugccucacccgcuggaugcucaucgaggccgagcucaagugcuucggcaacaccgccgucgccaagugcaacgagaagcacgacgaggaguucugcgacaugcuccgccucuucgacuucaacaagcaggccauccgccgccucaaggcccccgcccagauguccauccagcucaucaacaaggccgucaacgcccucaucaacgaccagcucaucaugaagaaccaccuccgcgacaucaugugcauccccuacugcaacuacuccaaguacugguaccucaaccacaccuccuccggccgcaccucccuccccaagugcuggcucaucuccaacggcuccuaccucaacgagacccaguucuccgacgacaucgagcagcaggccgaccacaugaucaccgagaugcuccagaaggaguacaucgagcgccagggcaagaccccccucggccucgucgacaucuucaucuucuccaccuccuucuaccucaucuccaucuuccuccaccucaucaagauccccacccaccgccacaucgucggcaagcccugccccaagccccaccgccucaaccacaugggcgucugcuccugcggccucuacaagcaccccggcguccccaccaaguggaagcgcuga

SEQ ID NO: 4591 - RNA, 1473 nt, Artificial Sequence; identical to SEQ ID NO: 4584
  derived and/or modified protein sequence (opt2) from LASV(Pinneo-NIG-1969;Clade I)__AIT17836__GPCstabilized

SEQ ID NO: 4592 - RNA, 1473 nt, Artificial Sequence
  derived and/or modified protein sequence (opt2) from LASV(ISTH0009-NIG-2011;Clade II)__AIT17404__GPCstabilized
augggccagaucaucaccuucuuccaggaggucccccacgucaucgaggaggucaugaacaucguccucaucgcccucucccuccucgccauccucaagggcaucuacaacgucgccaccugcggccucuucggccucgucuccuuccuccuccucugcggccgcuccugcuccaccaccuacaagggcgucuacgagcuccagacccucgagcucgacauggccucccucaacaugaccaugccccucuccugcaccaagaacaacucccaccacuacaucauggucggcaacgagaccggccucgagcucacccucaccaacaccuccaucaucaaccacaaguucugcaaccucuccgacgcccacaagaagaaccucuacgaccacgcccucauguccaucaucuccaccuuccaccucuccauccccaacuucaaccaguacgaggccauguccugcgacuucaacggcggcaagaucuccguccaguacaaccucucccacgccuacgccgucgacgccgccaaccacugcggcaccaucgccaacggcguccuccagaccuucaugcgcauggccuggggcggcuccuacaucgcccucgacuccggcugcggcuccugggacugcaucaugaccuccuaccaguaccucaucauccagaacaccaccugggaggaccacugccaguucucccgccccucccccaucggcuaccucggccuccucucccagcgcacccgcgacaucuacaucucccgccgccgccggggcaccuucaccuggacccucuccgacuccgagggcaacgagacccccggcggcuacugccucacccgcuggaugcucaucgaggccgagcucaagugcuucggcaacaccgccgucgccaagugcaacgagaagcacgacgaggaguucugcgacaugcuccgccucuucgacuucaacaagcaggccauccgccgccucaagacccccgcccagauguccauccagcucaucaacaaggccgucaacgcccucaucaacgaccagcucaucaugaagaaccaccuccgcgacaucaugugcauccccuacugcaacuacuccaaguacugguaccucaaccacaccgucaccggcaagaccucccucccccgcugcuggcucgucuccaacggcuccuaccucaacgagacccacuucuccgacgacaucgagcagcaggccgacaacaugaucaccgagcuccuccagaaggaguacauggaccgccagggcaagaccccccucggccucgucgaccucuucgucuucuccaccuccuucuaccucaucuccaucuuccuccaccucaucaagauccccacccaccgccacaucaccggcaagcccugccccaagccccaccgccucaaccacaugggcaucugcuccugcggccucuacaagcaccccggcguccccgucaaguggaagcgcuga

SEQ ID NO: 4593 - RNA, 1473 nt, Artificial Sequence
  derived and/or modified protein sequence (opt2) from LASV(ISTH0012-NIG-2011;Clade II)__AIT17408__GPCstabilized
augggccagaucaucaccuucuuccaggaggucccccacgucaucgaggaggucaugaacaucguccucaucgcccucucccuccucgccauccucaagggcaucuacaacgucgccaccugcggccucuucggccucgucuccuuccuccuccucugcggccgcuccugcuccaccaccuacaagggcgucuacgagcuccagacccucgagcucgacauggccucccucaacaugaccaugccccucuccugcaccaagaacaacucccaccacuacaucauggucggcaacgagaccggccucgagcucacccucaccaacaccuccaucaucaaccacaaguucugcaaccucuccgacgcccacaagaagaaccucuacgaccacgcccucauguccaucaucuccaccuuccaccucuccauccccaacuucaaccaguacgaggccauguccugcgacuucaacggcggcaagaucuccguccaguacaaccucucccacaccuacgccgucgacgccgccaaccacugcggcaccgucgccaacggcguccuccagaccuucaugcgcauggccuggggcggcuccuacaucgcccucgacuccggcugcggcuccugggacugcaucaugaccuccuaccaguaccucaucauccagaacaccaccugggaggaccacugccaguucucccgccccucccccaucggcuaccucggccuccucucccagcgcacccgcgacaucuacaucucccgccgccgccggggcaccuucaccuggacccucuccgacuccgagggcaacgagacccccggcggcuacugccucacccgcuggaugcucaucgaggccgagcucaagugcuucggcaacaccgccgucgccaagugcaacgagaagcacgacgaggaguucugcgacaugcuccgccucuucgacuucaacaagcaggccauccgccgccucaagacccccgcccagauguccauccagcucaucaacaaggccgucaacgcccucaucaacgaccagcucaucaugaagaaccaccuccgcgacaucaugugcauccccuacugcaacuacuccaaguacugguaccucaaccacaccgucaccggcaagaccucccucccccgcugcuggcucgucuccaacggcuccuaccucaacgagacccacuucuccgacgacaucgagcagcaggccgacaacaugaucaccgagcuccuccagaaggaguacauggaccgccagggcaagaccccccucggccucgucgaccucuucgucuucuccaccuccuucuaccucaucuccaucuuccuccaccucgucaagauccccacccaccgccacgucaucggcaagcccugccccaagccccaccgccucaaccacaugggcaucugcuccugcggccucuacaagcaccccggcguccccgucaaguggaagcgcuga

SEQ ID NO: 4594 - RNA, 1473 nt, Artificial Sequence
  derived and/or modified protein sequence (opt2) from LASV(ISTH0047-NIG-2011;Clade II)__AIT17412__GPCstabilized
augggccagaucaucaccuucuuccaggaggucccccacgucaucgaggaggucaugaacaucguccucaucgcccucucccuccucgccauccucaagggcaucuacaacgucgccaccugcggccucuucggccucgucuccuuccuccuccucugcggccgcuccugcuccaccaccuacaagggcgucuacgagcuccagacccucgagcucgacauggccucccucaacaugaccaugccccucuccugcaccaagaacaacucccaccacuacaucauggucggcaacgagaccggccucgagcucacccucaccaacaccuccaucaucaaccacaaguucugcaaccucuccgacgcccacaagaagaaccucuacgaccacgcccucauguccaucaucuccaccuuccaccucuccauccccaacuucaaccaguacgaggccauguccugcgacuucaacggcggcaagaucuccguccaguacaaccucucccacgccuacgccgucgacgccgccaaccacugcggcaccaucgccaacggcguccuccagaccuucaugcgcauggccuggggcggcuccuacaucgcccucgacuccggcugcggcuccugggacugcaucaugaccuccuaccaguaccucaucauccagaacaccuccugggaggaccacugccaguucucccgccccucccccaucggcuaccucggccuccucucccagcgcacccgcgacaucuacaucucccgccgccgccggggcaccuucaccuggacccucuccgacuccgagggcaacgagacccccggcggcuacugccucacccgcuggaugcucaucgaggccgagcucaagugcuucggcaacaccgccgucgccaagugcaacgagaagcacgacgaggaguucugcgacaugcuccgccucuucgacuucaacaagcaggccauccgccgccucaagacccccgcccagauguccauccagcucaucaacaaggccgucaacgcccucaucaacgaccagcucaucaugaagaaccaccuccgcgacaucaugugcauccccuacugcaacuacuccaaguacugguaccucaaccacaccgucaccggcaagaccucccucccccgcugcuggcucgucuccaacggcuccuaccucaacgagacccacuucuccgacgacaucgagcagcaggccgacaacaugaucaccgagcuccuccagaaggaguacaucgaccgccagggcaagaccccccucggccucgucgaccucuucgucuucuccaccuccuucuaccucaucuccaucuuccuccaccucgucaagauccccacccaccgccacgucaucggcaagcccugccccaagccccaccgccucaaccacaugggcaucugcuccugcggccucuacaagcaccccggcguccccgucaaguggaagcgcuga

SEQ ID NO: 4595 - RNA, 1473 nt, Artificial Sequence
  derived and/or modified protein sequence (opt2) from LASV(ISTH0073-NIG-2011;Clade II)__AIT17416__GPCstabilized
augggccagaucaucaccuucuuccaggaggucccccacgucaucgaggaggucaugaacaucguccucaucgcccucucccuccucgccauccucaagggcaucuacaacgucgccaccugcggccucuucggccucgucuccuuccuccuccucugcggccgcuccugcuccaccaccuacaagggcgucuacgagcuccagacccucgagcucgacauggccucccucaacaugaccaugccccucuccugcaccaagaacaacucccaccacuacaucauggucggcaacgagaccggccucgagcucacccucaccaacaccuccaucaucaaccacaaguucugcaaccucuccgacgcccaccgcaagaaccucuacgaccacgcccucauguccaucaucuccaccuuccaccucuccauccccaacuucaaccaguacgaggccauguccugcgacuucaacggcggcaagaucuccguccaguacaaccucucccacgccuacgccgucgacgccgccaaccacugcggcaccaucgccaacggcguccuccagaccuucaugcgcauggccuggggcggcuccuacaucgcccucgacuccggcugcggcuccugggacugcaucaugaccuccuaccaguaccucaucauccagaacaccuccugggaggaccacugccaguucucccgccccucccccaucggcuaccucggccuccucucccagcgcacccgcgacaucuacaucucccgccgccgccggggcaccuucaccuggacccucuccgacuccgagggcaacgagacccccggcggcuacugccucacccgcuggaugcucaucgaggccgagcucaagugcuucggcaacaccgccgucgccaagugcaacgagaagcacgacgaggaguucugcgacaugcuccgccucuucgacuucaacaagcaggccauccgccgccucaagacccccgcccagauguccauccagcucaucaacaaggccgucaacgcccucaucaacgaccagcucaucaugaagaaccaccuccgcgacaucaugugcauccccuacugcaacuacuccaaguacugguaccucaaccacaccgucaccggcaagaccucccucccccgcugcuggcucgucuccaacggcuccuaccucaacgagacccacuucuccgacgacaucgagcagcaggccgacaacaugaucaccgagcuccuccagaaggaguacaucgaccgccagggcaagaccccccucggccucgucgaccucuucgucuucuccaccuccuucuaccucaucuccaucuuccuccaccucgucaagauccccacccaccgccacgucaucggcaagcccugccccaagccccaccgccucaaccacaugggcaucugcuccugcggccucuacaagcaccccggcguccccgucaaguggaagcgcuga

SEQ ID NO: 4596 - RNA, 1473 nt, Artificial Sequence
  derived and/or modified protein sequence (opt2) from LASV(ISTH0230-NIG-2011;Clade II)__AIT17420__GPCstabilized
augggccagaucaucaccuucuuccaggaggucccccacgucaucgaggaggucaugaacaucguccucaucgcccucucccuccucgccauccucaagggcaucuacaacgucgccaccugcggccucuucggccucgucuccuuccuccuccucugcggccgcuccugcuccaccaccuacaagggcgucuacgagcuccagacccucgagcucgacauggccucccucaacaugaccaugccccucuccugcaccaagaacaacucccaccacuacaucauggucggcaacgagaccggccucgagcucacccucaccaacaccuccaucaucaaccacaaguucugcaaccucuccgacgcccacaagaagaaccucuacgaccacgcccucauguccaucaucuccaccuuccaccucuccauccccaacuucaaccaguacgaggccauguccugcgacuucaacggcggcaagaucuccguccaguacaaccucucccacaccuacgccgucgacgccgccaaccacugcggcaccaucgccaacggcguccuccagaccuucaugcgcauggccuggggcggcuccuacaucgcccucgacuccggcugcggcuccugggacugcaucaugaccuccuaccaguaccucaucauccagaacaccaccugggaggaccacugccaguucucccgccccucccccaucggcuaccucggccuccucucccagcgcacccgcgacaucuacaucucccgccgccgccggggcaccuucaccuggacccucuccgacuccgagggcaacgagacccccggcggcuacugccucacccgcuggaugcucaucgaggccgagcucaagugcuucggcaacaccgccgucgccaagugcaacgagaagcacgacgaggaguucugcgacaugcuccgccucuucgacuucaacaagcaggccauccgccgccucaagacccccgcccagauguccauccagcucaucaacaaggccgucaacgcccucaucaacgaccagcucaucaugaagaaccaccuccgcgacaucaugugcauccccuacugcaacuacuccaaguacugguaccucaaccacaccgucaccggcaagaccucccucccccgcugcuggcucgucuccaacggcuccuaccucaacgagacccacuucuccgacgacaucgagcagcaggccgacaacaugaucaccgagcuccuccagaaggaguacauggaccgccagggcaagaccccccucggccucgucgaccucuucgucuucuccaccuccuucuaccucaucuccaucuuccuccaccucaucaagauccccacccaccgccacaucaccggcaagcccugccccaagccccaccgccucaaccacaugggcaucugcuccugcggccucuacaagcaccccggcguccccgucaaguggaagcgcuga

SEQ ID NO: 4597 - RNA, 1473 nt, Artificial Sequence
  derived and/or modified protein sequence (opt2) from LASV(ISTH0531-NIG-2011;Clade II)__AIT17424__GPCstabilized
augggccagaucaucaccuucuuccaggaggucccccacgucaucgaggaggucaugaacaucguccucaucgcccucucccuccucgccauccucaagggcaucuacaacgucgccaccugcggccucuucggccucgucuccuuccuccuccucugcggccgcuccugcuccaccaccuacaagggcgucuacgagcuccagacccucgagcucgacaugaccaaccucaacaugaccaugccccucuccugcaccaagaacaacucccaccacuacaucauggucggcaacgagaccggccucgagcucacccucaccaacaccuccaucaucaaccacaaguucugcaaccucuccgacgcccacaagaagaaccucuacaaccacgcccucauguccaucaucuccaccuuccaccucuccauccccaacuucaaccaguacgaggccauguccugcgacuucaacggcggcaagaucuccguccaguacaaccucucccacgccuacgccgucgacgccgccaaccacugcggcaccaucgccaacggcguccuccagaccuucaugcgcauggccuggggcggcuccuacaucgcccucgacuccggcugcggcuccugggacugcaucaugaccuccuaccaguaccucaucauccagaacaccaccugggaggaccacugccaguucucccgccccucccccaucggcuaccucggccuccucucccagcgcacccgcgacaucuacaucucccgccgccgccggggcaccuucaccuggacccucuccgacuccgagggcaacgagacccccggcggcuacugccucacccgcuggaugcucaucgaggccgagcucaagugcuucggcaacaccgccgucgccaagugcaacgagaagcacgacgaggaguucugcgacaugcuccgccucuucgacuucaacaagcaggccauccgccgccucaagacccccgcccagaccaacauccagcucaucaacaaggccgucaacgcccucaucaacgaccagcucaucaugaagaaccaccuccgcgacaucaugugcauccccuacugcaacuacuccaaguacugguaccucaaccacaccgucaccggcaagaccucccucccccgcugcuggcucgucuccaacggcuccuaccucaacgagacccacuucuccgacgacaucgagcagcaggccgacaacaugaucaccgagcuccuccagaaggaguacauggaccgccagggcaagaccccccucggccucgucgaccucuucgucuucuccaccuccuucuaccucaucuccaucuuccuccaccucgucaagauccccacccaccgccacaucaucggcaagcccugccccaagccccaccgccucaaccacaugggcaucugcuccugcggccucuacaagcaccccggcguccccgucaaguggaagcgcuga

SEQ ID NO: 4598 - RNA, 1473 nt, Artificial Sequence
  derived and/or modified protein sequence (opt2) from LASV(ISTH0595-NIG-2011;Clade II)__AIT17428__GPCstabilized
augggccagaucaucaccuucuuccaggaggucccccacgucaucgaggaggucaugaacaucguccucaucgcccucucccuccucgccauccucaagggcaucuacaacgucgccaccugcggccucuucggccucgucuccuuccuccuccucugcggccgcuccugcuccaccaccuacaagggcgucuacgagcuccagacccucgagcucgacauggccucccucaacaugaccaugccccucuccugcaccaagaacaacucccaccacuacaucauggucggcaacgagaccggccucgagcucacccucaccaacaccuccaucaucaaccacaaguucugcaaccucuccgacgcccacaagaagaaccucuacgaccacgcccucauguccaucaucuccaccuuccaccucuccauccccaacuucaaccaguacgaggccauguccugcgacuucaacggcggcaagaucuccguccaguacaaccucucccacaccuacgccgucgacgccgccaaccacugcggcaccaucgccaacggcguccuccagaccuucaugcgcauggccuggggcggcuccuacaucgcccucgacuccggcugcggcuccugggacugcaucaugaccuccuaccaguaccucaucauccagaacaccaccugggaggaccacugccaguucucccgccccucccccaucggcuaccucggccuccucucccagcgcacccgcgacaucuacaucucccgccgccgccggggcaccuucaccuggacccucuccgacuccgagggcaacgagacccccggcggcuacugccucacccgcuggaugcucaucgccgccgaccucaagugcuucggcaacaccgccgucgccaagugcaacgagaagcacgacgaggaguucugcgacaugcuccgccucuucgacuucaacaagcaggccaucgagcgccucaagacccccgcccagauguccauccagcucaucaacaaggccgucaacgcccucaucaacgaccagcucaucaugaagaaccaccuccgcgacaucaugugcauccccuacugcaacuacuccaaguacugguaccucaaccacaccgucaccggccgcaccucccucccccgcugcuggcucgucuccaacggcuccuaccucaacgagacccacuucuccgacgacaucgagcagcaggccgacaacaugaucaccgagcuccuccagaaggaguacauggaccgccagggcaagaccccccucggccucgucgaccucuucgucuucuccaccuccuucuaccucaucuccaucuuccuccaccucguccgcauccccacccaccgccacgucaucggcaagcccugccccaagccccaccgccucaaccacaugggcaucugcuccugcggccucuacaagcaccccggcguccccgucaaguggaagcgcuga

SEQ ID NO: 4599 - RNA, 1473 nt, Artificial Sequence
  derived and/or modified protein sequence (opt2) from LASV(ISTH0964-NIG-2011;Clade II)__AIT17430__GPCstabilized
augggccagaucaucaccuucuuccaggaggucccccacgucaucgaggaggucaugaacaucguccucaucgcccucucccuccucgccauccucaagggcaucuacaacgucgccaccugcggccucuucggccucgucuccuuccuccuccucugcggccgcuccugcuccaccaccuacaagggcgucuacgagcuccagacccucgagcucgacauggccucccucaacaugaccaugccccucuccugcaccaagaacaacucccaccacuacaucauggucggcaacgagaccggccucgagcucacccucaccaacaccuccaucaucaaccacaaguucugcaaccucuccgacgcccacaagaagaaccucuacgaccacgcccucauguccaucaucuccaccuuccaccucuccauccccaacuucaaccaguacgaggccauguccugcgacuucaacggcggccgcaucuccguccaguacaaccucucccacaccuacgccgucgacgccgccaagcacugcggcaccaucgccaacggcguccuccagaccuucaugcgcauggccuggggcggcuccuacaucgcccucgacuccggcugcggcuccugggacugcaucaugaccuccuaccaguaccucaucauccagaacaccaccugggaggaccacugccaguucucccgccccucccccaucggcuaccucggccuccucucccagcgcacccgcgacaucuacaucucccgccgccgccggggcaccuucaccuggacccucuccgacuccgagggcaacgagacccccggcggcuacugccucacccgcuggaugcucaucgaggccgagcucaagugcuucggcaacaccgccgucgccaagugcaacgagaagcacgacgaggaguucugcgacaugcuccgccucuucgacuucaacaagcaggccauccgccgccucaagacccccgcccagauguccauccagcucaucaacaaggccgucaacgcccucaucaacgaccagcucaucaugaagaaccaccuccgcgacaucaugugcauccccuacugcaacuacuccaaguacugguaccucaaccacaccgucaccggcaagaccucccucccccgcugcuggcucgucuccaacggcuccuaccucaacgagacccacuucuccgacgacaucgagcagcaggccgacaacaugaucaccgagcuccuccagaaggaguacaucgaccgccagggcaagaccccccucggccucgucgaccucuucgucuucuccaccuccuucuaccucaucuccaucuuccuccaccucgucaagauccccacccaccgccacgucaucggcaagcccugccccaagccccaccgccucaaccacaugggcaucugcuccugcggccucuacaagcaccccggcguccccgucaaguggaagcgcuga

SEQ ID NO: 4600 - RNA, 1473 nt, Artificial Sequence
  derived and/or modified protein sequence (opt2) from LASV(ISTH1038-NIG-2011;Clade II)__AIT17438__GPCstabilized
augggccagaucaucaccuucuuccaggaggucccccacgucaucgaggaggucaugaacaucguccucaucgcccucucccuccucgccauccucaagggcaucuacaacgucgccaccugcggccucuucggccucgucuccuuccuccuccucugcggccgcuccugcuccaccaccuacaagggcgucuacgagcuccagacccucgagcucgacauggccaaccucaacaugaccaugccccucuccugcaccaagaacaacucccaccacuacauccgcgucggcaacgagaccggccucgagcucacccucaccaacaccuccaucaucucccacaaguucugcaaccucuccgacgcccacaagaagaaccucuacgaccacgcccucauguccaucaucuccaccuuccaccucuccauccccaacuucaaccaguacgaggccauguccugcgacuucaacggcggcaagaucuccguccaguacaaccucucccacaccuacgccgucgacgccgccaaccacugcggcaccaucgccaacggcguccuccagaccuucaugcgcauggccuggggcggcuccuacaucgcccucgacuccggcugcggcuccugggacugcaucaugaccuccuaccaguaccucaucauccagaacaccaccugggaggaccacugccaguucucccgccccucccccaucggcuaccucggccuccucucccagcgcacccgcgacaucuacaucucccgccgccgccggggcaccuucaccuggacccucuccgacuccgagggcaaggagacccccggcggcuacugccucacccgcuggaugcucaucgaggccgagcucaagugcuucggcaacaccgccgucgccaagugcaacgagaagcacgacgaggaguucugcgacaugcuccgccucuucgacuucaacaagcaggccauccgccgccucaagacccccgcccagaugaacauccagcucaucaacaaggccgucaacgcccucaucaacgaccagcucaucaugaagaaccaccuccgcgacaucaugugcauccccuacugcaacuacuccaaguacugguaccucaaccacaccgucaccggcaagaccucccucccccgcugcuggcucgucuccaacggcuccuaccucaacgagacccacuucuccgacgacaucgagcagcaggccgacaacaugaucaccgagcuccuccagaaggaguacaucgaccgccagggcaagaccccccucggccucgucgaccucuucgucuucuccaccuccuucuaccucaucuccaucuuccuccaccucgucaagauccccacccaccgccacgucaucggcaagcccugccccaagccccaccgccucaaccagaugggcaucugcuccugcggccucuacaagcagcccggcguccccgucaaguggaagcgcuga

SEQ ID NO: 4601 - RNA, 1473 nt, Artificial Sequence
  derived and/or modified protein sequence (opt2) from LASV(ISTH1048-NIG-2011;Clade II)__AIT17442__GPCstabilized
augggccagaucaucaccuucuuccaggaggucccccacgucaucgaggaggucaugaacaucguccucaucgcccucucccuccucgccauccucaagggcaucuacaacgucgccaccugcggccucuucggccucgucuccuuccuccuccucugcggccgcuccugcuccaccaccuacaagggcgucuacgagcuccagacccucgagcucgacauggccucccucaacaugaccaugccccucuccugcaccaagaacaacucccaccacuacaucauggucggcaacgagaccggccucgagcucacccucaccaacaccuccaucaucaaccacaaguucugcaaccucuccgacgcccaccgcaagaaccucuacgaccacgcccucauguccaucaucuccaccuuccaccucuccauccccaacuucaaccaguacgaggccauguccugcgacuucaacggcggcaagaucuccguccaguacaaccucucccacgccuacgccgucgacgccgccaaccacugcggcaccaucgccaacggcguccuccagaccuucaugcgcauggccuggggcggcuccuacaucgcccucgacuccggcugcggcuccugggacugcaucaugaccuccuaccaguaccucaucauccagaacaccuccugggaggaccacugccaguucucccgccccucccccaucggcuaccucggccuccucucccagcgcacccgcgacaucuacaucucccgccgccgccggggcaccuucaccuggacccucuccgacuccgagggcaacgagacccccggcggcuacugccucacccgcuggaugcucaucgaggccgagcucaagugcuucggcaacaccgccgucgccaagugcaacgagaagcacgacgaggaguucugcgacaugcuccgccucuucgacuucaacaagcaggccauccgccgccucaagacccccgcccagauguccauccagcucaucaacaaggccgucaacgcccucaucaacgaccagcucaucaugaagaaccaccuccgcgacaucaugugcauccccuacugcaacuacuccaaguacugguaccucaaccacaccgucaccggcaagaccucccucccccgcugcuggcucgucuccaacggcuccuaccucaacgagacccacuucuccgacgacaucgagcagcaggccgacaacaugaucaccgagcuccuccagaaggaguacaucgaccgccagggcaagaccccccucggccucgucgaccucuucgucuucuccaccuccuucuaccucaucuccaucuuccuccaccucgucaagauccccacccaccgccacgucaucggcaagcccugccccaagccccaccgcaucaaccacaugggcaucugcuccugcggccucuacaagcaccccggcguccccgucaaguggaagcgcuga

SEQ ID NO: 4602 - RNA, 1473 nt, Artificial Sequence
  derived and/or modified protein sequence (opt2) from LASV(ISTH1058-NIG-2011;Clade II)__AIT17446__GPCstabilized
augggccagaucaucaccuucuuccaggaggucccccacgucaucgaggaggucaugaacaucguccucaucgcccucucccuccucgccauccucaagggcaucuacaacgucgccaccugcggccucuucggccucgucuccuuccuccuccucugcggccgcuccugcuccaccaccuacaagggcgucuacgagcuccagacccucgagcucgacauggccucccucaacaugaccaugccccucuccugcaccaagaacaacucccaccacuacaucauggucggcaacgagaccggccucgagcucacccucaccaacaccuccaucaucaaccacaaguucugcaaccucuccgacgcccacaagaagaaccucuacgaccacgcccucauguccaucaucuccaccuuccaccucuccauccccaacuucaaccaguacgaggccauguccugcgacuucaacggcggcaagaucuccguccaguacaaccucucccacaccuacgccgucgacgccgccucccacugcggcaccgucgccaacggcguccuccagaccuucaugcgcauggccuggggcggcuccuacaucgcccucgacuccggcugcggcuccugggacugcaucaugaccuccuaccaguaccucaucauccagaacaccaccugggaggaccacugccaguucucccgccccucccccaucggcuaccucggccuccucucccagcgcacccgcgacaucuacaucucccgccgccgccggggcaccuucaccuggacccucuccgacuccgagggcaacgagacccccggcggcuacugccucacccgcuggaugcucaucgaggccgagcucaagugcuucggcaacaccgccgucgccaagugcaacgagaagcacgacgaggaguucugcgacaugcuccgccucuucgacuucaacaagcaggccauccgccgccucaagacccccgcccagauguccauccagcucaucaacaaggccgucaacgcccucaucaacgaccagcucaucaugaagaaccaccuccgcgacaucaugugcauccccuacugcaacuacuccaaguacugguaccucaaccacaccgucaccggcaagaccucccucccccgcugcuggcucgucuccaacggcuccuaccucaacgagacccacuucuccgacgacaucgagcagcaggccgacaacaugaucaccgagcuccuccagaaggaguacauggaccgccagggcaagaccccccucggccucgucgaccucuucgucuucuccaccuccuucuaccucaucuccaucuuccuccaccucgucaagauccccacccaccgccacgucaucggcaagcccugccccaagccccaccgccucaaccacaugggcaucugcuccugcggccucuacaagcaccccggcguccccgucaaguggaagcgcuga

SEQ ID NO: 4603 - RNA, 1473 nt, Artificial Sequence
  derived and/or modified protein sequence (opt2) from LASV(ISTH1064-NIG-2011;Clade II)__AIT17450__GPCstabilized
augggccagaucaucaccuucuuccaggaggucccccacgucaucgaggaggucaugaacaucguccucaucgcccucucccuccucgccauccucaagggcaucuacaacgucgccaccugcggccucuucggccucgucuccuuccuccuccucugcggccgcuccugcuccaccaccuacaagggcgucuacgagcuccagacccucgagcucgacauggccucccucaacaugaccaugccccucuccugcaccaagaacaacucccaccacuacaucauggucggcaacgagaccggccucgagcucacccucaccaacaccuccaucaucaaccacaaguucugcaaccucuccgacgcccacaagaagaaccucuacgaccacgcccucauguccaucaucuccaccuuccaccucuccauccccaacuucaaccaguacgaggccauguccugcgacuucaacggcggcaagaucuccguccaguacaaccucucccacaccuacgccgucgacgccgccaaccacugcggcaccaucgccaacggcguccuccagaccuucaugcgcauggccuggggcggcuccuacaucgcccucgacuccggcugcggcuccugggacugcaucaugaccuccuaccaguaccucaucauccagaacaccaccugggaggaccacugccaguucucccgccccucccccaucggcuaccucggccuccucucccagcgcacccgcgacaucuacaucucccgccgccgccggggcaccuucaccuggacccucuccgacuccgagggcaacgagacccccggcggcuacugccucacccgcuggaugcucaucgaggccgagcucaagugcuucggcaacaccgccgucgccaagugcaacgagaagcacgacgaggaguucugcgacaugcuccgccucuucgacuucaacaagcaggccauccgccgccucaagacccccgcccagauguccauccagcucaucaacaaggccgucaacgcccucaucaacgaccagcucaucaugaagaaccaccuccgcgacaucaugugcauccccuacugcaacuacuccaaguacugguaccucaaccacaccgucaccggcaagaccucccucccccgcugcuggcucgucuccaacggcuccuaccucaacgagacccacuucuccgacgacaucgagcagcaggccgacaacaugaucaccgagcuccuccagaaggaguacaucgaccgccagggcaagaccccccucggccucgucgaccucuucgucuucuccaccuccuucuaccucaucuccaucuuccuccaccucgucaagauccccacccaccgccacaucaucggcaagcccugccccaagccccaccgccucaaccacaugggcaucugcuccugcggccucuacaagcaccccggcguccccgucaaguggaagcgcuga

SEQ ID NO: 4604 - RNA, 1473 nt, Artificial Sequence
  derived and/or modified protein sequence (opt2) from LASV(ISTH1069-NIG-2011;Clade II)__AIT17454__GPCstabilized
augggccagaucaucaccuucuuccaggaggucccccacgucaucgaggaggucaugaacaucguccucaucgccuucucccuccucgccauccucaagggcaucuacaacgucgccaccugcggccucuucggccucgucuccuuccuccuccucugcggccgcuccugcuccaccaccuacaagggcgucuacgagcuccagacccucgagcucgacauggccucccucaacaugaccaugccccucuccugcaccaagaacaacucccaccacuacaucauggucggcaacgagaccggccucgagcucacccucaccaacaccuccaucaucaaccacaaguucugcaaccucuccgacgcccacaagcgcaaccucuacgaccacgcccucauguccaucaucuccaccuuccaccucuccauccccaacuucaaccaguacgaggccauguccugcgacuucaacggcggcaagaucuccguccaguacaaccucucccacaccuacgccgucgacgccgccggccacugcggcaccaucgccaacggcguccuccagaccuucaugcgcauggccuggggcggcuccuacaucgcccucgacuccggcugcggcuccugggacugcaucaugaccuccuaccaguaccucaucauccagaacaccaccugggaggaccacugccaguucucccgccccucccccaucggcuaccucggccuccucucccagcgcacccgcgacaucuacaucucccgccgccgccggggcaccuucaccuggacccucuccgacuccgagggcaacgagacccccggcggcuacugccucacccgcuggaugcucaucgaggccgagcucaagugcuucggcaacaccgccgucgccaagugcaacgagaagcacgacgaggaguucugcgacaugcuccgccucuucgacuucaacaagcaggccauccgccgccucaagacccccgcccagauguccauccagcucaucaacaaggccgucaacgcccucaucaacgaccagcucaucaugaagaaccaccuccgcgacaucaugugcauccccuacugcaacuacuccaaguacugguaccucaaccacaccaucaccggcaagaccucccucccccgcugcuggcucgucuccaacggcuccuaccucaacgagacccacuucuccgacgacaucgagcagcaggccgacaacaugaucaccgagcuccuccagaaggaguacauggaccgccagggcaagaccccccucggccucgucgaccucuucgucuucuccaccuccuucuaccucaucuccaucuuccuccaccucgucaagauccccacccaccgccacaucaucggcaagcccugccccaagccccaccgccucaaccacaugggcaucugcuccugcggccucuacaagcaccccggcguccccguccgcuggaagcgcuga

SEQ ID NO: 4605 - RNA, 1473 nt, Artificial Sequence
  derived and/or modified protein sequence (opt2) from LASV(ISTH1096-NIG-2012;Clade II)__AIT17458__GPCstabilized
augggccagaucaucaccuucuuccaggaggucccccacgucaucgaggaggucaugaacaucguccucaucgcccucucccuccucgccauccucaagggcaucuacaacgucgccaccugcggccucuucggccucgucuccuuccuccuccucugcggccgcuccugcuccaccaccuacaagggcgucuacgagcuccagacccucgagcucgacauggccucccucaacaugaccaugccccucuccugcaccaagaacaacucccaccacuacaucauggucggcaacgagaccggccucgagcucacccucaccaacaccuccaucaucaaccacaaguucugcaaccucuccgacgcccacaagaagaaccucuacgaccacgcccucauguccaucaucuccaccuuccaccucuccauccccaacuucaaccaguacgaggccauguccugcgacuucaacggcggcaagaucuccguccaguacaaccucucccacaccuacgccaucgacgccgccaaccacugcggcaccaucgccaacggcguccuccagaccuucaugcgcauggccuggggcggcuccuacaucgcccucgacuccggcugcggcuccugggacugcaucaugaccaccuaccaguaccucaucauccagaacaccaccugggaggaccacugccaguucucccgccccucccccaucggcuaccucggccuccucucccagcgcacccgcgacaucuacaucucccgccgccgccggggcaccuucaccuggacccucuccgacuccgagggcaacgagacccccggcggcuacugccucacccgcuggaugcucaucgaggccgagcucaagugcuucggcaacaccgccgucgccaagugcaacgagaagcacgacgaggaguucugcgacaugcuccgccucuucgacuucaacaagcaggccauccgccgccucaagacccccgcccagauguccauccagcucaucaacaaggccgucaacgcccucaucaacgaccagcucaucaugaagaaccaccuccgcgacaucaugugcauccccuacugcaacuacuccaaguacugguaccucaaccacaccgucaccggcaagaccucccucccccgcugcuggcucgucuccaacggcuccuaccucaacgagacccacuucuccgacgacaucgagcagcaggccgacaacaugaucaccgagcuccuccagaaggaguacauggaccgccagggcaagaccccccucggccucgucgaccucuucgucuucuccaccuccuucuaccucaucuccaucuuccuccaccucgucaagauccccacccaccgccacgucaucggcaagcccugccccaagccccaccgccucaaccacaugggcaucugcuccugcggccucuacaagcaccccggcguccccgucaaguggaagcgcuga

SEQ ID NO: 4606 - RNA, 1473 nt, Artificial Sequence
  derived and/or modified protein sequence (opt2) from LASV(ISTH1107-NIG-2012;Clade II)__AIT17462__GPCstabilized
augggccagaucaucaccuucuuccaggaggucccccacgucaucgaggaggucaugaacaucguccucaucgcccucucccuccucgccauccucaagggcaucuacaacgucgccaccugcggccucuucggccucgucuccuuccuccuccucugcggccgcuccugcuccaccaccuacaagggcgucuacgagcuccagacccucgagcucgacauggccucccucaacaugaccaugccccucuccugcaccaagaacaacucccaccacuacaucauggucggcaacgagaccggccucgagcucacccucaccaacaccuccaucaucaaccacaaguucugcaaccucuccgacgcccacaagaagaaccucuacgaccacgcccucauguccaucaucuccaccuuccaccucuccauccccaacuucaaccaguacgaggccauguccugcgacuucaacggcggcaagaucuccguccaguacaaccucucccacgccuacgccgucgacgccgccaaccacugcggcaccaucgccaacggcguccuccagaccuucaugcgcauggccuggggcggcuccuacaucgcccucgacuccggcugcggcuccugggacugcaucaugaccuccuaccaguaccucaucauccagaacaccaccugggaggaccacugccaguucucccgccccucccccaucggcuaccucggccuccucucccagcgcacccgcgacaucuacaucucccgccgccgccggggcaccuucaccuggacccucuccgacuccgagggcaacgagacccccggcggcuacugccucacccgcuggaugcucaucgaggccgagcucaagugcuucggcaacaccgccgucgccaagugcaacgagaagcacgacgaggaguucugcgacaugcuccgccucuucgacuucaacaagcaggccauccgccgccucaagacccccgcccagauguccauccagcucaucaacaaggccgucaacgcccucaucaacgaccagcucaucaugaagaaccaccuccgcgacaucaugugcauccccuacugcaacuacuccaaguacugguaccucaaccacaccgucaccggcaagaccucccuccccaagugcuggcucgucuccaacggcuccuaccucaacgagacccacuucuccgacgacaucgagcagcaggccgacaacaugaucaccgagcuccuccagaaggaguacaucgaccgccagggcaagaccccccucggccucgucgaccucuucgucuucuccaccuccuucuaccucaucuccaucuuccuccaccucgucaagauccccacccaccgccacgucaucggcaagcccugccccaagccccaccgccucaaccacaugggcaucugcuccugcggccucuacaagcaccccggcguccccgucaaguggaagcgcuga

SEQ ID NO: 4607 - RNA, 1473 nt, Artificial Sequence
  derived and/or modified protein sequence (opt2) from LASV(ISTH1111-NIG-2011;Clade II)__AIT17466__GPCstabilized
augggccagaucaucaccuucuuccaggaggucccccaggucaucgaggaggucaugaacaucguccucaucgcccucucccuccucgccauccucaagggcaucuacaacgucgccaccugcggccucuucggccucgucuccuuccuccuccucugcggccgcuccugcuccaccaccuacaagggcgucuacgagcuccagacccucgagcucgacauggccucccucaacaugaccaugccccucuccugcaccaagaacaacucccaccacuacaucauggucggcaacgagaccggccucgagcucacccucaccaaccaguccaucaucaaccacaaguucugcaaccucuccgacgcccacaagaagaaccucuacgaccacgcccucauguccaucaucuccaccuuccaccucuccauccccaacuucaaccaguacgaggccauguccugcgacuucaacggcggcaagaucuccguccaguacaaccucucccacaccuucgccgucgacgccgccaaccacugcggcaccaucgccaacggcguccuccagaccuucaugcgcauggccuggggcggcuccuacaucgcccucgacuccggcugcggcuccugggacugcaucaugaccuccuaccaguaccucaucauccagaacaccaccugggaggaccacugccaguucucccgccccucccccaucggcuaccucggccuccucucccagcgcacccgcgacaucuacaucucccgccgccgccggggcaccuucaccuggacccucuccgacuccgagggcaacgagacccccggcggcuacugccucacccgcuggaugcucaucgaggccgagcucaagugcuucggcaacaccgccgucgccaagugcaacgagaagcacgacgaggaguucugcgacaugcuccgccucuucgacuucaacaagcaggccauccgccgccucaagacccccgcccagauguccauccagcucaucaacaaggccgucaacgcccucaucaacgaccagcucaucaugaagaaccaccuccgcgacaucaugugcauccccuacugcaacuacuccaaguacugguaccucaaccacaccaucaccggcaagaccucccucccccgcugcuggcucgucuccaacggcuccuaccucaacgagacccacuucuccgacgacaucgagcagcaggccgacaacaugaucaccgagcuccuccagaaggaguacauggaccgccagggcaagaccccccucggccucgucgaccucuucgucuucuccaccuccuucuaccucaucuccaucuuccuccaccucgucaagauccccacccaccgccacgucaucggcaagcccugccccaagccccaccgccucaaccacaugggcaucugcuccugcggccucuacaagcaccccggcguccccgucaaguggaagcgcuga

SEQ ID NO: 4608 - RNA, 1473 nt, Artificial Sequence
  derived and/or modified protein sequence (opt2) from LASV(ISTH1121-NIG-2012;Clade II)__AIT17470__GPCstabilized
augggccagaucaucaccuucuuccaggaggucccccacgucaucgaggaggucaugaacaucguccucaucgcccucucccuccucgccauccucaagggcaucuacaacgucgccaccugcggccucuucggccucgucuccuuccuccuccucugcggccgcuccugcuccaccaccuacaagggcgucuacgagcuccagacccucgagcucgacauggccucccucaacaugaccaugccccucuccugcaccaagaacaacucccaccacuacaucauggucggcaacgagaccggccucgagcucacccucaccaacaccuccaucaucaaccacaaguucugcaaccucuccgacgcccaccgcaagaaccucuacgaccacgcccucauguccaucaucuccaccuuccaccucuccauccccaacuucaaccaguacgaggccauguccugcgacuucaacggcggcaagaucuccguccaguacaaccucucccacaccuacgccgucgacgccgccaaccacugcggcaccaucgccaacggcguccuccagaccuucaugcgcauggccuggggcggcuccuacaucgcccucgacuccggcugcggcuccugggacugcaucaugaccuccuaccaguaccucaucauccagaacaccaccugggaggaccacugccaguucucccgccccucccccaucggcuaccucggccuccucucccagcgcacccgcgacaucuacaucucccgccgccgccggggcaccuucaccuggacccucuccgacuccgagggcaacgagacccccggcggcuacugccucacccgcuggaugcucaucgaggccgagcucaagugcuucggcaacaccgccgucgccaagugcaacgagaagcacgacgaggaguucugcgacaugcuccgccucuucgacuucaacaagcaggccauccgccgccucaagacccccgcccagauguccauccagcucaucaacaaggccgucaacgcccucaucaacgaccagcucaucaugaagaaccaccuccgcgacaucaugugcauccccuacugcaacuacuccaaguacugguaccucaaccacaccgucaccggcaagaccucccucccccgcugcuggcucgucuccaacggcuccuaccucaacgagacccacuucuccgacgacaucgagcagcaggccgacaacaugaucaccgagcuccuccagaaggaguacaucgaccgccagggcaagaccccccucggccucgucgaccucuucgucuucuccaccuccuucuaccucaucuccaucuuccuccaccucgucaagauccccacccaccgccacgucaucggcaagcccugccccaagccccaccgccucaaccacaugggcaucugcuccugcggccucuacaagcaccccggcguccccgucaaguggaagcgcuga

SEQ ID NO: 4609 - RNA, 1473 nt, Artificial Sequence
  derived and/or modified protein sequence (opt2) from LASV(ISTH1129-NIG-2012;Clade II)__AIT17474__GPCstabilized
augggccagaucaucaccuucuuccaggaggucccccacgucaucgaggaggucaugaacaucguccucaucgcccucucccuccucgccauccucaagggcaucuacaacgucgccaccugcggccucuucggccucgucuccuuccuccuccucugcggccgcuccugcuccaccaccuacaagggcgucuacgagcuccagacccucgagcucgacauggccucccucaacaugaccaugccccucuccugcaccaagaacaacucccaccacuacaucauggucggcaacgagaccggccucgagcucacccucaccaacaccuccaucaucaaccacaaguucugcaaccucuccgacgcccacaagaagaaccucuacgaccacgcccucauguccaucaucuccaccuuccaccucuccauccccaacuucaaccaguacgaggccauguccugcgacuucaacggcggcaagaucuccauccaguacaaccucucccacaccuacgccgucgacgccgccaaccacugcggcaccaucgccaacggcguccuccagaccuucaugcgcauggccuggggcggcuccuacaucgcccucgacuccggcugcggcuccugggacugcaucaugaccuccuaccaguaccucaucauccagaacaccaccugggaggaccacugccaguucucccgccccucccccaucggcuaccucggccuccucucccagcgcacccgcgacaucuacaucucccgccgccgccggggcaccuucaccuggacccucuccgacuccgagggcaacgagacccccggcggcuacugccucacccgcuggaugcucaucgaggccgagcucaagugcuucggcaacaccgccgucgccaagugcaacgagaagcacgacgaggaguucugcgacaugcuccgccucuucgacuucaacaagcaggccauccgccgccucaagacccccgcccagauguccauccagcucaucaacaaggccgucaacgcccucaucaacgaccagcucaucaugaagaaccaccuccgcgacaucaugugcauccccuacugcaacuacuccaaguacugguaccucaaccacaccaucaccggcaagaccucccucccccgcugcuggcucgucuccaacggcuccuaccucaacgagacccacuucuccgacgacaucgagcagcaggccgacaacaugaucaccgagcuccuccagaaggaguacaucgaccgccagggcaagaccccccucggccucgucgaccucuucgucuucuccaccuccuucuaccucaucuccaucuuccuccaccucgucaagauccccacccaccgccacaucaccggcaagcccugccccaagccccaccgccucaaccacaugggcaucugcuccugcggccucuacaagcaccccggcguccccguccgcuggaagcgcuga

SEQ ID NO: 4610 - RNA, 1473 nt, Artificial Sequence
  derived and/or modified protein sequence (opt2) from LASV(ISTH1137-NIG-2011;Clade II)__AIT17478__GPCstabilized
augggccagaucaucaccuucuuccaggaggucccccacgucaucgaggaggucaugaacaucguccucaucgcccucucccuccucgccauccucaagggcaucuacaacgucgccaccugcggccucuucggccucgucuccuuccuccuccucugcggccgcuccugcuccaccaccuacaagggcgucuacgagcuccagacccucgagcucgacauggccucccucaacaugaccaugccccucuccugcaccaagaacaacucccaccacuacaucauggucggcaacgagaccggccucgagcucacccucaccaacaccuccaucaucaaccacaaguucugcaaccucuccgacgcccacaagaagaaccucuacgaccacgcccucauguccaucaucuccaccuuccaccucuccauccccaacuucaaccaguacgaggccauguccugcgacuucaacggcggcaagaucuccguccaguacaaccucucccacaccuacgccgucgacgccgccgaccacugcggcaccaucgccaacggcguccuccagaccuucaugcgcauggccuggggcggcuccuacaucgcccucgacuccggcugcggcuccugggacugcaucaugaccuccuaccaguaccucaucauccagaacaccaccugggaggaccacugccaguucucccgccccucccccaucggcuaccucggccuccucucccagcgcacccgcgacaucuacaucucccgccgccgccggggcaccuucaccuggacccucuccgacuccgagggcaacgagacccccggcggcuacugccucacccgcuggaugcucaucgaggccgagcucaagugcuucggcaacaccgccgucgccaagugcaacgagaagcacgacgaggaguucugcgacaugcuccgccucuucgacuucaacaagcaggccaucucccgccucaagacccccgcccagauguccauccagcucaucaacaaggccgucaacgcccucaucaacgaccagcucaucaugaagaaccaccuccgcgacaucaugugcauccccuacugcaacuacuccaaguacugguaccucaaccacaccgucaccggcaagaccucccucccccgcugcuggcucgucuccaacggcuccuaccucaacgagacccacuucuccgacgacaucgagcagcaggccgacaacaugaucaccgagaugcuccagaaggaguacaucgaccgccagggcaagaccccccucggccucgucgaccucuucgucuucuccaccuccuucuaccucaucuccaucuuccuccaccucgucaagauccccacccaccgccacgucaucggcaagcccugccccaagccccaccgccucaaccacaugggcaucugcuccugcggccucuacaagcaccccggcguccccgucaaguggaagcgcuga

SEQ ID NO: 4611 - RNA, 1473 nt, Artificial Sequence
  derived and/or modified protein sequence (opt2) from LASV(ISTH2010-NIG-2012;Clade II)__AIT17482__GPCstabilized
augggccagaucaucaccuucuuccaggaggucccccacgucaucgaggaggucaugaacaucguccucaucgcccucucccuccucgccauccucaagggcaucuacaacgucgccaccugcggccucuucggccucgucuccuuccuccuccucugcggccgcuccugcuccaccaccuacaagggcgucuacgagcuccagacccucgagcucgacauggccucccucaacaugaccaugccccucuccugcaccaagaacaacucccaccacuacaucauggucggcaacgagaccggccucgagcucacccucaccaacaccuccaucaucaaccacaaguucugcaaccucuccgacgcccacaagaagaaccucuacgaccacgcccucauguccaucaucuccaccuuccaccucuccauccccaacuucaaccaguacgaggccauguccugcgacuucaacggcggcaagaucuccguccaguacaaccucucccacgccuacgccgucgacgccgccaaccacugcggcaccaucgccaacggcguccuccagaccuucaugcgcauggccuggggcggcuccuacaucgcccucgacuccggcugcggcuccugggacugcaucaugaccuccuaccaguaccucaucauccagaacaucaccugggaggaccacugccaguucucccgccccucccccaucggcuaccucggccuccucucccagcgcacccgcgacaucuacaucucccgccgccgccggggcaccuucaccuggacccucuccgacuccgagggcaacgagacccccggcggcuacugccucacccgcuggaugcucaucgaggccgagcucaagugcuucggcaacaccgccgucgccaagugcaacgagaagcacgacgaggaguucugcgacaugcuccgccucuucgacuucaacaagcaggccauccgccgccucaagacccccgcccagauguccauccagcucaucaacaaggccgucaacgcccucaucaacgaccagcucaucaugaagaaccaccuccgcgacaucaugugcauccccuacugcaacuacuccaaguacugguaccucaaccacaccgucaccggcaagaccucccucccccgcugcuggcucgucuccaacggcuccuaccucaacgagacccacuucuccgacgacaucgagcagcaggccgacaacaugaucaccgagcuccuccagaaggaguacaucgaccgccagggcaagaccccccucggccucgucgaccucuucgucuucuccaccuccuucuaccucaucuccaucuuccuccaccucgucaagauccccacccaccgccacgucgucggcaagcccugccccaagccccaccgccucaaccacaugggcaucugcuccugcggccucuacaagcaccccggcguccccgucaaguggaagcgcuga

SEQ ID NO: 4612 - RNA, 1473 nt, Artificial Sequence
  derived and/or modified protein sequence (opt2) from LASV(ISTH2016-NIG-2012;Clade II)__AIT17486__GPCstabilized
augggccagaucaucaccuucuuccaggaggucccccacgucaucgaggaggucaugaacaucguccucaucgcccucucccuccucgccauccucaagggcaucuacaacgucgccaccugcggccucuucggccucgucuccuuccuccuccucugcggccgcuccugcuccaccaccuacaagggcgucuacgagcuccagacccucgagcucgacauggccucccucaacaugaccaugccccucuccugcaccaagaacaacucccaccacuacaucauggucggcaacgagaccggccucgagcucacccucaccaacaccuccaucaucaaccacaaguucugcaaccucuccgacgcccacaagaagaaccucuacgaccacgcccucauguccaucaucuccaccuuccaccucuccauccccaacuucaaccaguacgaggccauguccugcgacuucaacggcggcaagaucuccguccaguacaaccucucccacaccuacgccgucgacgccgccaaccacugcggcaccaucgccaacggcguccuccagaccuucaugcgcauggccuggggcggcuccuacaucgcccucgacuccggcugcggcuccugggacugcaucaugaccuccuaccaguaccucaucauccagaacaccaccugggaggaccacugccaguucucccgccccucccccgucggcuaccucggccuccucucccagcgcacccgcgacaucuacaucucccgccgccgccggggcaccuucaccuggacccucuccgacuccgagggcaacgagacccccggcggcuacugccucacccgcuggaugcucaucgaggccgagcucaagugcuucggcaacaccgccgucgccaagugcaacgagaagcacgacgaggaguucugcgacaugcuccgccucuucgacuucaacaagcaggccauccgccgccucaagacccccgcccagauguccauccagcucaucaacaaggccgucaacgcccucaucaacgaccagcucaucaugaagaaccaccuccgcgacaucaugugcauccccuacugcaacuacuccaaguacugguaccucaaccacaccgucaccggcaagaccucccucccccgcugcuggcucgucuccaacggcuccuaccucaacgagacccacuucuccgacgacaucgagcagcaggccgacaacaugaucaccgagcuccuccagaaggaguacaucgaccgccagggcaagaccccccucggccucgucgaccucuucgucuucuccaccuccuucuaccucaucuccaucuuccuccaccucgucaagauccccacccaccgccacgucaucggcaagcccugccccaagccccaccgccucaaccacaugggcaucugcuccugcggccucuacaagcaccccggcguccccgucaaguggaagcgcuga

SEQ ID NO: 4613 - RNA, 1473 nt, Artificial Sequence
  derived and/or modified protein sequence (opt2) from LASV(ISTH2020-NIG-2012;Clade II)__AIT17490__GPCstabilized
augggccagaucaucaccuucuuccaggaggucccccacgucaucgaggaggucaugaacaucguccucaucacccucucccuccucgccauccucaagggcaucuacaacgucgccaccugcggccucuucggccucgucuccuuccuccuccucugcggccgcuccugcuccaccaccuacaagggcgucuacgagcuccagacccucgagcucgacauggccaaccucaacaugaccaugccccucuccugcaccaagaacaacucccaccacuacaucauggucggcaacgagaccggccucgagcucacccucaccaacaccuccaucaucaaccacaaguucugcaaccucuccgacgcccacaagaagaaccucuacgaccacgcccucauguccaucaucuccaccuuccaccucuccauccccaacuucaaccaguacgaggccauguccugcgacuucaacggcggcaagaucuccguccaguacaaccucucccacaccuucgccgucgacgccgccaaccacugcggcaccaucgccaacggcguccuccagaccuucaugcgcauggccuggggcggcuccuacaucgcccucgacuccggcugcggcuccugggacugcaucaugaccuccuaccaguaccucaucauccagaacaccaccugggaggaccacugccaguucucccgccccucccccaucggcuaccucggccuccucucccagcgcacccgcgacaucuacaucucccgccgccgccggggcaccuucaccuggacccucuccgacuccgagggcaacgagacccccggcggcuacugccucacccgcuggaugcucaucgaggccgagcucaagugcuucggcaacaccgccgucgccaagugcaacgagaagcacgacgaggaguucugcgacaugcuccgccucuucgacuucaacaagcaggccauccgccgccucaagacccccgcccagauguccauccagcucaucaacaaggccgucaacgcccucaucaacgaccagcucaucaugaagaaccaccuccgcgacaucaugugcauccccuacugcaacuacuccaaguacugguaccucaaccacaccgucaccggcaagaccucccucccccgcugcuggcucgucuccaacggcuccuaccucaacgagacccacuucuccgacgacaucgagcagcaggccgacaacaugaucaccgagcuccuccagaaggaguacauggaccgccagggcaagaccccccucggccucgucgaccucuucgucuucuccaccuccuucuaccucaucuccaucuuccuccaccucgucaagauccccacccaccgccacaucaucggcaagcccugccccaagccccaccgccucaaccacaugggcaucugcuccugcggccucuacaagcaccccggcguccccgucaaguggaagcgcuga

SEQ ID NO: 4614 - RNA, 1473 nt, Artificial Sequence
  derived and/or modified protein sequence (opt2) from LASV(ISTH2025-NIG-2012;Clade II)__AIT17494__GPCstabilized
augggccagaucaucaccuucuuccaggaggucccccacgucaucgaggaggucaugaacaucguccucaucgcccucucccuccucgccauccucaagggcgucuacaacgucgccaccugcggccucuucggccucgucuccuuccuccuccucugcggccgcuccugcuccaccaucuacaagggcgucuacgagcuccagacccucgagcucgacauggccucccucaacaugaccaugccccucuccugcaccaagaacaacucccaccacuacaucauggucggcaacgagaccggccucgagcucacccucaccaacaccuccaucaucaaccacaaguucugcaaccucuccgacgcccacaagaagaaccucuacgaccacgcccucauguccaucaucuccaccuuccaccucuccauccccaacuucaaccaguacgaggccauguccugcgacuucaacggcggcaagaucuccguccaguacaaccucucccacaccuacgccgucgacgccgccaaccacugcggcaccaucgccaacggcguccuccagaccuucaugcgcauggccuggggcggcuccuacaucgcccucgacuccggcugcggcuccugggacugcaucaugaccuccuaccaguaccucaucauccagaacaccuccugggaggaccacugccaguucucccgccccucccccaucggcuaccucggccuccucucccagcgcacccgcgacaucuacaucucccgccgccgccggggcaccuucaccuggacccucuccgacuccgagggcaacgagacccccggcggcuacugccucacccgcuggaugcucaucgaggccgagcucaagugcuucggcaacaccgccgucgccaagugcaacgagaagcacgacgaggaguucugcgacaugcuccgccucuucgacuucaacaagcaggccauccgccgccucaagacccccgcccagauguccauccagcucaucaacaaggccgucaacgcccucaucaacgaccagcucaucaugaagaaccaccuccgcgacaucaugugcauccccuacugcaacuacuccaaguacugguaccucaaccacaccgucaccggcaagaccucccucccccgcugcuggcucgucuccaacggcuccuaccucaacgagacccacuucuccgacgacaucgagcagcaggccgacaacaugaucaccgagcuccuccagaaggaguacaucgaccgccagggcaagaccccccucggccucgucgaccucuucgucuucuccaccuccuucuaccucaucuccaucuuccuccaccucgucaagauccccacccaccgccacgucaucggcaagcccugccccaagccccaccgccucaaccacaugggcaucugcuccugcggccucuacaagcaccccggcguccccgucaaguggaagcgcuga

SEQ ID NO: 4615 - RNA, 1473 nt, Artificial Sequence
  derived and/or modified protein sequence (opt2) from LASV(ISTH2031-NIG-2012;Clade II)__AIT17498__GPCstabilized
augggccagaucaucaccuucuuccaggaggucccccacgucaucgaggaggucaugaacaucguccucaucgcccucucccuccucgccauccucaagggcaucuacaacgucgccaccugcggccucuucggccucgucuccuuccuccuccucugcggccgcuccugcuccaccaccuacaagggcgucuacgagcuccagacccucgagcucgacauggccucccucaacaugaccaugccccucuccugcaccaagaacaacucccaccacuacaucauggucggcaacgagaccggccucgagcucacccucaccaacaccuccaucaucaaccacaaguucugcaaccucuccgacgcccacaagaagaaccucuacgaccacgcccucauguccaucaucuccaccuuccaccucuccauccccaacuucaaccaguacgaggccauguccugcgacuucaacggcggcaagaucuccguccaguacaaccucucccacaccuacgccgucgacgccgccaaccacugcggcaccaucgccaacggcguccuccagaccuucaugcgcauggccuggggcggcuccuacaucgcccucgacuccggcugcggcaacugggacugcaucaugaccuccuaccaguaccucaucauccagaacaccaccugggaggaccacugccaguucucccgccccucccccaucggcuaccucggccuccucucccagcgcacccgcgacaucuacaucucccgccgccgccggggcaccuucaccuggacccucuccgacuccgagggcaacgagacccccggcggcuacugccucacccgcuggaugcucaucgagaccgagcucaagugcuucggcaacaccgccgucgccaagugcaacgagaagcacgacgaggaguucugcgacaugcuccgccucuucgacuucaacaagcaggccaucucccgccuccgcucccccgcccagauguccauccagcucaucaacaaggccgucaacgcccucaucaacgaccagcucaucaugaagaaccaccuccgcgacaucaugugcauccccuacugcaacuacuccaaguacugguaccucaaccacaccgucaccggcaagaccucccuccccaagugcuggcucgucuccaacggcuccuaccucaacgagacccacuucuccgacgacaucgagcagcaggccgacaacaugaucaccgagaugcuccagaaggaguacaucgaccgccagggcaagaccccccucggccucgucgaccucuucgucuucuccaccuccuucuaccucaucuccaucuuccuccaccucgucaagauccccacccaccgccacaucaccggcaagcccugccccaagccccaccgccucaaccacaugggcaucugcuccugcggccucuacaagcaccccggcguccccgucaaguggaagcgcuga

SEQ ID NO: 4616 - RNA, 1473 nt, Artificial Sequence
  derived and/or modified protein sequence (opt2) from LASV(ISTH2037-NIG-2012;Clade II)__AIT17502__GPCstabilized
augggccagaucaucaccuucuuccaggagaucccccacgucaucgaggaggucaugaacaucguccucaucacccucucccuccucgccauccucaagggcaucuacaacgucgccaccugcggccucuucggccucgucuccuuccuccuccucugcggcaaguccugcuccaccaccuacaagggcgucuacgagcuccagacccucgagcucgacauggccucccucaacaugaccaugccccucuccugcaccaagaacaacucccaccacuacaucauggucggcaacgagaccggccucgagcucacccucaccaacaccuccaucaucaaccacaaguucugcaaccucuccgacgcccaccgcaagaaccucuacgaccacacccucauguccaucaucuccaccuuccaccucuccauccccaacuucaaccaguacgaggccauguccugcgacuucaacggcggcaagaucuccguccaguacaaccucucccacgccuacgccaucgacgccgccacccacugcggcaccaucgccaacggcguccuccagaccuucaugcgcauggccuggggcggcuccuacaucgcccucgacuccggcugcggcggcugggacugcaucaugaccuccuaccaguaccucaucauccagaacaccaccugggaggaccacugccaguucucccgccccucccccaucggcuaccucggccuccucucccagcgcacccgcgacaucuacaucucccgccgccgccggggcaccuucaccuggacccucuccgacuccgagggcaacgagacccccggcggcuacugccucacccgcuggaugcucaucgaggccgagcucaagugcuucggcaacaccgccgucgccaagugcaacgagaagcacgacgaggaguucugcgacaugcuccgccucuucgacuucaacaagcaggccauccgccgccucaagacccccgcccagauguccauccagcucaucaacaaggccgucaacgcccucaucaacgaccagcucaucaugcgcaaccaccuccgcgacaucaugugcauccccuacugcaacuacuccaaguacugguaccucaaccacaccgucaccggcaagaccucccuccccaagugcuggcucgucuccaacggcuccuaccucaacgagacccacuucuccgacgacaucgagcagcaggccgacaacaugaucaccgagcuccuccagaaggaguacauggaccgccagggcaagaccccccucggccucgucgaccucuucgucuucuccaccuccuucuaccucaucuccaucuuccuccaccucgucaagauccccacccaccgccacgucaucggcaagcccugccccaagccccaccgccucaaccacaugggcgucugcuccugcggccucuacaagcaccccggcguccccgucaaguggaagcgcuga

SEQ ID NO: 4617 - RNA, 1473 nt, Artificial Sequence
  derived and/or modified protein sequence (opt2) from LASV(ISTH2042-NIG-2012;Clade II)__AIT17506__GPCstabilized
augggccagaucaucaccuucuuccaggaggucccccacgucaucgaggaggucaugaacaucguccucaucgcccucucccuccucgccauccucaagggcaucuacaacgucgccaccugcggccucuucggccucgucuccuuccuccuccucugcggccgcuccugcuccaccaccuacaagggcgucuacgagcuccagacccucgagcucgacauggccucccucaacaugaccaugccccucuccugcaccaagaacaacucccaccacuacaucauggucggcaacgagaccggccucgagcucacccucaccaacaccuccaucaucaaccacaaguucugcaaccucuccgacgcccacaagaagaaccucuacgaccacgcccucauguccaucaucuccaccuuccaccucuccauccccaacuucaaccaguacgaggccauguccugcgacuucaacggcggcaagaucuccguccaguacaaccucucccacgccuacgccgucgacgccgccgagcacugcggcaccaucgccaacggcguccuccagaccuucaugcgcauggccuggggcggcuccuacaucgcccucgacuccggcugcggcuccugggacugcgucaugaccuccuaccaguaccucaucauccagaacaccaccugggaggaccacugccaguucucccgccccucccccaucggcuaccucggccuccucucccagcgcacccgcgacaucuacaucucccgccgccgccggggcaccuucaccuggacccucuccgacuccgagggcaacgagacccccggcggcuacugccucacccgcuggaugcucaucgaggccgagcucaagugcuucggcaacaccgccgucgccaagugcaacgagaagcacgacgaggaguucugcgacaugcuccgccucuucgacuucaacaagcaggccaucgagcgccucaagacccccgcccagauguccauccagcucaucaacaaggccgucaacgcccucaucaacgaccagcucaucaugaagaaccaccuccgcgacaucaugugcauccccuacugcaacuacuccaaguacugguaccucaaccacaccgucaccggcaagaccucccucccccgcugcuggcucgucuccaacggcuccuaccucaacgagacccacuucuccgacgacaucgagcagcaggccgacaacaugaucaccgagaugcuccagaaggaguacaucgaccgccagggcaagaccccccucggccucgucgaccucuucgucuucuccaccuccuucuaccucaucuccaucuuccuccaccucgucaagauccccacccaccgccacgucaucggcaagcccugccccaagccccaccgccucaaccacaugggcaucugcuccugcggccucuacaagcaccccggcguccccgucaaguggaagcgcuga

SEQ ID NO: 4618 - RNA, 1473 nt, Artificial Sequence
  derived and/or modified protein sequence (opt2) from LASV(ISTH2046-NIG-2012;Clade II)__AIT17510__GPCstabilized
augggccagaucaucaccuucuuccaggaggucccccacgucaucgaggaggucaugaacaucguccucaucgcccucucccuccucgccauccucaagggcaucuacaacgucgccaccugcggccucuucggccucgucuccuuccuccuccucugcggccgcuccugcuccaccaccuacaagggcgucuacgagcuccagacccucgagcucgacauggccucccucaacaugaccaugccccucuccugcaccaagaacaacucccaccacuacaucauggucggcaacgagaccggccucgagcucacccucaccaacaccuccaucaucaaccacaaguucugcaaccucuccgacgcccacaagaagaaccucuacgaccacgcccucauguccaucaucuccaccuuccaccucuccauccccaacuucaaccaguacgaggccauguccugcgacuucaacggcggcaagaucuccguccaguacaaccucucccacaccuacgccgucgacgccgccaaccacugcggcaccaucgccaacggcguccuccagaccuucaugcgcauggccuggggcggcuccuacaucgcccucgacuccggcugcggcuccugggacugcaucaugaccuccuaccaguaccucaucauccagaacaccaccugggaggaccacugccaguucucccgccccucccccaucggcuaccucggccuccucucccagcgcaccaaggacaucuacaucucccgccgccgccggggcaccuucaccuggacccucuccgacuccgagggcaacgagacccccggcggcuacugccucacccgcuggaugcucaucgaggccgagcucaagugcuucggcaacaccgccgucgccaagugcaacgagaagcacgacgaggaguucugcgacaugcuccgccucuucgacuucaacaagcaggccauccgccgccucaagacccccgcccagauguccauccagcucaucaacaaggccgucaacgcccucaucaacgaccagcucaucaugaagaaccaccuccgcgacaucaugugcauccccuacugcaacuacuccaaguacugguaccucaaccacaccgucaccggcaagaccucccucccccgcugcuggcucgucuccaacggcuccuaccucaacgagacccacuucuccgacgacaucgagcagcaggccgacaacaugaucaccgagcuccuccagaaggaguacaucgaccgccagggcaagaccccccucggccucgucgaccucuucgucuucuccaccuccuucuaccucaucuccaucuuccuccaccucgucaagauccccacccaccgccacgucaucggcaagcccugccccaagccccaccgccucaaccacaugggcaucugcuccugcggccucuacaagcaccccggcguccccgucaaguggaagcgcuga

SEQ ID NO: 4619 - RNA, 1473 nt, Artificial Sequence
  derived and/or modified protein sequence (opt2) from LASV(ISTH2050-NIG-2012;Clade II)__AIT17514__GPCstabilized
augggccagaucaucaccuucuuccaggaggucccccacgucaucgaggaggucaugaacaucguccucaucgcccucucccuccucgccguccucaagggcaucuacaacgucgccaccugcggccucuucggccucgucuccuuccuccuccucugcggccgcuccugcuccaccaccuacaagggcgucuacgagcuccagacccucgagcucgacauggccucccucaacaugaccaugccccucuccugcaccaagaacaacucccaccacuacaucauggucggcaacgagaccggccucgagcucacccucaccaacaccuccaucaucaaccacaaguucugcaaccucuccgacgcccacaagaagaaccucuacgaccacgcccucauguccaucaucuccaccuuccaccucuccauccccaacuucaaccaguacgaggccauguccugcgacuucaacggcggcaagaucuccguccaguacaaccucucccacaccuacgccgucgacgccgccaaccacugcggcaccaucgccaacggcguccuccagaccuucaugcgcauggccuggggcggcuccuacaucgcccucgacuccggcugcggcuccugggacugcaucaugaccuccuaccaguaccucaucauccagaacaccaccugggaggaccacugccaguucucccgccccucccccaucggcuaccucggccuccucucccagcgcacccgcgacaucuacaucucccgccgccgccggggcaccuucaccuggacccucuccgacuccgagggcaacgagacccccggcggcuacugccucacccgcuggaugcucaucgaggccgagcucaagugcuucggcaacaccgccgucgccaagugcaacgagaagcacgacgaggaguucugcgacaugcuccgccucuucgacuucaacaagcaggccauccgccgccucaagacccccgcccagauguccauccagcucaucaacaaggccgucaacgcccucaucaacgaccagcucaucaugaagaaccaccuccgcgacaucaugugcauccccuacugcaacuacuccaaguacugguaccucaaccacaccgucaccggcaagaccucccucccccgcugcuggcucgucuccaacggcuccuaccucaacgagacccacuucuccgacgacaucgagcagcaggccgacaacaugaucaccgagcuccuccagaaggaguacaucgaccgccagggcaagaccccccucggccucgucgaccucuucgucuucuccaccuccuucuaccucaucuccaucuuccuccaccucgucaagauccccacccaccgccacgucaucggcaagcccugccccaagccccaccgccucaaccacaugggcaucugcuccugcggccucuaccgccaccccggcguccccgucaaguggaagcgcuga

SEQ ID NO: 4620 - RNA, 1473 nt, Artificial Sequence
  derived and/or modified protein sequence (opt2) from LASV(ISTH2057-NIG-2012;Clade II)__AIT17518__GPCstabilized
augggccagaucaucaccuucuuccaggaggucccccacgucaucgaggaggucaugaacaucguccucaucgcccucucccuccucgccauccucaagggcaucuacaacgucgccaccugcggccucuucggccucgucuccuuccuccuccucugcggccgcuccugcuccaccaccuacaagggcgucuacgagcuccagacccucgagcucgacauggccucccucaacaugaccaugccccucuccugcaccaagaacaacucccaccacuacaucauggucggcaacgagaccggccucgagcucacccucaccaacaccuccaucaucaaccacaaguucugcaaccucuccgacgcccacaagaagaaccucuacgaccacgcccucauguccaucaucuccaccuuccaccucuccauccccaacuucaaccaguacgaggccauguccugcgacuucaacggcggcaagaucuccguccaguacaaccucucccacgccuacgccgucgacgccgccaaccacugcggcaccaucgccaacggcguccuccagaccuucaugcgcauggccuggggcggcuccuacaucgcccucgacuccggcugcggcuccugggacugcaucaugaccuccuaccaguaccucaucauccagaacaccaccugggaggaccacugccaguucucccgccccucccccaucggcuaccucggccuccucucccagcgcacccgcgacaucuacaucucccgccgccgccggggcaccuucaccuggacccucuccgacuccgagggcaacgagacccccggcggcuacugccucacccgcuggaugcucaucgaggccgagcucaagugcuucggcaacaccgccgucgccaagugcaacgagaagcacgacgaggaguucugcgacaugcuccgccucuucgacuucaacaagcaggccauccgccgccucaagacccccgcccagauguccauccagcucaucaacaaggccgucaacgcccucaucaacgaccagcucaucaugaagaaccaccuccgcgacaucaugugcauccccuacugcaacuacuccaaguacugguaccucaaccacaccgucaccggcaagaccucccucccccgcugcuggcucgucuccaacggcuccuaccucaacgagacccacuucuccgacgacaucgagcagcaggccgacaacaugaucaccgagcuccuccagaaggaguacauggaccgccagggcaagaccccccucggccucgucgaccucuucgucuucuccaccuccuucuaccucaucuccaucuuccuccaccucgucaagauccccacccaccgccacgucaucggcaagcccugccccaagccccaccgccucaaccacaugggcaucugcuccugcggccucuacaagcaccccggcguccccgucaaguggaagcgcuga

SEQ ID NO: 4621 - RNA, 1473 nt, Artificial Sequence
  derived and/or modified protein sequence (opt2) from LASV(ISTH2064-NIG-2012;Clade II)__AIT17524__GPCstabilized
augggccagaucaucaccuucuuccaggaggucccccacgucaucgaggaggucaugaacaucguccucaucgcccucucccuccucgccauccucaagggcaucuacaacgucgccaccugcggccucuucggccucgucuccuuccuccuccucugcggccgcuccugcuccaccaccuacaagggcgucuacgagcuccagacccucgagcucgacauggccucccucaacaugaccaugccccucuccugcaccaagaacaacucccaccacuacaucauggucggcaacgagaccggccucgagcucacccucaccaacaccuccaucaucaaccacaaguucugcaaccucuccgacgcccacaagaagaaccucuacgaccacgcccucauguccaucaucuccaccuuccaccucuccauccccaacuucaaccaguacgaggccauguccugcgacuucaacggcggcaagaucuccguccaguacaaccucucccacaccuacgccaucgacgccgccaaccacugcggcaccaucgccaacggcguccuccagaccuucaugcgcauggccuggggcggcuccuacaucgcccucgacuccggcugcggcuccugggacugcaucaugaccuccuaccaguaccucaucauccagaacaccaccugggaggaccacugccaguucucccgccccucccccaucggcuaccucggccuccucucccagcgcacccgcgacaucuacaucucccgccgccgccggggcaccuucaccuggacccucuccgacuccgagggcaacgagacccccggcggcuacugccucacccgcuggaugcucaucgaggccgagcucaagugcuucggcaacaccgccgucgccaagugcaacgagaagcacgacgaggaguucugcgacaugcuccgccucuucgacuucaacaagcaggccauccgccgccucaagacccccgcccagauguccauccagcucaucaacaaggccgucaacgcccucaucaacgaccagcucaucaugaagaaccaccuccgcgacaucaugugcauccccuacugcaacuacuccaaguacugguaccucaaccacaccgucaccggcaagaccucccucccccgcugcuggcucgucuccaacggcuccuaccucaacgagacccacuucuccgacgacaucgagcagcaggccgacaacaugaucaccgagaugcuccagaaggaguacauggaccgccagggcaagaccccccucggccucgucgaccucuucgucuucuccaccuccuucuaccucaucuccaucuuccuccaccucgucaagauccccacccaccgccacgucaucggcaagcccugccccaagccccaccgccucaaccacaugggcaucugcuccugcggccucuacaagcaccccggcguccccgucaaguggaagcgcuga

SEQ ID NO: 4622 - RNA, 1473 nt, Artificial Sequence
  derived and/or modified protein sequence (opt2) from LASV(ISTH2065-NIG-2012;Clade II)__AIT17528__GPCstabilized
augggccagaucaucaccuucuuccaggaggucccccacgucaucgaggaggucaugaacaucguccucaucgcccucucccuccucgccaugcucaagggcaucuacaacaucgccaccugcggccucuucggccucaucuccuuccuccuccucugcggccgcuccugcuccaccaccuacaagggcgucuacgagcuccaggcccucgagcucgacauggccaaccucaacaugaccaugccccucuccugcaccaagaacaacucccaccacuacaucauggucggcaacgagaccggccucgagcucacccucaccaacaccuccaucaucaaccacaaguucugcaaccucuccgacgcccacaagaagaaccucuacgaccacgcccucauguccaucaucuccaccuuccaccucuccauccccaacuucaaccaguacgaggccauguccugcgacuucaacggcggcaagaucuccguccaguacaaccucucccacaccuacgccggcgacgccgccaagcacugcggcaccaucgccaacggcguccuccagaccuucaugcgcauggccuggggcggcuccuacaucgcccucgacuccggcugcggcaacugggacugcaucaugaccuccuaccaguaccucaucauccagaacaccaccugggaggaccacugccaguucucccgccccucccccaucggcuaccucggccuccucucccagcgcacccgcgacaucuacaucucccgccgccgccggggcaccuucaccuggacccucuccgacuccgagggcaacgagacccccggcggcuacugccucacccgcuggaugcucaucgaggccgagcucaagugcuucggcaacaccgccgucgccaagugcaacgagaagcacgacgaggaguucugcgacaugcuccgccucuucgacuucaacaagcaggccauccgccgccucaagacccccgcccagauguccauccagcucaucaacaaggccgucaacgcccucaucaacgaccagcucaucaugaagaaccaccuccgcgacaucaugugcauccccuacugcaacuacuccaaguacugguaccucaaccacuccgucaccggccgcaccucccucccccgcugcuggcucgucuccaacggcuccuaccucaacgagacccaguucuccgacgacaucgagcagcaggccgacaacaugaucaccgagaugcuccagaaggaguacaucgaccgccagggcaagaccccccucggccucgucgaccucuucgucuucuccaccuccuucuaccucaucuccaucuuccuccaccucaucaagauccccacccaccgccacaucgucggcaagcccugccccaagccccaccgccucaaccacaugggcaucugcuccugcggccucuacaagcaccccggcauccccgucaaguggaagcgcuga

SEQ ID NO: 4623 - RNA, 1473 nt, Artificial Sequence
  derived and/or modified protein sequence (opt2) from LASV(ISTH2094-NIG-2012;Clade II)__AIT17538__GPCstabilized
augggccagaucaucaccuucuuccaggaggucccccacgucaucgaggaggucaugaacaucguccucaucgcccucucccuccucgccauccucaagggcaucuacaacaucgccaccugcggccucuucggccucaucuccuuccuccuccucugcggccgcuccugcuccaccaccuacaagggcgucuacgagcuccagacccucgagcucgacauggccaaccucaacaugaccaugccccucuccugcaccaagaacaacucccaccacuacaucauggucggcaacgagaccggccucgagcucacccucaccaacaccuccaucaucaaccacaaguucugcaaccucuccgacgcccacaagaagaaccucuacgaccacgcccucauguccaucaucuccaccuuccaccucuccauccccaacuucaaccaguacgaggccauguccugcgacuucaacgagggcaagaucuccguccaguacaaccucucccacuccuacgccaucgacgccgccggccacugcggcaccaucgccaacggcguccuccagaccuucaugcgcauggccuggggcggcuccuacaucgcccucgacuccggcugcggcaacugggacugcaucaugaccuccuaccaguaccucaucauccagaacaccaccugggaggaccacugccaguucucccgccccucccccaucggcuaccucggccuccucucccagcgcacccgcgacaucuacaucucccgccgccgccggggcaccuucaccuggacccucuccgacuccgagggcaacgaggcccccggcggcuacugccucacccgcuggaugcucaucgaggccgagcucaagugcuucggcaacaccgccaucgccaagugcaacgagaagcacgacgaggaguucugcgacaugcuccgccucuucgacuucaacaagcaggccaucaagcgccucaaggcccccgcccagauguccauccaccucaucaacaaggccgucaacgcccucaucaacgaccagcucaucaugaagaaccaccuccgcgacaucaugugcauccccuacugcaacuacuccaaguacugguaccucaaccacaccgucaccggcaagaccucccuccccaagugcuggcucgucuccaacggcuccuaccucaacgagacccacuucuccgacgacaucgagcagcaggccgacaacaugaucaccgagcuccuccagaaggaguacauggaccgccagggcaagaccccccucggccucgucgaccucuucgucuucuccaccuccuucuaccucaucuccaucuuccuccaccucgucaagauccccacccaccgccacaucgucggccgccccugccccaagccccaccgccucaaccacaugggcaucugcuccugcggccucuacaagcaccccggcguccccgucaaguggaagcgcuga

SEQ ID NO: 4624 - RNA, 1473 nt, Artificial Sequence
  derived and/or modified protein sequence (opt2) from LASV(ISTH2129-NIG-2012;Clade II)__AIT17544__GPCstabilized
augggccagaucaucaccuucuuccaggaggucccccacgucaucgaggaggucaugaacaucguccucaucgcccucucccuccucgccauccucaagggcaucuacaacgucgccaccugcggccucuucggccucgucuccuuccuccuccucugcggccgcuccugcuccaccaccuacaagggcgucuacgagcuccagacccucgagcucgacaugggcucccucaacaugaccaugccccucuccugcaccaagaacaacucccaccacuacaucauggucggcaacgagaccggccucgagcucacccucaccaacaccuccaucaucaaccacaaguucugcaaccucuccgacgcccacaagaagaaccucuacgaccacgcccucauguccaucaucuccaccuuccaccucuccauccccaacuucaaccaguacgaggccauguccugcgacuucaacggcggcaagaucuccguccaguacaaccucucccacuccuacgccgucgacgccgccaaccacugcggcaccaucgccaacggcguccuccagaccuucaugcgcauggccuggggcggcuccuacaucgcccucgacuccggcugcggcuccugggacugcaucaugaccuccuaccaguaccucaucauccagaacaccaccugggaggaccacugccaguucucccgccccucccccaucggcuaccucggccuccucucccagcgcacccgcgacaucuacaucucccgccgccgccggggcaccuucaccuggacccucuccgacuccgagggcaacgagacccccggcggcuacugccucacccgcuggaugcucaucgaggccgagcucaagugcuucggcaacaccgccgucgccaagugcaacgagaagcacgacgaggaguucugcgacaugcuccgccucuucgacuucaacaagcaggccauccgccgccucaagacccccgcccagauguccauccagcucaucaacaaggccgucaacgcccucaucaacgaccagcucaucaugaagaaccaccuccgcgacaucaugugcauccccuacugcaacuacuccaaguacugguaccucaaccacaccgucaccggcaagaccucccucccccgcugcuggcucgucuccaacggcuccuaccucaacgagacccacuucuccgacgacaucgagcagcaggccgacaacaugaucaccgagcuccuccagaaggaguacauggaccgccagggcaagaccccccucggccucgucgaccucuucgucuucuccaccuccuucuaccucaucuccaucuuccuccaccucgucaagauccccacccaccgccacaucaucggcaagcccugccccaagccccaccgccucaaccacaugggcaucugcuccugcggccucuacaagcaccccggcguccccgucaaguggaagcgcuga

SEQ ID NO: 4625 - RNA, 1473 nt, Artificial Sequence
  derived and/or modified protein sequence (opt2) from LASV(ISTH2217-NIG-2012;Clade II)__AIT17548__GPCstabilized
augggccagaucaucaccuucuuccaggaggucccccacgucaucgaggaggucaugaacaucguccucaucgcccucucccuccucgccauccucaagggcaucuacaacgucgccaccugcggccucuucggccucgucuccuuccucuuccucugcggccgcuccugcuccaccaccuacaagggcgucuacgagcuccagacccucgagcucgacauggccucccucaacaugaccaugccccucuccugcaccaagaacaacucccaccacuacaucauggucggcaacgagaccggccucgagcucacccucaccaacaccuccaucaucaaccacaaguucugcaaccucuccgacgcccacaagcgcaaccucuacgaccacgcccucauguccaucaucuccaccuuccaccucuccauccccaacuucaaccaguacgaggccauguccugcgacuucaacggcggcaagaucuccguccaguacaaccucucccacgccuacgccggcgacgccgccaagcacugcggcaccaucgccaacggcguccuccagaccuucaugcgcauggccuggggcggcuccuacaucgcccucgacuccggcugcggcuccugggacugcaucaugaccuccuaccaguaccucaucauccagaacaccaccugggaggaccacugccaguucucccgccccucccccaucggcuaccucggccuccucucccagcgcacccgcgacaucuacaucucccgccgccgccggggcaccuucaccuggacccucuccgacuccgagggcaacgagacccccggcggcuacugccucacccgcuggaugcucaucgaggccgagcucaagugcuucggcaacaccgccgucgccaagugcaacgagaagcacgacgaggaguucugcgacaugcuccgccucuucgacuucaacaagcaggccauccgccgccuccgcacccccgcccagauguccauccagcucaucaacaaggccgucaacgcccucaucaacgaccagcucaucaugaagaaccaccuccgcgacaucaugugcauccccuacugcaacuacuccaaguacugguaccucaaccacaccgucaccggcaagaccucccuccccaagugcuggcucgucuccaacggcuccuaccucaacgagacccacuucuccgacgacaucgagcagcaggccgacaacaugaucaccgagaugcuccagaaggaguacaucgaccgccagggcaagaccccccucggccucgucgaccucuucgucuucuccaccuccuucuaccucaucuccaucuuccuccaccucgucaagauccccacccaccgccacgucaucggcaagcccugccccaagccccaccgccucaaccacaugggcaucugcuccugcggccucuacaagcaccccggcguccccgucaaguggaagcgcuga

SEQ ID NO: 4626 - RNA, 1473 nt, Artificial Sequence
  derived and/or modified protein sequence (opt2) from LASV(ISTH2271-NIG-2012;Clade II)__AIT17552__GPCstabilized
augggccagaucaucaccuucuuccaggaggucccccacgucaucgaggaggucaugaacaucguccucaucgcccucucccuccucgccauccucaagggcaucuacaacgucgccaccugcggccucuucggccucgucuccuuccuccuccucugcggccgcuccugcuccaccaccuacaagggcgucuacgagcuccagacccucgagcucgacauggccucccucaacaugaccaugccccucuccugcaccaagaacaacucccaccacuacaucauggucggcaacgagaccggccucgagcucacccucaccaacaccuccaucaucaaccacaaguucugcaaccucuccgacgcccacaagaagaaccucuacgaccacgcccucauguccaucaucuccaccuuccaccucuccauccccaacuucaaccaguacgaggccauguccugcgacuucaacggcggcaagaucuccguccaguacaaccucucccacgccuacgccgucaacgccgccaaccacugcggcaccaucgccaacggcguccuccagaccuucaugcgcauggccuggggcggcuccuacaucgcccucgacuccggcugcggcuccugggacugcaucaugaccuccuaccaguaccucaucauccagaacaccaccugggaggaccacugccaguucucccgccccucccccaucggcuaccucggccuccucucccagcgcacccgcgacaucuacaucucccgccgccgccggggcaccuucaccuggacccucuccgacuccgagggcaacgagacccccggcggcuacugccucacccgcuggaugcucaucgaggccgagcucaagugcuucggcaacaccgccgucgccaagugcaacgagaagcacgacgaggaguucugcgacaugcuccgccucuucgacuucaacaagcaggccauccgccgccucaagacccccgcccagauguccauccagcucaucaacaaggccgucaacgcccucaucaacgaccagcucaucaugaagaaccaccuccgcgacaucaugugcauccccuacugcaacuacuccaaguacugguaccucaaccacaccgucaccggcaagaccucccucccccgcugcuggcucgucuccaacggcuccuaccucaacgagacccacuucuccgacgacaucgagcagcaggccgacaacaugaucaccgagcuccuccagaaggaguacauggaccgccagggcaagaccccccucggccucgucgaccucuucgucuucuccaccuccuucuaccucaucuccaucuuccuccaccucgucaagauccccacccaccgccacgucaucggcaagcccugccccaagccccaccgccucaaccacaugggcaucugcuccugcggccucuacaagcaccccggcguccccgucaaguggaagaaguga

SEQ ID NO: 4627 - RNA, 1473 nt, Artificial Sequence
  derived and/or modified protein sequence (opt2) from LASV(ISTH2304-NIG-2012;Clade II)__AIT17556__GPCstabilized
augggccagaucaucaccuucuuccaggaggucccccacgucaucgaggaggucaugaacaucguccucaucgcccucucccuccucgccauccucaagggcaucuacaacgucgccaccugcggccucuucggccucgucuccuuccuccuccucugcggccgcuccugcuccaccaccuacaagggcgucuacgagcuccagacccucgagcucgacauggccucccucaacaugaccaugccccucuccugcaccaagaacaacucccaccacuacaucauggucggcaacgagaccggccucgagcucacccucaccaacaccuccaucaucaaccacaaguucugcaaccucuccgacgcccacaagaagaaccucuacgaccacgcccucauguccaucaucuccaccuuccaccucuccauccccaacuucaaccaguacgaggccauguccugcgacuucaacggcggcaagaucuccguccaguacaaccucucccacaccuacgccgucgacgccgccaaccacugcggcaccaucgccaacggcguccuccagaccuucaugcgcauggccuggggcggcuccuacaucgcccucgacuccggcugcggcuccugggacugcaucaugaccuccuaccaguaccucaucauccagaacaccaccugggaggaccacugccaguucucccgccccucccccaucggcuaccucggccuccucucccagcgcacccgcgacaucuacaucucccgccgccgccggggcaccuucaccuggacccucuccgacuccgagggcaacgagacccccggcggcuacugccucacccgcuggaugcucaucgaggccgagcucaagugcuucggcaacaccgccgucgccaagugcaacgagaagcacgacgaggaguucugcgacaugcuccgccucuucgacuucaacaagcaggccauccgccgccucaagacccccgcccagauguccauccagcucaucaacaaggccgucaacgcccucaucaacgaccagcucaucaugaagaaccaccuccgcgacaucaugugcauccccuacugcaacuacuccaaguacugguaccucaaccacaccaucaccggcaagaccucccucccccgcugcuggcucgucuccaacggcuccuaccucaacgagacccacuucuccgacgacaucgagcagcaggccgacaacaugaucaccgagcuccuccagaaggaguacaucgaccgccagggcaagaccccccucggccucgucgaccucuucgucuucuccaccuccuucuaccucaucuccaucuuccuccaccucgucaagauccccacccaccgccacaucaccggcaagcccugccccaagccccaccgccucaaccacaugggcaucugcuccugcggccucuacaagcaccccggcguccccguccgcuggaagcgcuga

SEQ ID NO: 4628 - RNA, 1473 nt, Artificial Sequence
  derived and/or modified protein sequence (opt2) from LASV(ISTH2312-NIG-2012;Clade II)__AIT17560__GPCstabilized
augggccagaucaucaccuucuuccaggaggucccccacgucaucgaggaggucaugaacaucguccucaucgcccucucccuccucgccguccucaagggcaucuacaacgucgccaccugcggccucuucggccucgucuccuuccuccuccucugcggccgcuccugcuccaccaccuacaagggcgucuacgagcuccagacccucgagcucgacauggccucccucaacaugaccaugccccucuccugcaccaccaacaacucccaccacuacaucauggucggcaacgagaccggccucgagcucacccucaccaacaccuccaucaucaaccacaaguucugcaaccucuccgacgcccacaagaagaaccucuacgaccacgcccucauguccaucaucuccaccuuccaccucuccauccccaacuucaaccaguacgaggccauguccugcgacuucaacggcggcaagaucuccguccaguacaaccucucccacgccuacgccggcgaggccgccaaccacugcggcaccaucgccaacggcguccuccagaccuucaugcgcauggccuggggcggcuccuacaucgcccucgacuccggcugcggcuccugggacugcaucaugaccuccuacaaguaccucaucauccagaacaccaccuggggcgaccacugccaguucucccgccccucccccaucggcuaccucggccuccucucccagcgcacccgcgacaucuacaucucccgccgccgccggggcaccuucaccuggacccucuccgacuccgagggcaacgagacccccggcggcuacugccucacccgcuggaugcucaucgaggccgagcucaagugcuucggcaacaccgccgucgccaagugcaacgagaagcacgacgaggaguucugcgacaugcuccgccucuucgacuucaacaagcaggccauccgcaagcucaagacccccgcccagauguccauccagcucaucaacaaggccgucaacgcccucaucaacgaccagcucaucaugaagaaccaccuccgcgacaucaugugcauccccuacugcaacuacucccgcuacugguaccucaaccacaccgucaccggccgcaccucccucccccgcugcuggcucgucuccaacggcuccuaccucaacgagacccacuucuccgacgacaucgagcagcaggccgacaacaugaucaccgagcuccuccagaaggaguacaucgaccgccagggcaagaccccccucggccucgucgaccucuucgucuucuccaccuccuucuaccucaucuccaucuuccuccaccucgucaagauccccacccaccgccacaucaucggcaagcccugccccaagccccaccgccucaaccacaugggcaucugcuccugcggccucuacaagcaccccggcguccccgucaaguggaagcgcuga

SEQ ID NO: 4629 - RNA, 1473 nt, Artificial Sequence
  derived and/or modified protein sequence (opt2) from LASV(ISTH2316-NIG-2012;Clade II)__AIT17564__GPCstabilized
augggccagaucaucaccuucuuccaggaggucccccacgucaucgaggaggucaugaacaucguccucaucgcccucucccuccucgccauccucaagggcaucuacaacgucgccaccugcggccucuucggccuccucuccuuccuccuccucugcggccgcuccugcuccaccaccuacaagggcgucuacgagcuccagacccucgagcucgacauggccucccucaacaugaccaugccccucuccugcaccaagaacaacucccaccacuacaucauggucggcaacgagaccggccucgagcucacccucaccaacaccuccaucaucaaccacaaguucugcaaccucuccgacgcccacaagaaggaccucuacgaccacgcccucauguccaucaucuccaccuuccaccucuccauccccaacuucaaccaguacgaggccauguccugcgacuucaacggcggcaagaucuccguccaguacaaccucucccacgccuacgccgucgacgccgccaagcacugcggcaccaucgccaacggcguccuccagaccuucaugcgcauggccuggggcggcuccuacaucgcccucgacuccggcugcggcuccugggacugcaucaugaccuccuaccaguaccucaucauccagaacaccuccugggaggaccacugccaguucucccgccccucccccaucggcuaccucggccuccucucccagcgcacccgcgacaucuacaucucccgccgccgccggggcaccuucaccuggacccucuccgacuccgagggcaacgagacccccggcggcuacugccucacccgcuggaugcucaucgaggccgagcucaagugcuucggcaacaccgccgucgccaagugcaacgagaagcacgacgaggaguucugcgacaugcuccgccucuucgacuucaacaagcaggccaucaagcgccucaagacccccgcccagauguccauccagcucaucaacaaggccgucaacgcccucaucaacgaccagcucaucaugaagaaccaccuccgcgacaucaugugcauccccuacugcaacuacuccaaguacugguaccucaaccacaccgucaccggcaagaccucccucccccgcugcuggcucgucuccaacggcuccuaccucaacgagacccacuucuccgacgacaucgagcagcaggccgacaacaugaucaccgagcuccuccagaaggaguacaucgaccgccagggcaagaccccccucggccucgucgaccucuucgucuucuccaccuccuucuaccucaucuccaucuuccuccaccucgucaagauccccacccaccgccacgucaucggcaagcccugccccaagccccaccgccucaaccacaugggcaucugcuccugcggccucuacaagcaccccggcguccccgucaaguggaagcgcuga

SEQ ID NO: 4630 - RNA, 1473 nt, Artificial Sequence
  derived and/or modified protein sequence (opt2) from LASV(ISTH2358-NIG-2012;Clade II)__AIT17572__GPCstabilized
augggccagaucaucaccuucuuccaggaggucccccacgucaucgaggaggucaugaacaucguccucaucgcccucucccuccucgccauccucaagggcaucuacaacgucgccaccugcggccucuucggccucgucuccuuccuccuccucugcggccgcuccugcuccaccaccuacaagggcgucuacgagcuccagacccucgagcucgacauggccaaccucaacaugaccaugccccucuccugcaccaagaacaacucccaccacuacaucauggucggcaacgagaccggccucgagcucacccucaccaacaccuccaucaucaaccacaaguucugcaaccucuccgacgcccacaagaagaaccucuacgaccacgcccucauguccaucaucuccaccuuccaccucuccauccccaacuucaaccaguacgaggccauguccugcgacuucaacggcggcaagaucuccguccaguacaaccucucccacaacuacgccgucgacgccgccaaccacugcggcaccaucgccaacggcguccuccagaccuucaugcgcauggccuggggcggcuccuacaucgcccucgacuccggcugcggcaacugggacugcaucaugaccuccuaccaguaccucaucauccagaacaccaccugggaggaccacugccaguucucccgccccucccccaucggcuaccucggccuccucucccagcgcacccgcgacaucuacaucucccgccgccgccggggcaccuucaccuggacccucuccgacuccgagggcaacgacaugcccggcggcuacugccucacccgcuggaugcucaucgaggccgagcucaagugcuucggcaacaccgccgucgccaagugcaacgagaagcacgacgaggaguucugcgacaugcuccgccucuucgacuucaacaagcaggccauccgccgccucaagacccccgcccagaugaacauccagcucaucaacaaggccgucaacgcccucaucaacgaccagcucaucaugaagaaccaccuccgcgacaucaugugcauccccuacugcaacuacuccaaguacugguaccucaaccacaccgucaccggcaagaccucccucccccgcugcuggcucgucuccaacggcuccuaccucaacgagacccacuucuccgacgacaucgagcagcaggccgacaacaugaucaccgagcuccuccagaaggaguacauggaccgccagggcaagaccccccucggccucgucgaccucuucgucuucuccaccuccuucuaccucaucuccaucuuccuccaccucgucaagauccccacccaccgccacaucaucggcaagcccugccccaagccccaccgccucaaccacaugggcaucugcuccugcggccucuacaagcaccccggcguccccgucaaguggaagcgcuga

SEQ ID NO: 4631 - RNA, 1473 nt, Artificial Sequence
  derived and/or modified protein sequence (opt2) from LASV(ISTH2376-NIG-2012;Clade II)__AIT17576__GPCstabilized
augggccagaucaucaccuucuuccaggaggucccccacgucaucgaggaggucaugaacaucguccucaucgcccucucccuccucgccauccucaagggcaucuacaacgucgccaccugcggccucuucggccucgucuccuuccuccuccucugcggccgcuccugcuccaccaccuacaagggcgucuacgagcuccagacccucgagcucgacauggccucccucaacaugaccaugccccucuccugcaccaagaacaacucccaccacuacaucauggucggcaacgagaccggccucgagcucacccucaccaacaccuccaucaucaaccacaaguucugcaaccucuccgacgcccacaagaagaaccucuacgaccacgcccucauguccaucaucuccaccuuccaccucuccauccccaacuucaaccaguacgaggccauguccugcgacuucaacggcggcaagaucuccguccaguacaaccucucccacaccuacgccgucgacgccgccaaccacugcggcaccaucgccaacggcguccuccagaccuucaugcgcauggccuggggcggcuccuacaucgcccucgacuccggcugcggcaacugggacugcaucaugaccuccuaccaguaccucaucauccagaacaccaccugggaggaccacugccaguucucccgccccucccccaucggcuaccucggccuccucucccagcgcacccgcgacaucuacaucucccgccgccgccggggcaccuucaccuggacccucuccgacuccgagggcaacgagacccccggcggcuacugccucacccgcuggaugcucaucgaggccgagcucaagugcuucggcaacaccgccgucgccaagugcaacgagaagcacgacgaggaguucugcgacaugcuccgccucuucgacuucaacaagcaggccaucucccgccucaagacccccgcccagauguccauccagcucaucaacaaggccgucaacgcccucaucaacgaccagcucaucaugaagaaccaccuccgcgacaucaugugcauccccuacugcaacuacuccaaguacugguaccucaaccacaccgucaccggcaagaccucccucccccgcugcuggcucgucuccaacggcuccuaccucaacgagacccacuucuccgacgacaucgagcagcaggccgacaacaugaucaccgagaugcuccagaaggaguacaucgaccgccagggcaagaccccccucggccucgucgaccucuucgucuucuccaccuccuucuaccucaucuccaucuuccuccaccucgucaagauccccacccaccgccacaucaccggcaagcccugccccaagccccaccgccucaaccacaugggcaucugcuccugcggccucuacaagcaccccggcguccccgucaaguggaagcgcuga

SEQ ID NO: 4632 - RNA, 1473 nt, Artificial Sequence
  derived and/or modified protein sequence (opt2) from LASV(Lassa virus/H.sapiens-wt/NGA/2015/ISTH_0543;Clade II)__AVO03639__GPCstabilized
augggccagaucaucaccuucuuccaggaggucccccacgucaucgaggaggucaugaacaucguccucaucgcccucucccuccucgccauccucaagggcaucuacaacgucgccaccugcggccucuucggccucgucuccuuccuccuccucugcggccgcuccugcuccaccaccuacaagggcgucuacgagcuccagacccucgagcucgacauggccaaccucaacaugaccaugccccucuccugcaccaagaacaacucccaccacuacaucauggucggcaacgagaccggccucgagcucacccucaccaacaccuccaucaucaaccacaaguucugcaaccucuccgacgcccacaagaagaaccucuacgaccacgcccucauguccaucaucuccaccuuccaccucuccauccccaacuucaaccaguacgaggccauguccugcgacuucaacggcggcaagaucuccguccaguacaaccucucccacaccuacgccgucgacgccgccaaccacugcggcaccaucgccaacggcguccuccagaccuucaugcgcauggccuggggcggcuccuacaucgcccucgacuccggcugcggcuccugggacugcaucaugaccuccuaccaguaccucgucauccagaacaccaccugggaggaccacugccaguucucccgccccucccccaucggcuaccucggccuccucucccagcgcacccgcgacaucuacaucucccgccgccgccggggcaccuucaccuggacccucuccgacuccgagggcaacgagacccccggcggcuacugccucacccgcuggaugcucaucgaggccgagcucaagugcuucggcaacaccgccgucgccaagugcaacgagaagcacgacgaggaguucugcgacaugcuccgccucuucgacuucaacaagcaggccauccgccgccucaagacccccgcccagauguccauccagcucaucaacaaggccgucaacgcccucaucaacgaccagcucaucaugaagaaccaccuccgcgacaucaugugcauccccuacugcaacuacuccaaguacugguaccucaaccacaccgucaccggcaagaccucccucccccgcugcuggcucgucuccaacggcuccuaccucaacgagacccacuucuccgacgacaucgagcagcaggccgacaacaugaucaccgagcuccuccagaaggaguacaucgaccgccagggcaagaccccccucggccucgucgaccucuucgucuucuccaccuccuucuaccucaucuccaucuuccuccaccucgucaagauccccacccaccgccacaucaccggcaagcccugccccaagccccaccgccucaaccacaugggcaucugcuccugcggccucuacaagcaccccggcguccccgucaaguggaagcgcuga

SEQ ID NO: 4633 - RNA, 1473 nt, Artificial Sequence
  derived and/or modified protein sequence (opt2) from LASV(Lassa virus/H.sapiens-wt/NGA/2015/ISTH_0547;Clade II)__AVO03583__GPCstabilized
augggccagaucaucaccuucuuccaggaggucccccacgucaucgaggaggucaugaacaucguccucaucgcccucucccuccucgccauccucaagggcaucuacaacgucgccaccugcggccucuucggccucgucuccuuccuccuccucugcggccgcuccugcuccaccaccuacaagggcgucuacgagcuccagacccucgagcucgacauggccucccucaacaugaccaugccccucuccugcaccaagaacaacucccaccacuacaucauggucggcaacgagaccggccucgagcucacccucaccaacaccuccaucaucaaccacaaguucugcaaccucuccgacgcccacaagaagaaccucuacgaccacgcccucauguccaucaucuccaccuuccaccucuccauccccaacuucaaccaguacgaggccauguccugcgacuucaacggcggcaagaucuccguccaguacaaccucucccacaccuacgccgucgacgccgccaaccacugcggcaccaucgccaacggcguccuccagaccuucaugcgcauggccuggggcggcuccuacaucgcccucgacuccggcugcggcuccugggacugcaucaugaccuccuaccaguaccucaucauccagaacaccaccugggaggaccacugccaguucucccgccccucccccaucggcuaccucggccuccucucccagcgcacccgcgacaucuacaucucccgccgccgccggggcaccuucaccuggacccucuccgacuccgagggcaacgagacccccggcggcuacugccucacccgcuggaugcucaucgaggccgagcucaagugcuucggcaacaccgccgucgccaagugcaacgagaagcacgacgaggaguucugcgacaugcuccgccucuucgacuucaacaagcaggccauccgccgccucaagacccccgcccagauguccauccagcucaucaacaaggccgucaacgcccucaucaacgaccagcucaucaugaagaaccaccuccgcgacaucaugugcauccccuacugcaacuacuccaaguacugguaccucaaccacaccgucaccggcaagaccucccucccccgcugcuggcucgucuccaacggcuccuaccucaacgagacccacuucuccgacgacaucgagcagcaggccgacaacaugaucaccgagcuccuccagaaggaguacaucgagcgccagggcaagaccccccucggccucgucgaccucuucgucuucuccaccuccuucuaccucaucuccaucuuccuccaccucgucaagauccccacccaccgccacaucaccggcaagcccugccccaagccccaccgccucaaccacaugggcaucugcuccugcggccucuacaagcaccccggcguccccgucaaguggaagcgcuga

SEQ ID NO: 4634 - RNA, 1473 nt, Artificial Sequence
  derived and/or modified protein sequence (opt2) from LASV(Lassa virus/H.sapiens-wt/NGA/2015/ISTH_0574;Clade II)__AVO03657__GPCstabilized
augggccagaucaucaccuucuuccaggaggucccccacgucaucgaggaggucaugaacaucguccucaucgcccucucccuccucgccauccucaagggcaucuacaacgucgccaccugcggccucuucggccucgucgccuuccuccuccucugcggccgcuccugcuccaccaccuacaagggcgucuacgagcuccagacccucgagcucgacauggccucccucaacaugaccaugccccucuccugcaccaagaacaacucccaccacuacaucauggucggcaacgagaccggccucgagcucacccucaccaacaccuccaucaucaaccacaaguucugcaaccucuccgacgcccacaagaagaaccucuacgaccacgcccucauguccaucaucuccaccuuccaccucuccauccccaacuucaaccaguacgaggccauguccugcgacuucaacggcggcaagaucuccguccaguacaaccucucccacaccuacgccgucgacgccgccaaccacugcggcaccaucaccaacggcguccuccagaccuucaugcgcauggccuggggcggcuccuacaucgcccucgacuccggcugcggcuccugggacugcaucaugaccuccuaccaguaccucaucauccagaacaccaccugggaggaccacugccaguucucccgccccucccccaucggcuaccucggccuccucucccagcgcacccgcgacaucuacaucucccgccgccgccggggcaccuucaccuggacccucuccgacuccgagggcaacgagacccccggcggcuacugccucacccgcuggaugcucaucgaggccgagcucaagugcuucggcaacaccgccgucgccaagugcaacgagaagcacgacgaggaguucugcgacaugcuccgccucuucgacuucaacaagcaggccauccgccgccucaagacccccgcccagauguccauccagcucaucaacaaggccgucaacgcccucaucaacgaccagcucaucaugaagaaccaccuccgcgacaucaugugcauccccuacugcaacuacuccaaguacugguaccucaaccacaccgucaccggccgcaccucccucccccgcugcuggcucgucuccaacggcuccuaccucaacgagacccacuucuccgacgacaucgagcagcaggccgacaacaugaucaccgagcuccuccagaaggaguacauggaccgccagggcaagaccccccucggccucgucgaccucuucgucuucuccaccuccuucuaccucaucuccaucuuccuccaccucaucaagauccccacccaccgccacgucaucggcaagcccugccccaagccccaccgccucaaccacaugggcaucugcuccugcggccucuacaagcaccccggcguccccgucaaguggaagcgcuga

SEQ ID NO: 4635 - RNA, 1473 nt, Artificial Sequence
  derived and/or modified protein sequence (opt2) from LASV(Lassa virus/H.sapiens-wt/NGA/2015/ISTH_0681;Clade II)__AVO03617__GPCstabilized
augggccagaucaucaccuucuuccaggaggucccccacgucaucgaggaggucaugaacaucguccucaucgcccucucccuccucgccauccucaagggcaucuacaacgucgccaccugcggccucuucggccucgucuccuuccuccuccucugcggccgcuccugcuccaccaccuacaagggcgucuacgagcuccagacccucgagcucgacauggccucccucaacaugaccaugccccucuccugcaccaagaacaacucccaccacuacaucauggucggcaacgagaccggccucgagcucacccucaccaacaccuccaucaucaaccacaaguucugcaaccucuccgacgcccacaagaagaaccucuacgaccacgcccucauguccaucaucuccaccuuccaccucuccauccccaacuucaaccaguacgaggccauguccugcgacuucaacggcggcaagaucuccguccaguacaaccucucccacaccuacgccgagggcgccgccaaccacugcggcaccaucgccaacggcguccuccagaccuucaugcgcauggccuggggcggcuccuacaucgcccucgacuccggcugcggcuccugggacugcaucaugaccuccuaccaguaccucaucauccagaacaccaccugggaggaccacugccaguucucccgccccucccccaucggcuaccucggccuccucucccagcgcacccgcgacaucuacaucucccgccgccgccggggcaccuucaccuggacccucuccgacuccgagggcaacgagacccccggcggcuacugccucacccgcuggaugcucaucgaggccgagcucaagugcuucggcaacaccgccgucgccaagugcaacgagaagcacgacgaggaguucugcgacaugcuccgccucuucgacuucaacaagcaggccaucaugcgccucaagacccccgcccagauguccauccagcucaucaacaaggccgucaacgcccucaucaacgaccagcucaucaugaagaaccaccuccgcgacaucaugugcauccccuacugcaacuacuccaaguacugguaccucaaccacaccgucaccggcaagaccucccucccccgcugcuggcucgucuccaacggcuccuaccucaacgagacccacuucuccgacgacaucgagcagcaggccgacaacaugaucaccgagaugcuccagaaggaguacauggaccgccagggcaagaccccccucggccucgucgaccucuucgucuucuccaccuccuucuaccucaucuccaucuuccuccaccucgucaagauccccacccaccgccacgucaucggcaagcccugccccaagccccaccgccucaaccacaugggcaucugcuccugcggccucuacaagcaccccggcguccccgucaaguggaagcgcuga

SEQ ID NO: 4636 - RNA, 1473 nt, Artificial Sequence
  derived and/or modified protein sequence (opt2) from LASV(Lassa virus/H.sapiens-wt/NGA/2015/ISTH_0682;Clade II)__AVO03625__GPCstabilized
augggccagaucaucaccuucuuccaggaggucccccacgucaucgaggaggucaugaacaucguccucaucgcccucucccuccucgccauccucaagggcaucuacaacgucgccaccugcggccucuucggccucgucuccuuccuccuccucugcggccgcuccugcuccaccaccuacaagggcgucuacgagcuccagacccucgagcucgacauggccucccucaacaugaccaugccccucuccugcaccaagaacaacucccaccacuacaucauggucggcaacgagaccggccucgagcucacccucaccaacaccuccaucaucaaccacaaguucugcaaccucuccgacgcccacaagaagaaccucuacgaccacgcccucauguccaucaucuccaccuuccaccucuccauccccaacuucaaccaguacgaggccauguccugcgacuucaacggcggcaagaucuccguccaguacaaccucucccacgccuacgccgucgacgccgccaaccacugcggcaccaucgccaacggcguccuccagaccuucaugcgcauggccuggggcggcuccuacaucgcccucgacuccggcugcggcuccugggacugcaucaugaccuccuaccacuaccucaucauccagaacaccaccugggaggaccacugccaguucucccgccccucccccaucggcuaccucggccuccucucccagcgcacccgcgacaucuacaucucccgccgccgccggggcaccuucaccuggacccucuccgacuccgagggcaacgagacccccggcggcuacugccucacccgcuggaugcucaucgaggccgagcucaagugcuucggcaacaccgccgucgccaagugcaacgagaagcacgacgaggaguucugcgacaugcuccgccucuucgacuucaacaagcaggccauccgccgccucaagacccccgcccagauguccauccagcucaucaacaaggccgucaacgcccucaucaacgaccagcucaucaugaagaaccaccuccgcgacaucaugugcauccccuacugcaacuacuccaaguacugguaccucaaccacaccgucaccggcaagaccucccucccccgcugcuggcucgucuccaacggcuccuaccucaacgagacccacuucuccgacgacaucgagcagcaggccgacaacaugaucaccgagcuccuccagaaggaguacaucgaccgccagggcaagaccccccucggccucgucgaccucuucgucuucuccaccuccuucuaccucaucuccaucuuccuccaccucgucaagauccccacccaccgccacgucaucggcaagcccugccccaagccccaccgccucaaccacaugggcaucugcuccugcggccucuacaagcaccccggcguccccgucaaguggaagcgcuga

SEQ ID NO: 4637 - RNA, 1473 nt, Artificial Sequence
  derived and/or modified protein sequence (opt2) from LASV(Lassa virus/H.sapiens-wt/NGA/2015/ISTH_0687;Clade II)__AVO03581__GPCstabilized
augggccagaucaucaccuucuuccaggaggucccccacgucaucgaggaggucaugaacaucguccucaucgcccucucccuccucgccauccucaagggcaucuacaacgucgccaccugcggccucuucggccucgucuccuuccuccuccucugcggccgcuccugcuccaccaccuacaagggcgucuacgagcuccagacccucgagcucgacaugaccaaccucaacaugaccaugccccucuccugcaccaagaacaacucccaccacuacaucauggucggcaacgagaccggccucgagcucacccucaccaacaccuccaucaucaaccacaaguucugcaaccucuccgacgcccacaagaagaaccucuacaaccacgcccucauguccaucaucuccaccuuccaccucuccauccccaacuucaaccaguacgaggccauguccugcgacuucaacggcggcaagaucuccguccaguacaaccucucccacaccuacgccgucgacgccgccaaccacugcggcaccgucgccaacggcguccuccagaccuucaugcgcauggccuggggcggcuccuacaucgcccucgacuccggcugcggcggcugggacugcaucaugaccuccuaccaguaccucaucauccagaacaccaccugggaggaccacugccaguucucccgccccucccccaucggcuaccucggccuccucucccagcgcacccgcgacaucuacaucucccgccgccgccggggcaccuucaccuggacccucuccgacuccgagggcaacgagacccccggcggcuacugccucacccgcuggaugcucaucgaggccgagcucaagugcuucggcaacaccgccgucgccaagugcaacgagaagcacgacgaggaguucugcgacaugcuccgccucuucgacuucaacaagcaggccauccgcaagcucaaggcccccgcccagauguccauccagcucaucaacaaggccgucaacgcccucaucaacgaccagcucaucaugaagaaccaccuccgcgacaucaugugcauccccuacugcaacuacuccaaguacugguaccucaaccacaccgucaccggcaagaccucccuccccaagugcuggcucgucuccaacggcuccuaccucaacgagacccacuucuccgacgacaucgagcagcaggccgacaacaugaucaccgagcuccuccagaaggaguacauggaccgccagggcaagaccccccucggccucgucgaccucuucgucuucuccaccuccuucuaccucaucuccaucuuccuccaccucgucaagauccccacccaccgccacaucaucggcaagcccugccccaagccccaccgccucaaccacaugggcaucugcuccugcggccucuacaagcaccccggcguccccgucaaguggaagcgcuga

SEQ ID NO: 4638 - RNA, 1473 nt, Artificial Sequence
  derived and/or modified protein sequence (opt2) from LASV(Lassa virus/H.sapiens-wt/NGA/2015/ISTH_0736;Clade II)__AVO03573__GPCstabilized
augggccagaucaucaccuucuuccaggaggucccccacgucaucgaggaggucaugaacaucguccucaucgcccucucccuccucgccguccucaagggcaucuacaacgucgccaccugcggccucuucggccucgucuccuuccuccuccucugcggccgcuccugcuccaccaccuacaagggcgucuacgagcuccagacccucgagcucgacauggccucccucaacaugaccaugccccucuccugcaccaagaacaacucccaccacuacaucauggucggcaacgagaccggccucgagcucacccucaccaacaccuccaucaucaaccacaaguucugcaaccucuccgacgcccacaagaagaaccucuacgaccacgcccucauguccaucaucuccaccuuccaccucuccauccccaacuucaaccaguacgaggccauguccugcgacuucaacggcggcaagaucuccguccaguacaaccucucccacacccacgccgucgacgccgccaaccacugcggcaccaucgccaacggcguccuccagaccuucaugcgcauggccuggggcggcuccuacaucgcccucgacuccggcugcggcuccugggacugcaucaugaccuccuaccaguaccucaucauccagaacaccaccugggaggaccacugccaguucucccgccccucccccaucggcuaccucggccuccucucccagcgcacccgcgacaucuacaucucccgccgccgccggggcaccuucaccuggacccucuccgacuccgagggcaacgagacccccggcggcuacugccucacccgcuggaugcucaucgaggccgagcucaagugcuucggcaacaccgccgucgccaagugcaacgagaagcacgacgaggaguucugcgacaugcuccgccucuucgacuucaacaagcaggccauccgccgccucaagacccccgcccagauguccauccagcucaucaacaaggccgucaacgcccucaucaacgaccagcucaucaugaagaaccaccuccgcgacaucaugugcauccccuacugcaacuacucccgcuacugguaccucaaccacaccgucaccggcaagaccucccucccccgcugcuggcucgucuccaacggcuccuaccucaacgagacccacuucuccgacgacaucgagcagcaggccgacaacaugaucaccgagcuccuccagaaggaguacaucgaccgccagggccgcaccccccucggccucgucgaccucuucgucuucuccaccuccuucuaccucaucuccaucuuccuccaccucgucaagauccccacccaccgccacgucaucggcaagcccugccccaagccccaccgccucaaccacaugggcaucugcuccugcggccucuacaagcaccccggcguccccgucaaguggaagcgcuga

SEQ ID NO: 4639 - RNA, 1473 nt, Artificial Sequence
  derived and/or modified protein sequence (opt2) from LASV(Lassa virus/H.sapiens-wt/NGA/2015/ISTH_0789;Clade II)__AVO03551__GPCstabilized
augggccagaucgucaccuucuuccaggaggucccccacgucaucgaggagaucaugaacaucguccucaucacccucucccuccucgccauccucaagggcgucuacaaccucgccaccugcggccucaucggccucaucaccuuccucuuccucugcggccgcuccugcuccaccaucuacaagggcuccuaccaguuccagacccucgagcucaacauggagacccucaacaugaccaugccccucuccugcaccaagaacuccucccaccacuacauccgcgucuccaacgagaccggccucgagcucacccucaccaacaccuccaucaucaaccacaaguucugcaaccucuccgacgcccacaagaagaaccucuacgaccacacccucauguccaucaucuccaccuuccaccucuccauccccaacuucaaccaguacgaggccauguccugcgacuucaacggcggcaagaucuccguccaguacaaccucucccacuccuacgccgucgacgccgccaaccacugcggcaccgucgccaacggcguccuccagaccuucaugcgcauggccuggggcggcuccuacaucgcccucgacuccggcugcggcaacugggacugcaucaugaccuccuaccaguaccucaucauccagaacaccaccugggaggaccacugccaguucucccgccccucccccaucggcuaccucggccuccucucccagcgcacccgcgacaucuacaucucccgccgccgccggggcaccuucaccuggacccucuccgacuccgagggcaaggagacccccggcggcuacugccucacccgcuggaugcucaucgaggccgagcucaagugcuucggcaacaccgccgucgccaagugcaacgagaagcacgacgaggaguucugcgacaugcuccgccucuucgacuucaacaagcaggccauccagcgccucaaggcccccgcccagauguccauccagcucaucaacaaggccgucaacgcccucaucaacgaccagcucaucaugaagaaccaccuccgcgacaucaugugcauccccuacugcaacuacuccaaguacugguaccucaaccacaccuccaccggccgcaccucccuccccaagugcuggcucgucuccaacggcuccuaccucaacgagacccacuucuccgacgacaucgagcagcaggccgacaacaugaucaccgagaugcuccagaaggaguacaucgaccgccagggcaagaccccccucggccucgucgaccucuucgucuucuccaccuccuucuaccucaucuccaucuuccuccaccucgucaagauccccacccaccgccacaucgucggcaaguccugccccaagccccaccgccucaaccacaugggcaucugcuccugcggccucuacaagcgccccggcguccccgucaaguggaagcgcuga

SEQ ID NO: 4640 - RNA, 1473 nt, Artificial Sequence
  derived and/or modified protein sequence (opt2) from LASV(Lassa virus/H.sapiens-wt/NGA/2015/ISTH_0821;Clade II)__AVO03641__GPCstabilized
augggccagaucaucaccuucuuccaggaggucccccacgucaucgaggaggucaugaacaucguccucaucgcccucucccuccucgccauccucaagggcaucuacaacgucgccaccugcggccucuucggccucgucuccuuccuccuccucugcggccgcuccugcuccaccaccuacaagggcgucuacgagcuccagacccucgagcucgacauggccucccucaacaugaccaugccccucuccugcaccaagaacaacucccaccacuacaucauggucggcaacgagaccggccucgagcucacccucaccaacaccuccaucaucaaccacaaguucugcaaccucuccgacgcccacaagaagaaccucuacgaccacacccucauguccaucaucuccaccuuccaccucuccauccccaacuucaaccaguacgaggccauguccugcgacuucaacggcggcaagaucuccguccaguacaaccucucccacaccuacgccgucgacgccgccaaccacugcggcaccaucgccaacggcguccuccagaccuucaugcgcauggccuggggcggcuccuacaucgcccucgacuccggcugcggcaacugggacugcaucaugaccuccuaccaguaccucaucauccagaacaccaccugggaggaccacugccaguucucccgccccucccccaucggcuaccucggccuccucucccagcgcacccgcgacaucuacaucucccgccgccgccggggcaccuucaccuggacccucuccgacuccgagggcaacgagacccccggcggcuacugccucacccgcuggaugcucaucgaggccgagcucaagugcuucggcaacaccgccgucgccaagugcaacgagaagcacgacgaggaguucugcgacaugcuccgccucuucgacuucaacaagcaggccaucucccgccucaagacccccgcccagauguccauccagcucaucaacaaggccgucaacgcccucaucaacgaccagcucaucaugaagaaccaccuccgcgacaucaugugcauccccuacugcaacuacuccaaguacugguaccucaaccacaccgucaccggcaagaccucccucccccgcugcuggcucgucuccaacggcuccuaccucaacgagacccacuucuccgacgacaucgagcagcaggccgacaacaugaucaccgagaugcuccagaaggaguacaucgaccgccagggcaagaccccccucggccucgucgaccucuucgucuucuccaccuccuucuaccucaucuccaucuuccuccaccucgucaagauccccacccaccgccacgucaucggcaagcccugccccaagccccaccgccucaaccacaugggcaucugcuccugcggccucuacaagcaccccggcguccccgucaaguggaagcgcuga

SEQ ID NO: 4641 - RNA, 1473 nt, Artificial Sequence
  derived and/or modified protein sequence (opt2) from LASV(Lassa virus/H.sapiens-wt/NGA/2015/ISTH_0831;Clade II)__AVO03545__GPCstabilized
augggccagaucgucaccuucuuccaggaggucccccacgucaucgaggagaucaugaacaucguccucaucacccucucccuccucgccauccucaagggcgucuacaaccucgccaccugcggccucaucggccucaucaccuuccucuuccucugcggccgcuccugcuccaugaccuacaagggcuccuaccagcucgagacccucgagcucaacauggagacccucaacaugaccaugccccucuccugcaccaagaacaccucccaccacuacauccgcgucggcaacgagaccggccucgagcucacccucaccaacaccuccaucaucaaccacaaguucugcaaccucuccgacgcccacaagaagaaccucuacgaccacucccucauguccaucgucuccaccuuccaccucuccauccccaacuucaaccaguacgaggccauguccugcgacuucaacggcggcaagaucuccauccaguacaaccucucccacgccuacgccggcgacgccgccaagcacugcggcacccucgccaacggcguccuccagaccuucaugcgcauggccuggggcggcuccuacaucgcccucgacuccggcugcggcaacugggacugcaucaugaccuccuaccaguaccucaucauccagaacaccaccugggacgaccacugccaguucucccgccccucccccaucggcuaccucggccuccucucccagcgcacccgcgagaucuacaucucccgccgccgccggggcaccuucaccuggacccucuccgacuccgagggcaacgaggcccccggcggcuacugccucacccgcuggaugcucaucgaggccgagcucaagugcuucggcaacaccgccgucgccaagugcaacgagaagcacgacgaggaguucugcgacaugcuccgccucuucgacuucaacaagcaggccauccagcgccucaagacccccgcccagauguccauccagcucaucaacaaggccgucaacgcccucaucaacgaccagcucaucaugaagaaccaccuccgcgacaucaugugcauccccuacugcaacuacuccaaguacugguaccucaaccacaccaccaccggccgcaccucccucccccgcugcuggcucgucuccaacggcuccuaccucaacgagacccacuucuccgacgacaucgagcagcaggccgacaacaugaucaccgagaugcuccagaaggaguacaucgaccgccagggcaagaccccccucggccucgucgaccucuucgucuucuccaccuccuucuaccucaucuccaucuuccuccaccucgucaagauccccacccaccgccacaucgucggcaaguccugccccaagccccaccgccucaaccacaugggcaucugcuccugcggccucuacaagcagcccggcguccccguccgcuggaagcgcuga

SEQ ID NO: 4642 - RNA, 1473 nt, Artificial Sequence
  derived and/or modified protein sequence (opt2) from LASV(Lassa virus/H.sapiens-wt/NGA/2016/ISTH_0009;Clade II)__AVO03571__GPCstabilized
augggccagaucaucaccuucuuccaggaggucccccacgucaucgaggaggucaugaacaucguccucaucgcccucucccuccucgccauccucaagggcaucuacaacgucgccaccugcggccuccucggccucgucuccuuccuccuccucugcggccgcuccugcuccaccaccuacaagggcgucuacgagcuccagacccucgagcucgacauggccucccucaacaugaccaugccccucuccugcaccaagaacaacucccaccacuacaucauggucggcaacgagaccggccucgagcucacccucaccaacaccuccaucaucaaccacaaguucugcaaccucuccgacgcccacaagaagaaccucuacgaccacgcccucauguccaucaucuccaccuuccaccucuccauccccaacuucaaccaguacgaggccauguccugcgacuucaacggcggccgcaucuccguccaguacaaccucucccacuccuacgccgucgacgccgccaaccacugcggcaccaucgccaacggcguccuccagaccuucaugcgcauggccuggggcggcuccuacaucgcccucgacuccggcugcggcuccugggacugcaucaugaccuccuaccaguaccucaucauccagaacaccaccugggaggaccacugccaguucucccgccccucccccaucggcuaccucggccuccucucccagcgcacccgcgacaucuacaucucccgccgccgccggggcaccuucaccuggacccucuccgacuccgagggcaacgagacccccggcggcuacugccucacccgcuggaugcucaucgaggccgagcucaagugcuucggcaacaccgccgucgccaagugcaacgagaagcacgacgaggaguucugcgacaugcuccgccucuucgacuucaacaagcaggccauccgccgccucaagacccccgcccagauguccauccagcucaucaacaaggccgucaacgcccucaucaacgaccagcucaucaugaagaaccaccuccgcgacaucaugugcauccccuacugcaacuacuccaaguacugguaccucaaccacaccgucaccggcaagaccucccucccccgcugcuggcucgucuccaacggcuccuaccucaacgagacccacuucuccgacgacaucgagcagcaggccgacaacaugaucaccgagcuccuccagaaggaguacaucgaccgccagggcaagaccccccucggccucgucgaccucuucgucuucuccaccuccuucuaccucaucuccaucuuccuccaccucgucaagauccccacccaccgccacaucaccggcaagcccugccccaagccccaccgccucaaccacaugggcaucugcuccugcggccucuacaaccaccccggcguccccgucaaguggaagcgcuga

SEQ ID NO: 4643 - RNA, 1473 nt, Artificial Sequence
  derived and/or modified protein sequence (opt2) from LASV(Lassa virus/H.sapiens-wt/NGA/2016/ISTH_0017;Clade II)__AVO03567__GPCstabilized
augggccagaucaucaccuucuuccaggaggucccccacgucaucgaggaggucaugaacaucguccucaucgcccucucccuccucgccauccucaagggcaucuacaacgucgccaccugcggccucuucggccucgucuccuuccuccuccucugcggccgcuccugcuccaccaccuacaagggcgucuacgagcuccagacccucgagcucgacauggccucccucaacaugaccaugccccucuccugcaccaagaacaacucccaccacuacaucauggucggcaacgagaccggccucgagcucacccucaccaacaccuccaucaucaaccacaaguucugcaaccucuccgacgcccacaagaagaaccucuacgaccacgcccucauguccaucaucuccaccuuccaccucuccauccccaacuucaaccaguacgaggccauguccugcgacuucaacggcggcaagaucuccguccaguacaaccucucccacaccuacgccaucgacgccgccaaccacugcggcaccaucgccaacggcguccuccagaccuucaugcgcauggccuggggcggcuccuacaucgcccucgacuccggcugcggcuccugggacugcaucaugaccuccuaccaguaccucaucauccagaacaccaccugggaggaccacugccaguucucccgccccucccccaucggcuaccucggccuccucucccagcgcacccgcgacaucuacaucucccgccgccgccggggcaccuucaccuggacccucuccgacuccgagggcaacgagacccccggcggcuacugccucacccgcuggaugcucaucgaggccgagcucaagugcuucggcaacaccgccgucgccaagugcaacgagaagcacgacgaggaguucugcgacaugcuccgccucuucgacuucaacaagcaggccauccgccgccucaagacccccgcccagauguccauccagcucaucaacaaggccgucaacgcccucaucaacgaccagcucaucaugaagaaccaccuccgcgacaucaugugcauccccuacugcaacuacuccaaguacugguaccucaaccacaccgucaccggcaagaccucccucccccgcugcuggcucgucuccaacggcuccuaccucaacgagacccacuucuccgacgacaucgagcagcaggccgacaacaugaucaccgagcuccuccagaaggaguacauggaccgccagggcaagaccccccucggccucgucgaccucuucgucuucuccaccuccuucuaccucaucuccaucuuccuccaccucguccgcauccccacccaccgccacgucaucggcaagcccugccccaagccccaccgccucaaccacaugggcaucugcuccugcggccucuacaagcaccccggcguccccgucaaguggaagcgcuga

SEQ ID NO: 4644 - RNA, 1473 nt, Artificial Sequence
  derived and/or modified protein sequence (opt2) from LASV(Lassa virus/H.sapiens-wt/NGA/2016/ISTH_0035;Clade II)__AVO03619__GPCstabilized
augggccagaucaucaccuucuuccaggaggucccccacgucaucgaggaggucaugaacaucguccucaucgcccucucccuccucgccauccucaagggcaucuacaacgucgccaccugcggccucuucggccucgucuccuuccuccuccucugcggccgcuccugcuccaugaccuacaagggcgucuacgagcuccagacccucgagcucgacauggccucccucaacaugaccaugccccucuccugcaccaagaacaacucccaccacuacaucauggucggcaacgagaccggccucgagcucacccucaccaacaccuccaucaucaaccacaaguucugcaaccucuccgacgcccacaagaagaaccucuacgaccacgcccucauguccaucaucuccaccuuccaccucuccauccccaacuucaaccaguacgaggccauguccugcgacuucaacggcggcaagaucuccguccaguacaaccucucccacaccuacgccgucgacgccgccaaccacugcggcaccaucgccaacggcguccuccagaccuucaugcgcauggccuggggcggcuccuacaucgcccucgacuccggcugcggcuccugggacugcaucaugaccuccuaccaguaccucaucauccagaacaccaccugggaggaccacugccaguucucccgccccucccccaucggcuaccucggccuccucucccagcgcacccgcgacaucuacaucucccgccgccgccggggcaccuucaccuggacccucuccgacuccgagggcaacgagacccccggcggcuacugccucacccgcuggaugcucaucgaggccgagcucaagugcuucggcaacaccgccgucgccaagugcaacgagaagcacgacgaggaguucugcgacaugcuccgccucuucgacuucaacaagcaggccauccgccgccucaagacccccgcccagauguccauccagcucaucaacaaggccgucaacgcccucaucaacgaccagcucaucaugaagaaccaccuccgcgacaucaugugcauccccuacugcaacuacuccaaguacugguaccucaaccacaccaucaccggcaagaccucccucccccgcugcuggcucgucuccaacggcuccuaccucaacgagacccacuucuccgacgacaucgagcagcaggccgacaacaugaucaccgagcuccuccagaaggaguacauggaccgccagggcaagaccccccucggccucgucgaccucuucgucuucuccaccuccuucuaccucaucuccaucuuccuccaccucgucaagauccccacccaccgccacgucaucggcaagcccugccccaagccccaccgccucaaccacaugggcaucugcuccugcggccucuacaagcaccccggcguccccgucaaguggaagcgcuga

SEQ ID NO: 4645 - RNA, 1473 nt, Artificial Sequence
  derived and/or modified protein sequence (opt2) from LASV(Lassa virus/H.sapiens-wt/NGA/2016/ISTH_0104;Clade II)__AVO03631__GPCstabilized
augggccaggucaucaccuucuuccaggaggucccccacgucaucgaggaggucaugaacaucguccucaucgcccucucccuccucgccauccucaagggcaucuacaacgucgccaccugcggccucuucggccucaucuccuuccuccuccucugcggccgcuccugcuccaccaccuacaagggcgucuacgagcuccagacccucgagcucaacaugcagaaccucaacaugaccaugccccucuccugcaccaagaacuccucccaccacuacaucauggucggcaacgagaccggccucgagcucacccucaccaacaccuccaucaucaaccacaaguucugcaaccucuccgacgcccacaagaagaaccucuacgaccacgcccucauguccaucaucuccaccuuccaccucuccauccccaacuucaaccaguacgaggccauguccugcgacuucaacggcggcaagaucuccguccaguacaaccucucccacaccuacgccaucgacgccgccaaccacugcggcaccgucgccaacggcguccuccagaccuucaugcgcauggccuggggcggcuccuacaucgcccucgacuccggcugcggcaacugggacugcaucaugaccuccuaccaguaccucaucauccagaacaccaccugggaggaccacugccaguucucccgccccucccccaucggcuaccucggccuccucucccagcgcacccgcgacaucuacaucucccgccgccgccggggcaccuucaccuggacccucuccgacuccgagggcaacgaggcccccggcggcuacugccucacccgcuggaugcucaucgaggccgagcucaagugcuucggcaacaccgccgucgccaagugcaacgagaagcacgacgaggaguucugcgacaugcuccgccucuucgacuucaacaagcaggccaucaagcgccucaagacccccgcccagauguccauccagcucaucaacaaggccgucaacgcccucaucaacgaccagcucaucaugaagaaccaccuccgcgacaucaugugcauccccuacugcaacuacuccaaguacugguaccucaaccacaccgucaccggccgcaccucccucccccgcugcuggcucgucuccaacggcuccuaccucaacgacacccaguucuccgacgacaucgagcagcaggccgacaacaugaucaccgagaugcuccagaaggaguacauggaccgccagggcaagaccccccucggccucgucgaccucuucgucuucuccaccuccuucuaccucaucuccaucuuccuccaccucgucaagauccccacccaccgccacaucgucggccgccccugccccaagccccaccgccucaaccacaugggcaucugcuccugcggccucuacaagcaccccggcguccccgucaaguggaagcgcuga

SEQ ID NO: 4646 - RNA, 1476 nt, Artificial Sequence
  derived and/or modified protein sequence (opt2) from LASV(Lassa virus/H.sapiens-wt/NGA/2016/ISTH_0133;Clade II)__AVO03635__GPCstabilized
augggccagaucaucaccuucuuccaggaggucccccacgucaucgaggaggucaugaacaucguccucaucgcccucucccuccucgccguccucaaggccaucuacaacgucgccaccugcggcgucuucggccucaucuccuuccuccuccucugcggccgcuccugcuccaccaccuacaagggcgucuacgagcuccagacccucgagcucgacauggccaaccucaacaugaccaugccccucuccugcaccaagaacaacucccaccacuacaucauggucggcaacgagaccggccucgagcucacccucaccaacaccuccaucaucaaccacaaguucugcaaccucuccgacgcccacaagaagaaccucuacgaccacucccucauguccaucaucuccaccuuccaccucuccauccccaacuucaaccaguacgaggccauguccugcgacuucaacggcggcaagaucuccguccaguacaaccucucccacuccuacgccgucgacgccgccaagcacugcggcaccaucgccaacggcguccuccagaccuucaugcgcauggccuggggcggcuccuacaucgcccucgacuccggcaagugcggcugggacugcaucaugaccuccuaccaguaccucaucauccagaacaccaccugggaggaccacugccaguucucccgccccucccccaucggcuaccucggccuccucucccagcgcacccgcgacaucuacaucucccgccgccuccgccggaccuucaccuggacccucuccgacuccgagggcaacgacgcccccggcggcuacugccucacccgcuggaugcucaucgaggccgagcucaagugcuucggcaacaccgccaucgccaagugcaacgagaagcacgacgaggaguucugcgacaugcuccgccucuucgacuucaaccgccaggccaucaagcgccucaagaccgagccccagauguccauccagcucaucaacaaggccgucaacgcccucaucaacgaccagcucaucaugaagaaccaccuccgcgacaucaugggcugccccuacugcaacuacuccaaguacugguaccucaaccacaccaucaccggcaagaccucccucccccgcugcuggcucgucuccaacggcuccuaccucaacgagacccacuucuccgacgacaucgagcagcaggccgacaacaugaucaccgagcuccuccagaaggaguacauggaccgccagggcaagaccccccucggccucgucgaccucuucgucuucuccaccuccuucuaccucaucuccaucuuccuccaccucgucaagauccccacccaccgccacaucgucggcaagcccugccccaagccccaccgccucaaccacaugggcaucugcuccugcggccucuacaagcaccccggcguccccgucaaguggaagcgccaguga

SEQ ID NO: 4647 - RNA, 1473 nt, Artificial Sequence
  derived and/or modified protein sequence (opt2) from LASV(Lassa virus/H.sapiens-wt/NGA/2016/ISTH_0141;Clade II)__AVO03649__GPCstabilized
augggccagaucaucaccuucuuccaggaggucccccacgucaucgaggaggucaugaacaucguccucaucacccucucccuccucgccauccucaagggcaucuacaacgucgccaccugcggccucuucggccucgucuccuuccuccuccucugcggccgcuccugcuccaccaucuacaagggcgucuacgagcuccagacccucgagcucgacauggccucccucaacaugaccaugccccucuccugcaccaagaacaacucccaccacuacaucauggucggcaacgagaccggccucgagcucacccucaccaacaccuccaucaucaaccacaaguucugcaaccucuccgacgcccacaagaagaaccucuacgaccacgcccucauguccaucaucuccaccuuccaccucuccauccccaacuucaaccaguacgaggccauguccugcgacuucaacggcggcaagaucuccguccaguacaaccucucccacaccuacgccgucgacgccgccgagcacugcggcaccaucgccaacggcguccuccagaccuucaugcgcauggccuggggcggcuccuacaucgcccucgacuccggcugcggcuccugggacugcaucaugaccuccuaccaguaccucaucauccagaacaccaccugggaggaccacugccaguucucccgccccucccccaucggcuaccucggccuccucucccagcgcacccgcgacaucuacaucucccgccgccgccggggcaccuucaccuggacccucuccgacuccgagggcaacgagacccccggcggcuacugccucacccgcuggaugcucaucgaggccgagcucaagugcuucggcaacaccgccgucgccaagugcaacgagaagcacgacgaggaguucugcgacaugcuccgccucuucgacuucaacaagcaggccauccgccgccucaagacccccgcccagauguccauccagcucaucaacaaggccgucaacgcccucaucaacgaccagcucaucaugaagaaccaccuccgcgacaucaugugcauccccuacugcaacuacuccaaguacugguaccucaaccacaccgucaccggcaagaccucccucccccgcugcuggcucgucuccaacggcuccuaccucaacgagacccgcuucuccgacgacaucgagcagcaggccgacaacaugaucaccgagcuccuccagaaggaguacaucgaccgccagggcaagaccccccucggccucgucgaccucuucgucuucuccaccuccuucuaccucaucuccaucuuccuccaccucgucaagauccccacccaccgccacaucaucggcaagcccugccccaagccccaccgccucaaccacaugggcaucugcuccugcggccucuacaagcaccccggcauccccgucaaguggaagcgcuga

SEQ ID NO: 4648 - RNA, 1473 nt, Artificial Sequence
  derived and/or modified protein sequence (opt2) from LASV(Lassa virus/H.sapiens-wt/NGA/2016/ISTH_0146;Clade II)__AVO03633__GPCstabilized
augggccagaucaucaccuucuuccaggaggucccccacgucaucgaggaggucaugaacaucguccucaucgcccucucccuccucgccauccucaagggcaucuacaacgucgccaccugcggccucuucggccucgucuccuuccuccuccucugcggccgcuccugcuccaccaccuacaagggcgucuacgagcuccagacccucgagcucgacauggccucccucaacaugaccaugccccucuccugcaccaagaacaacucccaccacuacaucauggucggcaacgagaccggccucgagcucacccucaccaacaccuccaucaucaaccacaaguucugcaaccucuccgacgcccacaagaagaaccucuacgaccacgcccucauguccaucaucuccaccuuccaccucuccauccccaacuucaaccaguacgaggccauguccugcgacuucaacggcggcaagaucuccguccaguacaaccucucccacaccuacgccgucgacgccgccaaccacugcggcaccaucgccaacggcguccuccagaccuucaugcgcauggccuggggcggcuccuacaucgcccucgacuccggcugcggcuccugggacugcaucaugaccuccuaccaguaccucaucauccagaacaccaccugggaggaccacugccaguucucccgccccucccccaucggcuaccucggccuccucucccagcgcacccgcgacaucuacaucucccgccgccgccggggcaccuucaccuggacccucuccgacuccgagggcaacgagacccccggcggcuacugccucacccgcuggaugcucaucgaggccgagcucaagugcuucggcaacaccgccgucgccaagugcaacgagaagcacgacgaggaguucugcgacaugcuccgccucuucgacuucaacaagcaggccauccgccgccucaagacccccgcccagauguccauccagcucaucaacaaggccgucaacgcccucaucaacgaccagcucaucaugaagaaccaccuccgcgacaucaugugcauccccuacugcaacuacuccaaguacugguaccucaaccacaccgucaccggcaagaccucccucccccgcugcuggcucgucuccaacggcuccuaccucaacgagacccacuucuccgacgacaucgagcagcaggccgacaacaugaucaccgagcuccuccagaaggaguacauggaccgccagggcaagaccccccucggccucgucgaccucuucgucuucuccaccuccuucuaccucaucuccaucuuccuccaccucgucaagauccccacccaccgccacgucaucggcaagcccugccccaagccccaccgccucaaccacaugggcaucugcuccugcggccucuacaagcaccccggcguccccgucaaguggaagcgcuga

SEQ ID NO: 4649 - RNA, 1473 nt, Artificial Sequence
  derived and/or modified protein sequence (opt2) from LASV(Lassa virus/H.sapiens-wt/NGA/2016/ISTH_0187;Clade II)__AVO03549__GPCstabilized
augggccagaucgucaccuucuuccaggaggucccccacgucaucgaggaggucaugaacaucguccucaucgcccucuccguccucgccauccucaagggccucuacaacuucgccaccugcggccucaucggccucgucaccuuccuccuccucuccggccgcuccugcuccauggucuacaagggcgucuacgagcuccagacccucgagcucaacauggagacccucaacaugaccaugccccucuccugcaccaagaacaacucccaccacuacauccgcgucggcaacgacaccggccucgagcucacccucaccaacaacacccuccucaaccacaaguucugcaaccucuccgacgcccacaagaagaaccucuacgaccacgcccucauguccaucaucuccaccuuccaccucuccauccccaacuucaaccaguacgaggccauguccugcgacuucaacggcggccgcaucaccguccaguacaaccucucccacuccuacgccgucgacgccgccaaccacugcggcaccgucgccaacggcguccuccagaccuucaugcgcauggccuggggcggcuccuacaucgcccucgacucccgcugcggcaacugggacugcaucaugaccuccuaccaguaccucaucauccagaacaccaccugggaggaccacugccaguucucccgccccucccccaucggcuaccucggccuccucucccagcgcacccgcgacaucuacaucucccgccgccgccggggcaccuucaccuggacccucuccgacuccgagggcaacgagacccccggcggcuacugccucacccgcuggaugcucaucgaggccgagcucaagugcuucggcaacaccgccgucgccaagugcaacgagaagcacgacgaggaguucugcgacaugcuccgccucuucgacuucaacaagcaggccauccgccgccucaaggcccccgcccagauguccauccagcucaucaacaaggccgucaacgcccucaucaacgaccagcucaucaugaagaaccaccuccgcgacaucaugugcauccccuacugcaacuacuccaaguacugguaccucaaccacaccuccaccggcaagaccucccucccccgcugcuggcucgucuccaacggcuccuaccucaacgagacccacuucuccgacgacaucgagcagcaggccgacaacaugaucaccgagaugcuccagaaggaguaccucgaccgccagggcaagaccccccucggccucgucgacaucuucgucuucuccaccuccuucuaccucaucuccaucuuccuccaccucaucaagauccccacccaccgccacaucgucggcaagcccugccccaagccccaccgccucaaccacaugggcaucugcuccugcggccucuacaagcagcccggcguccccguccgcuggaagcgcuga

SEQ ID NO: 4650 - RNA, 1473 nt, Artificial Sequence
  derived and/or modified protein sequence (opt2) from LASV(Lassa virus/H.sapiens-wt/NGA/2016/ISTH_0199;Clade II)__AVO03653__GPCstabilized
augggccagaucaucaccuucuuccaggaggucccccacgucaucgaggaggucaugaacaucguccucaucgcccucucccuccucgccauccucaagggcaucuacaacgucgccaccugcggccucuucggccucgucuccuuccuccuccucugcggccgcuccugcuccaccaccuacaagggcgucuacgagcuccagacccucgagcucgacauggccucccucaacaugaccaugccccucuccugcaccaagaacaacucccaccacuacaucauggucggcaacgagaccggccucgagcucacccucaccaacaccuccaucaucaaccacaaguucugcaaccucuccgacgcccacaagaagaaccucuacgaccacgcccucauguccaucaucuccaccuuccaccucuccauccccaacuucaaccaguacgaggccauguccugcgacuucaacggcggcaagaucuccguccaguacaaccucucccacaccuacgccgucgacgccgccaaccacugcggcaccaucgccaacggcguccuccagaccuucaugcgcauggccuggggcggcuccuacaucgcccucgacuccggcugcggcaacugggacugcaucaugaccuccuaccaguaccucaucauccagaacaccaccugggaggaccacugccaguucucccgccccucccccaucggcuaccucggccuccucucccagcgcacccgcgacaucuacaucucccgccgccgccggggcaccuucaccuggacccucuccgacuccgagggcaacgagacccccggcggcuacugccucacccgcuggaugcucaucgaggccgagcucaagugcuucggcaacaccgccgucgccaagugcaacgagaagcacgacgaggaguucugcgacaugcuccgccucuucgacuucaacaagcaggccaucucccgccucaagacccccgcccagauguccauccagcucaucaacaaggccgucaacgcccucaucaacgaccagcucaucaugaagaaccaccuccgcgacaucaugugcauccccuacugcaacuacuccaaguacugguaccucaaccacaccgucaccggcaagaccucccucccccgcugcuggcucgucuccaacggcuccuaccucaacgagacccacuucuccgacgacaucgagcagcaggccgacaacaugaucaccgagaugcuccagaaggaguacaucgaccgccagggcaagaccccccucggccucgucgaccucuucgucuucuccaccuccuucuaccucaucuccaucuuccuccaccucgucaagauccccacccaccgccacgucaucggcaagcccugccccaagccccaccgccucaaccacaugggcaucugcuccugcggccucuacaagcaccccggcguccccgucaaguggaagcgcuga

SEQ ID NO: 4651 - RNA, 1473 nt, Artificial Sequence
  derived and/or modified protein sequence (opt2) from LASV(Lassa virus/H.sapiens-wt/NGA/2016/ISTH_0419;Clade II)__AVO03539__GPCstabilized
augggccagaucgucaccuucuuccaggaggucccccacgucaucgaggaggucaugaacaucguccucaucgcccucucccuccucgccauccucaagggcaucuacaacuucgccaccugcggccucaucggccucaucaccuuccucuuccucugcggccgcuccugcuccgccaucuacaagggcuccuaccagcuccagaccaucgagcucaacauggagacccucaacaugaccaugccccucuccugcaccaagaacuccucccaccacuacauccgcgucggcaacgagaccggccucgagcucacccucaccaacaucuccaucaucgaccacaaguucugcaaccucuccgacgcccacaagaagaaccucuacgaccacgcccucauguccaucaucuccaccuuccaccucuccauccccaacuucaaccaguacgaggccauguccugcgacuucaacggcggcaagaucuccguccaguacaaccucucccacaccuacgccgucgacgccgccaaccacugcggcaccgucgccaacggcguccuccagaccuucaugcgcauggccuggggcggcuccuacaucgcccucgacuccggcugcggcaacugggacugcaucaugaccuccuaccaguaccucaucauccagaacaccaccugggaggaccacugccaguucucccgccccucccccaucggcuaccucggccuccucucccagcgcacccgcgacaucuacaucucccgccgccgccggggcaccuucaccuggacccucuccgacuccgagggcaaggagacccccggcggcuacugccucacccgcuggaugcucaucgaggccgagcucaagugcuucggcaacaccgccgucgccaagugcaacgagaagcacgacgaggaguucugcgacaugcuccgccucuucgacuucaacaagcaggccauccagcgccucaaggcccccgcccagauguccauccagcucaucaacaaggccgucaacgcccucaucaacgaccagcucaucaugaagaaccaccuccgcgacaucaugugcauccccuacugcaacuacuccaaguacugguaccucaaccacaccuccaccggccgcaccucccucccccgcugcuggcucgucuccaacggcuccuaccucaacgagacccacuucuccgacgacaucgagcagcaggccgacaacaugaucaccgagaugcuccagaaggaguacaucgaccgccagggcaagaccccccucggccucgucgaccucuucgucuucuccaccuccuucuaccucaucuccaucuuccuccaccucaucaagauccccacccaccgccacaucgucggcaaguccugccccaagccccaccgccucaaccacaugggcaucugcuccugcggccucuacaagcagcccggcguccccgucaaguggaagcgcuga

SEQ ID NO: 4652 - RNA, 1473 nt, Artificial Sequence
  derived and/or modified protein sequence (opt2) from LASV(Lassa virus/H.sapiens-wt/NGA/2016/ISTH_0447;Clade II)__AVO03559__GPCstabilized
augggccagaucaucaccuucuuccaggaggucccccacgucaucgaggaggucaugaacaucguccucaucgcccucucccuccucgccauccucaagggcaucuacaacaucgccaccugcggccucuucggccucgucuccuuccuccuccucugcggccgcuccugcuccaccaccuacaagggcgucuacgagcuccagacccucgagcucgacauggccucccucaacaugaccaugccccucuccugcaccaagaacaacucccaccacuacaucauggucggcaacgagaccggccucgagcucacccucaccaacaccuccaucaucaaccacaaguucugcaaccucuccgacgcccacaagaagaaccucuacgaccacacccucauguccaucaucuccaccuuccaccucuccauccccaacuucaaccaguacgaggccauguccugcgacuucaacggcggcaagaucuccguccaguacaaccucucccacgccuacgccgucgacgccgccaaccacugcggcaccaucgccaacggcguccuccagaccuucaugcgcauggccuggggcggcuccuacaucgcccucgacuccggcugcggcaacugggacugcaucaugaccuccuaccaguaccucaucauccagaacaccaccugggaggaccacugccaguucucccgccccucccccaucggcuaccucggccuccucucccagcgcacccgcgacaucuacaucucccgccgccgccggggcaccuucaccuggacccucuccgacuccgagggcaacgagacccccggcggcuacugccucacccgcuggaugcucaucgaggccgagcucaagugcuucggcaacaccgccgucgccaagugcaacgagaagcacgacgaggaguucugcgacaugcuccgccucuucgacuucaacaagcaggccauccgccgccucaagacccccgcccagauguccauccagcucaucaacaaggccgucaacgcccucaucaacgaccagcucaucaugaagaaccaccuccgcgacaucaugugcauccccuacugcaacuacuccaaguacugguaccucaaccacaccgucaccggcaagaccucccucccccgcugcuggcucgucuccaacggcuccuaccucaacgagacccacuucuccgacgacaucgagcagcaggccgacaacaugaucaccgagcuccuccagaaggaguacaucgaccgccagggcaagaccccccucggccucgucgaccucuucgucuucuccaccuccuucuaccucaucuccaucuuccuccaccucgucaagauccccacccaccgccacgucgucggcaagcccugccccaagccccaccgccucaaccacaugggcaucugcuccugcggccucuacaagcaccccggcguccccgucaaguggaagcgcuga

SEQ ID NO: 4653 - RNA, 1473 nt, Artificial Sequence
  derived and/or modified protein sequence (opt2) from LASV(Lassa virus/H.sapiens-wt/NGA/2016/ISTH_0543;Clade II)__AVO03595__GPCstabilized
augggccagaucaucaccuucuuccaggaggucccccacgucaucgaggaggucaugaacaucguccucaucgcccucucccuccucgccauccucaagggcaucuacaacaucgccaccugcggccucuucggccucaucuccuuccuccuccucugcggccgcuccugcuccaccaccuacaagggcgucuacgagcuccagacccucgagcucgacauggccaaccucaacaugaccaugccccucuccugcaccaagaacaacucccaccacuacaucauggucggcaacgagaccggccucgagcucacccucaccaacaccuccaucaucaaccacaaguucugcaaccucuccgacgcccacaagaagaaccucuacgaccacgcccucauguccaucaucuccaccuuccaccucuccauccccaacuucaaccaguacgaggccauguccugcgacuucaacggcggcaagaucuccguccaguacaaccucucccacuccuacgccgucgacgccgccggccacugcggcaccaucgccaacggcguccuccagaccuucaugcgcauggccuggggcggcuccuacaucgcccucgacuccggcugcggcaacugggacugcaucaugaccuccuaccaguaccucgucauccagaacaccaccugggaggaccacugccaguucucccgccccucccccaucggcuaccucggccuccucucccagcgcacccgcgacaucuacaucucccgccgccgccggggcaccuucaccuggacccucuccgacuccgagggcaacgaggcccccggcggcuacugccucacccgcuggaugcucaucgaggccgagcucaagugcuucggcaacaccgccaucgccaagugcaacgagaagcacgacgaggaguucugcgacaugcuccgccucuucgacuucaacaagcaggccauccgccgccucaaggcccccgcccagauguccauccagcucaucaacaaggccgucaacgcccucaucaacgaccagcucaucaugaagaaccaccuccgcgacaucaugugcauccccuacugcaacuacuccaaguacugguaccucaaccacaccgucaccggcaagaccucccuccccaagugcuggcucgucuccaacggcuccuaccucaacgagacccacuucuccgacgacaucgagcagcaggccgacaacaugaucaccgagcuccuccagaaggaguacauggaccgccagggcaagaccccccucggccucgucgaccucuucgucuucuccaccuccuucuaccucaucuccaucuuccuccaccucgucaagauccccacccaccgccacaucgucggccgccccugccccaagccccaccgccucaaccacaugggcaucugcuccugcggccucuacaagcaccccggcguccccgucaaguggaagcgcuga

SEQ ID NO: 4654 - RNA, 1473 nt, Artificial Sequence
  derived and/or modified protein sequence (opt2) from LASV(Lassa virus/H.sapiens-wt/NGA/2016/ISTH_0565;Clade II)__AVO03637__GPCstabilized
augggccagaucgucaccuucuuccaggaggucccccacgucaucgaggaggucaugaacaucguccucaucgcccucucccuccucgccauccucaagggcaucuacaacgucgccaccugcggccucuucggccucaucuccuuccuccuccucugcggccgcuccugcuccaccaccuacaagggcgucuacgagcuccagacccucgagcucgacauggccaaccucaacaugaccaugccccucuccugcaccaagaacuccucccaccacuacaucauggucggcaacgagaccggccucgagcucacccucaccaacaccuccaucaucaaccacaaguucugcaaccucuccgacgcccacaagaagaaccucuacgaccacgcccucauguccaucaucuccaccuuccaccucuccauccccaacuucaaccaguacgaggccauguccugcgacuucaacggcggcaagaucuccguccaguacaaccucucccacaccuacgccgucgacgccgccaaccacugcggcaccaucgccaacggcguccuccagaccuucaugcgcauggccuggggcggcuccuacaucgcccucgacuccggcugcggcaacugggacugcaucaugaccuccuaccaguaccucaucauccagaacaccaccugggaggaccacugccaguucucccgccccucccccaucggcuaccucggccuccucucccagcgcacccgcgacaucuacaucucccgccgccgccggggcaccuucaccuggacccucuccgacuccgagggcaacgaggcccccggcggcuacugccucacccgcuggaugcucaucgaggccgagcucaagugcuucggcaacaccgccaucgccaagugcaacgagaagcacgacgaggaguucugcgacaugcuccgccucuucgacuucaacaagcaggccaucaagcgccucaagucccccgcccagauguccauccagcucaucaacaaggccgucaacgcccucaucaacgaccagcucaucaugaagaaccaccuccgcgacaucaugugcauccccuacugcaacuacucccgcuacugguaccucaaccacaccgucaccggcaagaccucccucccccgcugcuggcucaucuccaacggcuccuaccucaacgagacccacuucuccgacgacaucgagcagcaggccgacaacaugaucaccgagcuccuccagaaggaguacauggaccgccagggcaagaccccccucggccucgucgaccucuucgucuucuccaccuccuucuaccucaucuccaucuuccuccaccucgucaagauccccacccaccgccacaucgucggccgccccugccccaagccccaccgccucaaccacaugggcaucugcuccugcggccucuacaagcaccccggcguccccgucaaguggaagcgcuga

SEQ ID NO: 4655 - RNA, 1473 nt, Artificial Sequence
  derived and/or modified protein sequence (opt2) from LASV(Lassa virus/H.sapiens-wt/NGA/2016/ISTH_0572;Clade II)__AVO03611__GPCstabilized
augggccagaucaucaccuucuuccaggaggucccccacgucaucgaggaggucaugaacaucguccucaucgcccucucccuccucgccauccucaagggcaucuacaacgucgccaccugcggccucuucggccucgucgccuuccuccuccucugcggccgcuccugcuccaccaccuacaagggcgucuacgagcuccagacccucgagcucgacauggccucccucaacaugaccaugccccucuccugcaccaagaacaacucccaccacuacaucauggucggcaacgagaccggccucgagcucacccucaccaacaccuccaucaucaaccacaaguucugcaaccucuccgacgcccacaagaagaaccucuacgaccacgcccucauguccaucaucuccaccuuccaccucuccauccccaacuucaaccagcacgaggccauguccugcgacuucaacggcggcaagaucuccguccaguacaaccucucccacaccuacgccgucgacgccgccaaccacugcggcaccaucgccaacggcguccuccagaccuucaugcgcauggccuggggcggcuccuacaucgcccucgacuccggcugcggcuccugggacugcaucaugaccuccuaccaguaccucaucauccagaacaccaccugggaggaccacugccaguucucccgccccucccccaucggcuaccucggccuccucucccagcgcacccgcgacaucuacaucucccgccgccgccggggcaccuucaccuggacccucuccgacuccgagggcaacgagacccccggcggcuacugccucacccgcuggaugcucaucgaggccgagcucaagugcuucggcaacaccgccgucgccaagugcaacgagaagcacgacgaggaguucugcgacaugcuccgccucuucgacuucaacaagcaggccauccgccgccucaagacccccgcccagauguccauccagcucaucaacaaggccgucaacgcccucaucaacgaccagcucaucaugaagaaccaccuccgcgacaucaugugcauccccuacugcaacuacuccaaguacugguaccucaaccacaccgucaccggccgcaccucccucccccgcugcuggcucgucuccaacggcuccuaccucaacgagacccacuucuccgacgacaucgagcagcaggccgacaacaugaucaccgagcuccuccagaaggaguacauggaccgccagggcaagaccccccucggccucgucgaccucuucgucuucuccaccuccuucuaccucaucuccaucuuccuccaccucaucaagauccccacccaccgccacgucaucggcaagcccugccccaagccccaccgccucaaccacaugggcaucugcuccugcggccucuacaagcaccccggcguccccgucaaguggaagcgcuga

SEQ ID NO: 4656 - RNA, 1473 nt, Artificial Sequence
  derived and/or modified protein sequence (opt2) from LASV(Lassa virus/H.sapiens-wt/NGA/2016/ISTH_0610;Clade II)__AVO03585__GPCstabilized
augggccagaucaucaccuucuuccaggaggucccccacgucaucgaggaggucaugaacaucguccucaucgcccucucccuccucgccauccucaagggcgucuacaacgucgccaccugcggccucuucggccucgucuccuuccuccuccucugcggccgcuccugcuccaccaccuacaagggcgucuacgagcuccagacccucgagcucgacauggccucccucaacaugaccaugccccucuccugcaccaagaacaacucccaccacuacaucauggucggcaacgagaccggccucgagcucacccucaccaacaccuccaucaucaaccacaaguucugcaaccucuccgacgcccacaagaagaaccucuacgaccacgcccucauguccaucaucuccaccuuccaccucuccauccccaacuucaaccaguacgaggccauguccugcgacuucaacggcggcaagaucuccguccaguacaaccucucccacaccuacgccgucgacgccgccaaccacugcggcaccaucgccaacggcguccuccagaccuucaugcgcauggccuggggcggcuccuacaucgcccucgacuccggcugcggcuccugggacugcaucaugaccuccuaccaguaccucaucauccagaacaccaccugggaggaccacugccaguucucccgccccucccccaucggcuaccucggccuccucucccagcgcacccgcgacaucuacaucucccgccgccgccggggcaccuucaccuggacccucuccgacuccgagggcaacgagacccccggcggcuacugccucacccgcuggaugcucaucgaggccgagcucaagugcuucggcaacaccgccgucgccaagugcaacgagaagcacgacgaggaguucugcgacaugcuccgccucuucgacuucaacaagcaggccauccgccgccucaaggcccccgcccagauguccauccagcucaucaacaaggccgucaacgcccucaucaacgaccagcucaucaugaagaaccaccuccgcgacaucaugugcauccccuacugcaacuacuccaaguacugguaccucaaccacaccgucaccggccgcaccucccucccccgcugcuggcucgucuccaacggcuccuaccucaacgagacccacuucuccgacgacaucgagcagcaggccgacaacaugaucaccgagcuccuccagaaggaguacaucgaccgccagggcaagaccccccucggccucgucgaccucuucgucuucuccaccuccuucuaccucaucuccaucuuccuccaccucgucaagauccccacccaccgccacaucaucggcaagcccugccccaagccccaccgccucaaccacaugggcaucugcuccugcggccucuacaagcaccccggcguccccgucaaguggaagcgcuga

SEQ ID NO: 4657 - RNA, 1473 nt, Artificial Sequence
  derived and/or modified protein sequence (opt2) from LASV(Lassa virus/H.sapiens-wt/NGA/2016/ISTH_0621;Clade II)__AVO03543__GPCstabilized
augggccagaucgucaccuucuuccaggagaucccccacgucgucgaggagaucaugaacaucguccucaucacccucucccuccucgccauccucaagggccucuacaacuucgccaccugcggccucaucggccucaucaccuuccucuuccucugcggccgcuccugcuccaccaucuacaagggcuccuaccagcuccaggcccucgagcucaacauggagacccucaacaugaccaugccccucuccugcaccaagaacaacucccaccacuacauccgcgucggcaacgagaccggccucgagcucacccucaccaacaccuccaucaucgaccacaaguucugcaaccucuccgacgcccacaagcgcaaccucuacgaccacacccucauguccaucaucuccaccuuccaccucuccauccccaacuucaaccaguacgaggccauguccugcgacuucaacggcggcaagaucuccguccaguacaaccucucccacuccuacgccggcgacgccgcccgccacugcggcaccgucgccaacggcguccuccagaccuucaugcgcauggccuggggcggcuccuacaucgcccucgacuccggcugcggcaacugggacugcaucaugaccuccuaccaguaccucaucauccagaacaccaccugggagaaccacugccaguucucccgccccucccccaucggcuaccucggccuccucucccagcgcacccgcgacaucuacaucucccgccgccgccggggcaccuucaccuggacccucuccgacuccgagggcaaggagacccccggcggcuacugccucacccgcuggaugcucaucgaggccgagcucaagugcuucggcaacaccgccgucgccaagugcaacgagaagcacgacgaggaguucugcgacaugcuccgccucuucgacuucaacaagcaggccauccagcgccucaagacccccgcccagauguccauccagcucaucaacaaggccgucaacgcccucaucaacgaccagcucaucaugaagaaccaccuccgcgacaucaugugcauccccuacugcaacuacuccaaguacugguaccucaaccacaccaccaccggcaagaccucccuccccaagugcuggcucgucuccaacggcuccuaccucaacgagacccacuucuccgacgacaucgagcagcaggccgacaacaugaucaccgagaugcuccagaaggaguacaucgaccgccagggcaagaccccccucggccucgucgaccucuucgucuucuccaccuccuucuaccucaucuccaucuuccuccaccucaucaagauccccacccaccgccacaucgucggcaaguccugccccaagccccaccgccucaaccacaugggcaucugcuccugcggccucuacaagcagcccggcguccucgucaaguggaagcgcuga

SEQ ID NO: 4658 - RNA, 1473 nt, Artificial Sequence
  derived and/or modified protein sequence (opt2) from LASV(Lassa virus/H.sapiens-wt/NGA/2016/ISTH_0701;Clade II)__AVO03629__GPCstabilized
augggccagaucaucaccuucuuccaggaggucccccacgucaucgaggaggucaugaacaucguccucaucgcccucucccuccucgccauccucaagggcaucuacaacgucgccaccugcggccucuucggccucgucuccuuccuccuccucugcggccgcuccugcuccaccaccuacaagggcgucuacgagcuccagacccucgagcucgacauggccucccucaacaugaccaugccccucuccugcaccaagaacaacucccaccacuacaucauggucggcaacgagaccggccucgagcucacccucaccaacaccuccaucaucggccacaaguucugcaaccucuccgacgcccacaagaagaaccucuacgaccacgcccucauguccaucaucuccaccuuccaccucuccauccccaacuucaaccaguacgaggccauguccugcgacuucaacggcggcaagaucuccguccaguacaaccucucccacgccuacgccgucgacgccgccaaccacugcggcaccaucgccaacggcguccuccagaccuucaugcgcauggccuggggcggcuccuacaucgcccucgacuccggcugcggcuccugggacugcaucaugaccuccuaccaguaccucaucauccagaacaccaccugggaggaccacugccaguucucccgccccucccccaucggcuaccucggccuccucucccagcgcacccgcgacaucuacaucucccgccgccgccggggcaccuucaccuggacccucuccgacuccgagggcaacgagacccccggcggcuacugccucacccgcuggaugcucaucgaggccgagcucaagugcuucggcaacaccgccgucgccaagugcaacgagaagcacgacgaggaguucugcgacaugcuccgccucuucgacuucaacaagcaggccauccgccgccucaagacccccgcccagauguccauccagcucaucaacaaggccgucaacgcccucaucaacgaccagcucaucaugaagaaccaccuccgcgacaucaugugcauccccuacugcaacuacuccaaguacugguaccucaaccacaccgucaccggcaagaccucccucccccgcugcuggcucgucuccaacggcuccuaccucaacgagacccacuucuccgacgacaucgagcagcaggccgacaacaugaucaccgagcuccuccagaaggaguacaucgaccgccagggcaagaccccccucggccucgucgaccucuucgucuucuccaccuccuucuaccucaucuccaucuuccuccaccucgucaagauccccacccaccgccacgucaucggcaagcccugccccaagccccaccgccucaaccacaugggcaucugcuccugcggccucuacaagcaccccggcguccccgucaaguggaagcgcuga

SEQ ID NO: 4659 - RNA, 1473 nt, Artificial Sequence
  derived and/or modified protein sequence (opt2) from LASV(Lassa virus/H.sapiens-wt/NGA/2016/ISTH_0702;Clade II)__AVO03557__GPCstabilized
augggccagaucaucaccuucuuccaggaggucccccacgucaucgaggaggucaugaacaucguccucaucgcccucucccuccucgccguccucaagggcaucuacaacgucgccaccugcggccucuucggccucgucgccuuccuccuccucugcggccgcuccugcuccaccaccuacaagggcgucuacgagcuccagacccucgagcucgacauggccaaccucaacaugaccaugccccucuccugcaccaagaacaacucccaccacuacaucauggucggcaacgagaccggccucgagcucacccucaccaacaccuccaucaucaaccacaaguucugcaaccucuccgacgcccacaagaagaaccucuacgaccacgcccucauguccaucaucuccaccuuccaccucuccauccccaacuucaaccaguacgaggccauguccugcgacuucaacggcggcaagaucuccguccaguacaaccucucccacaccuacgccgucgacgccgccaaccacugcggcaccaucgccaacggcguccuccagaccuucaugcgcauggccuggggcggcuccuacaucgcccucgacuccggcugcggcuccugggacugcaucaugaccuccuaccaguaccucaucauccagaacaccaccugggaggaccacugccaguucucccgccccucccccaucggcuaccucggccuccucucccagcgcacccgcgacaucuacaucucccgccgccgccggggcaccuucaccuggacccucuccgacuccgagggcaacgagacccccggcggcuacugccucacccgcuggaugcucaucgaggccgagcucaagugcuucggcaacaccgccgucgccaagugcaacgagaagcacgacgaggaguucugcgacaugcuccgccucuucgacuucaacaagcaggccauccgccgccucaagacccccgcccagauguccauccagcucaucaacaaggccgucaacgcccucaucaacgaccagcucaucaugaagaaccaccuccgcgacaucaugugcauccccuacugcaacuacuccaaguacugguaccucaaccacaccgucaccggccgcaccucccucccccgcugcuggcucgucuccaacggcuccuaccucaacgagacccacuucuccgacgacaucgagcagcaggccgacaacaugaucaccgagcuccuccagaaggaguacauggaccgccagggcaagaccccccucggccucgucgaccucuucgucuucuccaccuccuucuaccucaucuccaucuuccuccaccucaucaagauccccacccaccgccacgucaucggcaagcccugccccaagccccaccgccucaaccacaugggcaucugcuccugcggccucuacaagcaccccggcguccccgucaaguggaagcgcuga

SEQ ID NO: 4660 - RNA, 1473 nt, Artificial Sequence
  derived and/or modified protein sequence (opt2) from LASV(Lassa virus/H.sapiens-wt/NGA/2016/ISTH_0703;Clade II)__AVO03597__GPCstabilized
augggccagaucaucaccuucuuccaggaggucccccacgucaucgaggaggucaugaacaucguccucaucgcccucucccuccucgccauccucaagggcaucuacaacgucgccaccugcggccucuucggccucgucuccuuccuccuccucugcggccgcuccugcuccaccaccuacaagggcgucuacgagcuccagacccucgagcucgacauggccucccucaacaugaccaugccccucuccugcaccaagaacaacucccaccacuacaucauggucggcaacgagaccggccucgagcucacccucaccaacaccuccaucaucaaccacaaguucugcaaccucuccgacgcccacaagaagaaccucuacgaccacgcccucauguccaucaucuccaccuuccaccucuccauccccaacuucaaccaguacgaggccauguccugcgacuucaacggcggcaagaucuccguccaguacaaccucucccacaccuacgccgucgacgccgccucccacugcggcaccaucgccaacggcguccuccagaccuucaugcgcauggccuggggcggcuccuacaucgcccucgacuccggcugcggcuccugggacugcaucaugaccuccuaccaguaccucaucauccagaacaccaccugggaggaccacugccaguucucccgccccucccccaucggcuaccucggccuccucucccagcgcacccgcgacaucuacaucucccgccgccgccggggcaccuucaccuggacccucuccgacuccgagggcaacgagacccccggcggcuacugccucacccgcuggaugcucaucgaggccgagcucaagugcuucggcaacaccgccgucgccaagugcaacgagaagcacgacgaggaguucugcgacaugcuccgccucuucgacuucaacaagcaggccauccgccgccucaagacccccgcccagauguccauccagcucaucaacaaggccgucaacgcccucaucaacgaccagcucaucaugaagaaccaccuccgcgacaucaugugcauccccuacugcaacuacuccaaguacugguaccucaaccacaccgucaccggccgcaccucccucccccgcugcuggcucgucuccaacggcuccuaccucaacgagacccacuucuccgacgacaucgagcagcaggccgacaacaugaucaccgagcuccuccagaaggaguacaucgagcgccagggcaagaccccccucggccucgucgaccucuucgucuucuccaccuccuucuaccucaucuccaucuuccuccaccucaucaagauccccacccaccgccacgucaucggcaagcccugccccaagccccaccgccucaaccacaugggcaucugcuccugcggccucuacaagcaccccggcguccccgucaaguggaagcgcuga

SEQ ID NO: 4661 - RNA, 1473 nt, Artificial Sequence
  derived and/or modified protein sequence (opt2) from LASV(Lassa virus/H.sapiens-wt/NGA/2016/ISTH_0717;Clade II)__AVO03547__GPCstabilized
augggccagaucgucaccuucuuccaggaggucccccacgucaucgaggaggucaugaacaucguccucaucgcccucuccauccucgccauccucaagggccucuacaacgucgccaccugcggccucaucggccucgucaccuuccuccuccucuccggccgcuccugcuccaugaucuacaagggcgucuacgagcuccagacccucgagcucaacauggagacccucaacaugaccaugccccucuccugcaccaagaacaacucccaccacuacaucauggucggcaacgagaccggccucgagcucacccucaccaacaccucccuccucaaccacaaguucugcaaccucuccgacgcccacaagaagaaccucuacgaccacacccucauguccaucaucuccaccuuccaccucuccauccccaacuucaaccaguacgaggccauguccugcgacuucaacggcggcaagaucaccguccaguacaaccucucccacaccuacgccgucgacgccgucaaccacugcggcacccucgccaacggcauccuccagaccuucaugcgcauggccuggggcggcuccuacaucgcccucgacucccgcugcggcuccugggacugcaucaugaccuccuaccaguaccucaucauccagaacaccaccugggaggaccacugccaguucucccgccccucccccaucggcuaccucggccuccucucccagcgcacccgcgacaucuacaucucccgccgccgccggggcaccuucaccuggacccucuccgacuccgagggcaacgagacccccggcggcuacugccucacccgcuggaugcucaucgaggccgagcucaagugcuucggcaacaccgccgucgccaagugcaacgagaagcacgacgaggaguucugcgacaugcuccgccucuucgacuucaacaagcaggccauccgccgccucaaggcccccgcccagauguccauccagcucaucaacaaggccgucaacgcccucaucaacgaccagcucaucaugaagaaccaccuccgcgacaucaugugcauccccuacugcaacuacuccaaguacugguaccucaaccacaccuccaccggccgcaccucccucccccgcugcuggcucgucuccaacggcuccuaccucaacgagacccacuucuccgacgacaucgagcagcaggccgacaacaugaucaccgagaugcuccagaaggaguaccucgaccgccagggcaagaccccccucggccucgucgaccucuucgucuucuccaccuccuucuaccucaucuccaucuuccuccaccucaucaagauccccacccaccgccacaucgucggcaagcccugccccaagccccaccgccucaaccacaugggcaucugcuccugcggccucuacaagcagcccggcguccccguccgcuggaagcgcuga

SEQ ID NO: 4662 - RNA, 1473 nt, Artificial Sequence
  derived and/or modified protein sequence (opt2) from LASV(Lassa virus/H.sapiens-wt/NGA/2016/ISTH_0753;Clade II)__AVO03609__GPCstabilized
augggccagaucaucaccuucuuccaggaggucccccacgucaucgaggaggucaugaacaucguccucaucgcccucucccuccucgccauccucaagggcaucuacaacgucgccaccugcggccucuucggccucgucuccuuccuccuccucugcggccgcuccugcuccaccaccuacaagggcgucuacgagcuccagacccucgagcucgacauggccucccucaacaugaccaugccccucuccugcaccaagaacaacucccaccacuacaucauggucggcaacgagaccggccucgagcucacccucaccaacaccuccaucaucaaccacaaguucugcaaccucuccgacgcccacaagaagaaccucuacgaccacgcccucauguccaucaucuccaccuuccaccucuccauccccaacuucaaccaguacgaggccauguccugcgacuucaacggcggcaagaucuccguccaguacaaccucucccacaccuacgccgucgacgccgccaaccacugcggcaccaucgccaacggcguccuccagaccuucaugcgcauggccuggggcggcuccuacaucgcccucgacuccggcugcggcaacugggacugcaucaugaccuccuaccaguaccucaucauccagaacaccaccugggaggaccacugccaguucucccgccccucccccaucggcuaccucggccuccucucccagcgcacccgcgacaucuacaucucccgccgccgccggggcaccuucaccuggacccucuccgacuccgagggcaacgagacccccggcggcuacugccucacccgcuggaugcucaucgaggccgagcucaagugcuucggcaacaccgccgucgccaagugcaacgagaagcacgacgaggaguucugcgacaugcuccgccucuucgacuucaacaagcaggccaucucccgccucaagacccccgcccagauguccauccagcucaucaacaaggccgucaacgcccucaucaacgaccagcucaucaugaagaaccaccuccgcgacaucaugugcauccccuacugcaacuacuccaaguacugguaccucaaccacaccgucaccggccgcaccucccucccccgcugcuggcucgucuccaacggcuccuaccucaacgagacccacuucuccgacgacaucgagcagcaggccgacaacaugaucaccgagcuccuccagaaggaguacauggaccgccagggcaagaccccccucggccucgucgaccucuucgucuucuccaccuccuucuaccucaucuccaucuuccuccaccucgucaagauccccacccaccgccacgucaucggcaagcccugccccaagccccaccgccucaaccacaugggcaucugcuccugcggccucuacaagcaccccggcguccccgucaaguggaagcgcuga

SEQ ID NO: 4663 - RNA, 1473 nt, Artificial Sequence
  derived and/or modified protein sequence (opt2) from LASV(Lassa virus/H.sapiens-wt/NGA/2016/ISTH_0759;Clade II)__AVO03593__GPCstabilized
augggccagaucaucaccuucuuccaggaggucccccacgucaucgaggaggucaugaacaucguccucaucgcccucucccuccucgccauccucaagggcaucuacaacgucgccaccugcggccucuucggccucgucuccuuccuccuccucugcggccgcuccugcuccaccaccuacaagggcgucuacgagcuccagacccucgagcucgacauggccucccucaacaugaccaugccccucuccugcaccaagaacaacucccaccacuacaucauggucggcaacgagaccggccucgagcucacccucaccaacaccuccaucaucaaccacaaguucugcaaccucuccgacgcccacaagaagaaccucuacgaccacacccucauguccaucaucuccaccuuccaccucuccauccccaacuucaaccaguacgaggccauguccugcgacuucaacggcggcaagaucuccguccaguacaaccucucccacaccuacgccgucgacgccgccaaccacugcggcaccaucgccaacggcguccuccagaccuucaugcgcauggccuggggcggcuccuacaucgcccucgacuccggcugcggcuccugggacugcaucaugaccuccuaccaguaccucaucauccagaacaccuccugggaggaccacugccaguucucccgccccucccccaucggcuaccucggccuccucucccagcgcacccgcgacaucuacaucucccgccgccgccggggcaccuucaccuggacccucuccgacuccgagggcaacgagacccccggcggcuacugccucacccgcuggaugcucaucgaggccgagcucaagugcuucggcaacaccgccgucgccaagugcaacgagaagcacgacgaggaguucugcgacaugcuccgccucuucgacuucaacaagcaggccauccgccgccucaagacccccgcccagauguccauccagcucaucaacaaggccgucaacgcccucaucaacgaccagcucaucaugaagaaccaccuccgcgacaucaugugcauccccuacugcaacuacuccaaguacugguaccucaaccacaccgucaccggcaagaccucccucccccgcugcuggcucgucuccaacggcuccuaccucaacgagacccacuucuccgacgacaucgagcagcaggccgacaacaugaucaccgagcuccuccagaaggaguacaucgaccgccagggcaagaccccccucggccucgucgaccucuucgucuucuccaccuccuucuaccucaucuccaucuuccuccaccucgucaagauccccacccaccgccacgucaucggcaagcccugccccaagccccaccgccucaaccacaugggcaucugcuccugcggccucuacaagcaccccggcguccccgucaaguggaagcgcuga

SEQ ID NO: 4664 - RNA, 1473 nt, Artificial Sequence
  derived and/or modified protein sequence (opt2) from LASV(Lassa virus/H.sapiens-wt/NGA/2016/ISTH_0777;Clade II)__AVO03615__GPCstabilized
augggccagaucaucaccuucuuccaggaggucccccacgucaucgaggaggucaugaacaucguccucaucgcccucucccuccucgccauccucaagggcaucuacaacgucgccaccugcggccuccucggccucaucuccuuccuccuccucugcggccgcuccugcuccaccaccuacaagggcgucuacgagcuccagacccucgagcucgacauggccaaccucaacaugaccaugccccucuccugcaccaagaacuccucccaccacuacaucauggucggcaacgagaccggccucgagcucacccucaccaacaccuccaucaucaaccacaaguucugcaaccucuccgacgcccacaagaagaaccucuacgaccacgcccucauguccaucaucuccaccuuccaccucuccauccccaacuucaaccaguacgaggccauguccugcgacuucaacggcggcaagaucuccguccaguacaaccucucccacgccuacgccgucgacgccgccaaccacugcggcaccaucgccaacggcguccuccagaccuucaugcgcauggccuggggcggcuccuacaucgcccucgacuccggcugcggcaacugggacugcaucaugaccuccuaccaguaccucaucauccagaacaccaccugggaggaccacugccaguucucccgccccucccccaucggcuaccucggccuccucucccagcgcacccgcgacaucuacaucucccgccgccgccggggcaccuucaccuggacccucuccgacuccgagggcaacgaggcccccggcggcuacugccucacccgcuggaugcucaucgaggccgagcucaagugcuucggcaacaccgccaucgccaagugcaacgagaagcacgacgaggaguucugcgacaugcuccgccucuucgacuucaacaagcaggccauccgccgccucaagacccccgcccagauguccauccagcucaucaacaaggccgucaacgcccucaucaacgaccagcucaucaugaagaaccaccuccgcgacaucaugugcauccccuacugcaacuacuccaaguacugguaccucaaccacaccgucaccggcaagaccucccucccccgcugcuggcucaucuccaacggcuccuaccucaacgagacccacuucuccgacgacaucgagcagcaggccgacaacaugaucaccgagcuccuccagaaggaguacauggaccgccagggcaagaccccccucggccucgucgaccucuucgucuucuccaccuccuucuaccucaucuccaucuuccuccaccucgucaagauccccacccaccgccacaucgucggcaagcccugccccaagccccaccgccucaaccacaugggcaucugcuccugcggccucuacaagcaccccggcguccccgucaaguggaagcgcuga

SEQ ID NO: 4665 - RNA, 1473 nt, Artificial Sequence
  derived and/or modified protein sequence (opt2) from LASV(Lassa virus/H.sapiens-wt/NGA/2016/ISTH_0779;Clade II)__AVO03655__GPCstabilized
augggccagaucaucaccuucuuccaggaggucccccacgucgucgaggaggucaugaacgucguccucaucgcccucucccuccucgccauccucaagggcaucuacaacaucgccaccugcggccucuucggccucaucuccuuccuccuccucugcggccgcuccugcuccaccaccuacaagggcgucuacgagcuccagacccucgagcucgacauggccaaccucaacaugaccaugccccucuccugcaccaagaacaacucccaccacuacaucauggucggcaacgagaccggccucgagcucacccucaccaacaccuccaucaucaaccacaaguucugcaaccucuccgacgcccacaagaagaaccucuacgaccacacccucauguccaucaucuccaccuuccaccucuccauccccaacuucaaccaguacgaggccauguccugcgacuucaacggcggcaagaucuccguccaguacaaccucucccacggcuacgccgucgacgccgccaaccacugcggcaccaucgccaacggcguccuccagaccuucaugcgcauggccuggggcggcuccuacaucgcccucgacuccggcugcggcaacugggacugcaucaugaccuccuaccaguaccucgucauccagaacaccaccugggaggaccacugccaguucucccgccccucccccaucggcuaccucggccuccucucccagcgcacccgcgacaucuacaucucccgccgccgccggggcaccuucaccuggacccucuccgacuccgagggcaacgacgcccccggcggcuacugccucacccgcuggaugcucaucgaggccgagcucaagugcuucggcaacaccgccaucgccaagugcaacgagaagcacgacgaggaguucugcgacaugcuccgccucuucgacuucaaccgccaggccaucaagcgccucaagacccccgcccagauguccauccagcucaucaacaaggccgucaacgcccucaucaacgaccagcucaucaugaagaaccaccuccgcgacaucaugugcauccccuacugcaacuacuccaaguacugguaccucaacaacaccgucaccggcaaguccucccuccccaagugcuggcucgucuccaacggcuccuaccucaacgagacccacuucuccgacgacaucgagcagcaggccgacaacaugaucaccgagaugcuccagaaggaguacaucgaccgccagggcaagaccccccucggccucgucgaccucuucgucuucuccaccuccuucuaccucaucuccaucuuccuccaccucguccgcauccccacccaccgccacaucaccggcaagcccugccccaagccccaccgccucaaccacaugggcaucugcuccugcggccucuacaagcagcccggcguccccgucaaguggaagcgcuga

SEQ ID NO: 4666 - RNA, 1473 nt, Artificial Sequence
  derived and/or modified protein sequence (opt2) from LASV(Lassa virus/H.sapiens-wt/NGA/2016/ISTH_0917;Clade II)__AVO03535__GPCstabilized
augggccagaucgucaccuucuuccaggaggucccccacgucaucgaggagaucaugaacaucguccucaucacccucucccuccucgccauccucaagggcgucuacaaccucgccaccugcggccucaucggccucaucaccuuccucuuccucugcggccgcuccugcuccaugaccuacaagggcaacuaccagcucgagacccucgagcucaacauggagaugcucaacaugaccaugccccucuccugcaccaagaacaacucccaccacuacauccgcgucggcaacgagaccggccucgagcucacccucaccaacaccuccaucauccagcacaaguucugcaaccucuccgacgcccacaagcgcaaccucuacgaccacucccucauguccaucgucuccaccuuccaccucuccauccccaacuucaaccaguacgaggccauguccugcgacuucaacggcggcaagaucuccauccaguacaaccucucccacaccuacgccggcgacgccgccaagcacugcggcacccucgccaacggcauccuccagaccuucaugcgcauggccuggggcggcuccuacaucgcccucgacuccggcugcggcggcugggacugcaucaugaccaacuaccaguaccucaucauccagaacgucaccugggaggaccacugccaguucucccgccccucccccaucggcuaccucggccuccucucccagcgcacccgcgaggucuacaucucccgccgccgccggggcaccuucaccuggacccucuccgacuccgagggcaacgaggcccccggcggcuacugccucacccgcuggaugcucaucgaggccgagcucaagugcuucggcaacaccgccgucgccaagugcaacgagaagcacgacgaggaguucugcgacaugcuccgccucuucgacuucaacaagcaggccauccgccgccucaaggcccccacccagauguccauccagcucaucaacaaggccgucaacgcccucaucaacgaccagcucaucaugaagaaccaccuccgcgacaucaugugcauccccuacugcaacuacuccaaguacugguaccucaaccacaccaucaccggccgcaccucccucccccgcugcuggcucgucuccaacggcuccuaccucaacgagacccacuucuccgacgacaucgagcagcaggccgacaacaugaucaccgagaugcuccagaaggaguacaucgaccgccagggcaagaccccccucggccucgucgaccucuucgucuucuccaccuccuucuaccucaucuccaucuuccuccaccucgucaagauccccacccaccgccacaucgucggcaaguccugccccaagccccaccgccucaaccacaugggcaucugcuccugcggccucuacaagcgccccggcgucuccguccgcuggaagcgcuga

SEQ ID NO: 4667 - RNA, 1473 nt, Artificial Sequence
  derived and/or modified protein sequence (opt2) from LASV(Lassa virus/H.sapiens-wt/NGA/2016/ISTH_1006;Clade II)__AVO03643__GPCstabilized
augggccagaucaucaccuucuuccaggaggucccccacgucaucgaggaggucaugaacaucguccucaucgcccucucccuccucgccauccucaagggcaucuacaacgucgccaccugcggccucuucggccucgucgccuuccuccuccucugcggccgcuccugcuccaccaccuacaagggcgucuacgagcuccagacccucgagcucgacauggccucccucaacaugaccaugccccucuccugcaccaagaacaacucccaccacuacaucauggucggcaacgagaccggccucgagcucacccucaccaacaccuccaucaucaaccacaaguucugcaaccucuccgacgcccacaagaagaaccucuacgaccacgcccucauguccaucaucuccaccuuccaccucuccauccccaacuucaaccaguacgaggccaugggcugcgacuucaacggcggcaagaucuccguccaguacaaccucucccacuccuacgccgucgacgccgccaaccacugcggcaccaucgccaacggcguccuccagaccuucaugcgcauggccuggggcggcuccuacaucgcccucgacuccggcugcggcuccugggacugcaucaugaccuccuaccaguaccucaucauccagaacaccaccugggaggaccacugccaguucucccgccccucccccaucggcuaccucggccuccucucccagcgcacccgcgacaucuacaucucccgccgccgccggggcaccuucaccuggacccucuccgacuccgagggcaacgagacccccggcggcuacugccucacccgcuggaugcucaucgaggccgagcucaagugcuucggcaacaccgccgucgccaagugcaacgagaagcacgacgaggaguucugcgacaugcuccgccucuucgacuucaacaagcaggccauccgccgccucaagacccccgcccagauguccauccagcucaucaacaaggccgucaacgcccucaucaacgaccagcucaucaugaagaaccaccuccgcgacaucaugugcauccccuacugcaacuacuccaaguacugguaccucaaccacaccgucaccggccgcaccucccucccccgcugcuggcucgucuccaacggcuccuaccucaacgagacccacuucuccgacgacaucgagcagcaggccgacaacaugaucaccgagcuccuccagaaggaguacauggaccgccagggcaagaccccccucggccucgucgaccucuucgucuucuccaccuccuucuaccucaucuccaucuuccuccaccucaucaagauccccacccaccgccacgucaucggcaagcccugccccaagccccaccgccucaaccacaugggcaucugcuccugcggccucuacaagcaccccggcguccccgucaaguggaagcgcuga

SEQ ID NO: 4668 - RNA, 1473 nt, Artificial Sequence
  derived and/or modified protein sequence (opt2) from LASV(Lassa virus/H.sapiens-wt/NGA/2016/ISTH_1026;Clade II)__AVO03589__GPCstabilized
augggccagaucaucaccuucuuccaggaggucccccacgucaucgaggaggucaugaacaucguccucaucgcccucucccuccucgccauccucaagggcaucuacaacgucgccaccugcggccucuucggccucgucuccuuccuccuccucugcggccgcuccugcuccaccaccuacaagggcgucuacgagcuccagacccucgagcucgacauggccucccucaacaugaccaugccccucuccugcaccaagaacaacucccaccacuacaucauggucggcaacgagaccggccucgagcucacccucaccaacaccuccaucaucaaccacaaguucugcaaccucuccgacgcccacaagaagaaccucuacgaccacgcccucauguccaucaucuccaccuuccaccucuccauccccaacuucaaccaguacgaggccauguccugcgacuucaacggcggcaagaucuccguccaguacaaccucucccacgccuacgccaucgacgccgccucccacugcggcaccaucgccaacggcguccuccagaccuucaugcgcauggccuggggcggcuccuacaucgcccucgacuccggcugcggcuccugggacugcaucaugaccuccuaccaguaccucaucauccagaacaccaccugggaggaccacugccaguucucccgccccucccccaucggcuaccucggccuccucucccagcgcacccgcgacaucuacaucucccgccgccgccggggcaccuucaccuggacccucuccgacuccgagggcaacgagacccccggcggcuacugccucacccgcuggaugcucaucgaggccgagcucaagugcuucggcaacaccgccgucgccaagugcaacgagaagcacgacgaggaguucugcgacaugcuccgccucuucgacuucaacaagcaggccauccgccgccucaagacccccgcccagauguccauccagcucaucaacaaggccgucaacgcccucaucaacgaccagcucaucaugaagaaccaccuccgcgacaucaugugcauccccuacugcaacuacuccaaguacugguaccucaaccacaccgucaccggcaagaccucccucccccgcugcuggcucgucuccaacggcuccuaccucaacgagacccacuucuccgacgacaucgagcagcaggccgacaacaugaucaccgagcuccuccagaaggaguaccucgaccgccagggcaagaccccccucggccucgucgaccucuucgucuucuccaccuccuucuaccucaucuccaucuuccuccaccucgucaagauccccacccaccgccacgucaucggccgccccugccccaagccccaccgccucaaccacaugggcaucugcuccugcggccucuacaagcaccccggcguccccgucaaguggaagcgcuga

SEQ ID NO: 4669 - RNA, 1473 nt, Artificial Sequence
  derived and/or modified protein sequence (opt2) from LASV(Lassa virus/H.sapiens-wt/NGA/2016/ISTH_1070;Clade II)__AVO03651__GPCstabilized
augggccagaucaucaccuucuuccaggaggucccccacgucaucgaggaggucaugaacaucguccucaucgcccucucccuccucgccauccucaagggcaucuacaacgucgccaccugcggccucuucggccucgucuccuuccuccuccucugcggccgcuccugcuccaccaccuacaagggcgucuacgagcuccagacccucgagcucgacauggccucccucaacaugaccaugccccucuccugcaccaagaacaacucccaccacuacaucauggucggcaacgagaccggccucgagcucacccucaccaacaccuccaucaucaaccacaaguucugcaaccucuccgacgcccacaagaagaaccucuacgaccacgcccucauguccaucaucuccaccuuccaccucuccauccccaacuucaaccaguacgaggccauguccugcgacuucaacggcggcaagaucuccguccaguacaaccucucccacaccuucgccgucgacgccgccaaccacugcggcaccaucgccaacggcguccuccagaccuucaugcgcauggccuggggcggcuccuacaucgcccucgacuccggcugcggcuccugggacugcaucaugaccuccuaccaguaccucaucauccagaacaccaccugggaggaccacugccaguucucccgccccucccccaucggcuaccucggccuccucucccagcgcacccgcgacaucuacaucucccgccgccgccggggcaccuucaccuggacccucuccgacuccgagggcaacgagacccccggcggcuacugccucacccgcuggaugcucaucgaggccgagcucaagugcuucggcaacaccgccgucgccaagugcaacgagaagcacgacgaggaguucugcgacaugcuccgccucuucgacuucaacaagcaggccauccgccgccucaagacccccgcccagauguccauccagcucaucaacaaggccgucaacgcccucaucaacgaccagcucaucaugaagaaccaccuccgcgacaucaugugcauccccuacugcaacuacuccaaguacugguaccucaaccacaccgucaccggcaagaccucccucccccgcugcuggcucgucuccaacggcuccuaccucaacgagacccacuucuccgacgacaucgagcagcaggccgacaacaugaucaccgagcuccuccagaaggaguacauggaccgccagggcaagaccccccucggccucgucgaccucuucgucuucuccaccuccuucuaccucaucuccaucuuccuccaccucgucaagauccccacccaccgccacaucaucggcaagcccugccccaagccccaccgccucaaccacaugggcaucugcuccugcggccucuacaagcaccccggcguccccgucaaguggaagcgcuga

SEQ ID NO: 4670 - RNA, 1473 nt, Artificial Sequence
  derived and/or modified protein sequence (opt2) from LASV(Lassa virus/H.sapiens-wt/NGA/2016/ISTH_1123;Clade II)__AVO03645__GPCstabilized
augggccagaucaucaccuucuuccaggaggucccccacgucaucgaggaggucaugaacaucguccucaucgcccucucccuccucgccauccucaagggcaucuacaacgucgccaccugcggccucuucggccucgucuccuuccuccuccucugcggccgcuccugcuccaccaccuacaagggcgucuacgagcuccagacccucgagcucgacaugggcucccucaacaugaccaugccccucuccugcaccaagaacaacucccaccacuacaucauggucggcaacgagaccggccucgagcucacccucaccaacaccuccaucaucaaccacaaguucugcaaccucuccgacgcccacaagaagaaccucuacgaccacgcccucauguccaucaucuccaccuuccaccucuccauccccaacuucaaccaguacgaggccauguccugcgacuucaacggcggcaagaucuccguccaguacaaccucucccacgccuacgccgucgacgccgccaaccacugcggcaccaucgccaacggcguccuccagaccuucaugcgcauggccuggggcggcuccuacaucgcccucgacuccggcugcggcuccugggacugcaucaugaccuccuaccaguaccucaucauccagaacaccuccugggaggaccacugccaguucucccgccccucccccaucggcuaccucggccuccucucccagcgcacccgcgacaucuacaucucccgccgccgccggggcaccuucaccuggacccucuccgacuccgagggcaacgagacccccggcggcuacugccucacccgcuggaugcucaucgaggccgagcucaagugcuucggcaacaccgccgucgccaagugcaacgagaagcacgacgaggaguucugcgacaugcuccgccucuucgacuucaacaagcaggccauccgccgccucaagacccccgcccagauguccauccagcucaucaacaaggccgucaacgcccucaucaacgaccagcucaucaugaagaaccaccuccgcgacaucaugugcauccccuacugcaacuacuccaaguacugguaccucaaccacaccgucaccggcaagaccucccucccccgcugcuggcucgucuccaacggcuccuaccucaacgagacccacuucuccgacgacaucgagcagcaggccgacaacaugaucaccgagcuccuccagaaggaguacaucgaccgccagggcaagaccccccucggccucgucgaccucuucgucuucuccaccuccuucuaccucaucuccaucuuccuccaccucgucaagauccccacccaccgccacgucaucggcaagcccugccccaagccccaccgccucaaccacaugggcaucugcuccugcggccucuacaagcaccccggcguccccgucaaguggaagcgcuga

SEQ ID NO: 4671 - RNA, 1473 nt, Artificial Sequence
  derived and/or modified protein sequence (opt2) from LASV(Lassa virus/H.sapiens-wt/NGA/2016/ISTH_1150;Clade II)__AVO03627__GPCstabilized
augggccaggucaucaccuucuuccaggagaucccccacgucaucgaggaggucaugaacaucguccucaucacccucucccuccucgccauccucaagggcaucuacaacgucgccaccugcggccucuucggccucaucuccuuccuccuccucugcggccgcuccugcuccaccaccuacaagggcgucuacgagcuccagacccucgagcucgacauggccaaccucaacaugaccaugccccucuccugcaccaagaacuccucccaccacuacaucauggucggcaacgagaccggccucgagcucacccucaccaacaccuccaucaucaaccacaaguucugcaaccucuccgacgcccacaagaagaaccucuacgaccacgcccucauguccaucaucuccaccuuccaccucuccauccccaacuucaaccaguacgaggccauguccugcgacuucaacggcggcaagaucuccguccaguacaaccucucccacgccuacgccgucgacgccgccaaccacugcggcaccaucgccaacggcguccuccagaccuucaugcgcauggccuggggcggcuccuacaucgcccucgacuccggcugcggcaacugggacugcaucaugaccuccuaccaguaccucaucauccagaacaccaccugggaggaccacugccaguucucccgccccucccccaucggcuaccucggccuccucucccagcgcacccgcgacaucuacaucucccgccgccgccggggcaccuucaccuggacccucuccgacuccgagggcaacgaggcccccggcggcuacugccucacccgcuggaugcucaucgaggccgagcucaagugcuucggcaacaccgccaucgccaagugcaacgagaagcacgacgaggaguucugcgacaugcuccgccucuucgacuucaacaagcaggccauccgccgccucaagacccccgcccagaaguccauccagcucaucaacaaggccgucaacgcccucaucaacgaccagcucaucaugaagaaccaccuccgcgacaucaugugcauccccuacugcaacuacuccaaguacugguaccucaaccacaccgucaccggcaagaccucccuccccaagugcuggcucaucuccaacggcuccuaccucaacgagacccacuucuccgacgacaucgagcagcaggccgacaacaugaucaccgagcuccuccagaaggaguacauggaccgccagggcaagaccccccucggccucgucgaccucuucgucuucuccaccuccuucuaccucaucuccaucuuccuccaccucgucaagauccccacccaccgccacaucgucggccgccccugccccaagccccaccgccucaaccacaugggcaucugcuccugcggccucuacaagcaccccggcguccccgucaaguggaagcgcuga

SEQ ID NO: 4672 - RNA, 1473 nt, Artificial Sequence
  derived and/or modified protein sequence (opt2) from LASV(Lassa virus/H.sapiens-wt/NGA/2016/ISTH_1174;Clade II)__AVO03555__GPCstabilized
augggccagaucaucaccuucuuccaggaggucccccacgucaucgaggaggucaugaacaucguccucaucgcccucucccuccucgccauccucaagggcaucuacaacgucgccaccugcggcuucuucggccucgucuccuuccuccuccucugcggccgcuccugcuccaccaucuacaagggcgucuacgagcuccagacccucgagcucgacauggccucccucaacaugaccaugccccucuccugcaccaagaacaacucccaccacuacaucauggucggcaacgagaccggccucgagcucacccucaccaacaccuccaucaucaaccacaaguucugcaaccucuccgacgcccacaagaagaaccucuacgaccacgcccucauguccaucaucuccaccuuccaccucuccaucccccacuucaaccaguacgaggccauguccugcgacuucaacggcggcaagaucuccguccaguacaaccucucccacaccuacgccgucgacgccgccaaccacugcggcaccaucgccaacggcguccuccagaccuucaugcgcauggccuggggcggcuccuacaucgcccucgacuccggcugcggcuccugggacugcaucaugaccuccuaccaguaccucaucauccagaacaccaccugggaggaccacugccaguucucccgccccucccccaucggcuaccucggccuccucucccagcgcacccgcgacaucuacaucucccgccgccgccggggcaccuucaccuggacccucuccgacuccgagggcaacgagacccccggcggcuacugccucacccgcuggaugcucaucgaggccgagcucaagugcuucggcaacaccgccgucgccaagugcaacgagaagcacgacgaggaguucugcgacaugcuccgccucuucgacuucaacaagcaggccauccgcaagcucaagacccccgcccagauguccauccagcucaucaacaaggccgucaacgcccucaucaacgaccagcucaucaugaagaaccaccuccgcgacaucaugugcauccccuacugcaacuacuccaaguacugguaccucaaccacaccgucaccggcaagaccucccucccccgcugcuggcucgucuccaacggcuccuaccucaacgagacccacuucuccgacgacaucgagcagcaggccgacaacaugaucaccgagcuccuccagaaggaguacauggaccgccagggcaagaccccccucggccucgucgaccucuucgucuucuccaccuccuucuaccucaucuccaucuuccuccaccucgucaagauccccacccaccgccacgucaucggcaagcccugccccaagccccaccgccucaaccacaugggcaucugcuccugcggccucuacaagcaccccggcguccccgucaaguggaagcgcuga

SEQ ID NO: 4673 - RNA, 1473 nt, Artificial Sequence
  derived and/or modified protein sequence (opt2) from LASV(Lassa virus/H.sapiens-wt/NGA/2016/ISTH_1207;Clade II)__AVO03599__GPCstabilized
augggccagaucaucaccuucuuccaggaggucccccacgucaucgaggaggucaugaacaucguccucaucgcccucucccuccucgccauccucaagggcaucuacaacgucgccaccugcggccucuucggccucgucuccuuccuccuccucugcggccgcuccugcuccaccaccuacaagggcgucuacgagcuccagacccucgagcucgacaugaccucccucaacaugaccaugccccucuccugcaccaagaacaacucccaccacuacaucauggucggcaacgagaccggccucgagcucacccucaccaacaccuccaucaucaaccacaaguucugcaaccucuccgacgcccacaagaagaaccucuacgaccacgcccucauguccaucaucuccaccuuccaccucuccauccccaacuucaaccaguacgaggccauguccugcgacuucaacggcggcaagaucuccguccaguacaaccucucccacaccuacgccgucgacgccgccaaccacugcggcaccaucgccaacggcguccuccagaccuucaugcgcauggccuggggcggcuccuacaucgcccucgacuccggcugcggcuccugggacugcaucaugaccuccuaccaguaccucaucauccagaacaccaccugggaggaccacugccaguucucccgccccucccccaucggcuaccucggccuccucucccagcgcacccgcgacaucuacaucucccgccgccgccggggcaccuucaccuggacccucuccgacuccgagggcaacgacacccccggcggcuacugccucacccgcuggaugcucaucgaggccgagcucaagugcuucggcaacaccgccgucgccaagugcaacgagaagcacgacgaggaguucugcgacaugcuccgccucuucgacuucaacaagcaggccauccgccgccucaagacccccgcccagauguccauccagcucaucaacaaggccgucaacgcccucaucaacgaccagcucaucaugaagaaccaccuccgcgacaucaugugcauccccuacugcaacuacuccaaguacugguaccucaaccacaccgucaccggcaagaccucccucccccgcugcuggcucgucuccaacggcuccuaccucaacgagacccacuucuccgacgacaucgagcagcaggccgacaacaugaucaccgagcuccuccagaaggaguacaucgaccgccagggcaagaccccccucggccucgucgaccucuucgucuucuccaccuccuucuaccucaucuccaucuuccuccaccucgucaagauccccacccaccgccacgucaucggcaagcccugccccaagccccaccgccucaaccacaugggcaucugcuccugcggccucuacaagcaccccggcguccccgucaaguggaagcgcuga

SEQ ID NO: 4674 - RNA, 1473 nt, Artificial Sequence
  derived and/or modified protein sequence (opt2) from LASV(Lassa virus/H.sapiens-wt/NGA/2016/ISTH_1306;Clade II)__AVO03623__GPCstabilized
augggccagaucaucaccuucuuccaggaggucccccacgucaucgaggaggucaugaacaucguccucaucgcccucucccuccucgccauccucaagggcaucuacaacgucgccaccugcggccucuucggccucgucuccuuccuccuccucugcggccgcuccugcuccaccaccuacaagggcgucuacgagcuccagacccucgagcucgacauggccucccucaacaugaccaugccccucuccugcaccaagaacaacucccaccacuacaucauggucggcaacgagaccggccucgagcucacccucaccaacaccuccaucaucaaccacaaguucugcaaccucuccgacgcccacaagaagaaccucuacgaccacgcccucauguccaucaucuccaccuuccaccucuccauccccaacuucaaccaguacgaggccauguccugcgacuucaacggcggcaagaucuccguccaguacaaccucucccacaccuacgccgucgacgccgccaaccacugcggcaccgucgccaacggcguccuccagaccuucaugcgcauggccuggggcggcuccuacaucgcccucgacuccggcugcggcuccugggacugcaucaugaccuccuaccaguaccucaucauccagaacaccaccugggaggaccacugccaguucucccgccccucccccaucggcuaccucggccuccucucccagcgcacccgcgacaucuacaucucccgccgccgccggggcaccuucaccuggacccucuccgacuccgagggcaacgagacccccggcggcuacugccucacccgcuggaugcucaucgaggccgagcucaagugcuucggcaacaccgccgucgccaagugcaacgagaagcacgacgaggaguucugcgacaugcuccgccucuucgacuucaacaagcaggccauccgccgccucaagacccccgcccagauguccauccagcucaucaacaaggccgucaacgcccucaucaacgaccagcucaucaugaagaaccaccuccgcgacaucaugugcauccccuacugcaacuacuccaaguacugguaccucaaccacaccgucaccggccgcaccucccucccccgcugcuggcucgucuccaacggcuccuaccucaacgagacccacuucuccgacgacaucgagcagcaggccgacaacaugaucaccgagcuccuccagaaggaguacaucgaccgccagggcaagaccccccucggccucgucgaccucuucgucuucuccaccuccuucuaccucaucuccaucuuccuccaccucgucaagauccccacccaccgccacgucaucggcaagcccugccccaagccccaccgccucaaccacaugggcaucugcuccugcggccucuacaagcaccccggcguccccgucaaguggaagcgcuga

SEQ ID NO: 4675 - RNA, 1473 nt, Artificial Sequence
  derived and/or modified protein sequence (opt2) from LASV(Lassa virus/H.sapiens-wt/NGA/2016/ISTH_1311;Clade II)__AVO03575__GPCstabilized
augggccagaucgucaccuucuuccaggaggucccccacgucaucgaggaggucaugaacaucguccucaucgcccucucccuccucgccauccucaagggcaucuacaacgucgccaccugcggccucuucggccucaucuccuuccuccuccucugcggccgcuccugcuccaccaccuacaagggcgucuacgagcuccagacccucgagcucgacauggccaaccucaacaugaccaugccccucuccugcaccaagaacaacucccaccacuacaucauggucggcaacgagaccggccucgagcucacccucaccaacaccuccaucaucaaccacaaguucugcaaccucuccgacgcccacaagaagaaccucuacgaccacgcccucauguccaucaucuccaccuuccaccucuccauccccaacuucaaccaguacgaggccauguccugcgacuucaacggcggcaagaucuccguccaguacaaccucucccacgccuacgccggcgacgccgccucccacugcggcaccaucgccaacggcguccuccagaccuucaugcgcauggccuggggcggcuccuacaucgcccucgacuccggcugcggcaacugggacugcaucaugaccuccuaccaguaccucaucauccagaacaccaccugggaggaccacugccaguucucccgccccucccccaucggcuaccucggccuccucucccagcgcacccgcgacaucuacaucucccgccgccgccggggcaccuucaccuggacccucuccgacuccgagggcaacgacgcccccggcggcuacugccucacccgcuggaugcucaucgaggccgagcucaagugcuucggcaacaccgccaucgccaagugcaacgagaagcacgacgaggaguucugcgacaugcuccgccucuucgacuucaacaagcaggccaucaagcgccucaagacccccgcccagauguccauccagcucaucaacaaggccgucaacgcccucaucaacgaccagcucaucaugaagaaccaccuccgcgacaucaugugcauccccuacugcaacuacuccaaguacugguaccucaaccacaccaccaccggcaagaccucccuccccaagugcuggcucaucuccaacggcuccuaccucaacgagacccacuucuccgacgacaucgagcagcaggccgacaacaugaucaccgagcuccuccagaaggaguaccucgaccgccagggcaagaccccccucggccucgucgaccucuucgucuucuccaccuccuucuaccucaucuccaucuuccuccaccucaucaagauccccacccaccgccacaucgucggccgccccugccccaagccccaccgccucaaccacaugggcaucugcuccugcggccucuacaagcaccccggcguccccgucaaguggaagcgcuga

SEQ ID NO: 4676 - RNA, 1473 nt, Artificial Sequence
  derived and/or modified protein sequence (opt2) from LASV(Lassa virus/H.sapiens-wt/NGA/2016/ISTH_1423;Clade II)__AVO03577__GPCstabilized
augggccagaucgucaccuucuuccaggaggucccccacgucaucgaggaggucaugaacaucguccucaucgcccucucccuccucgccauccucaagggcaucuacaacgucgccaccugcggccucuucggccucgucuccuuccuccuccucugcggccgcuccugcuccaccaccuacaagggcgucuacgagcuccagacccucgagcucgacauggccaaccucaacaugaccaugccccucuccugcaccaagaacaacucccaccacuacaucauggucggcaacgagaccggccucgagcucacccucaccaacaccuccaucaucaaccacaaguucugcaaccucuccgacgcccacaagaagaaccucuacgaccacgcccucauguccaucaucuccaccuuccaccucuccauccccaacuucaaccaguacgaggccauguccugcgacuucaacggcggcaagaucuccguccaguacaaccucucccacuccuacgccgucgacgccgccaaccacugcggcaccgucgccaacggcguccuccagaccuucaugcgcauggccuggggcggcuccuacaucgcccucgacuccggcugcggcuccugggacugcaucaugaccuccuaccaguaccucaucauccagaacaucaccugggaggaccacugccaguucucccgccccucccccaucggcuaccucggccuccucucccagcgcacccgcgacaucuacaucucccgccgccgccggggcaccuucaccuggacccucuccgacuccgagggcaaggagacccccggcggcuacugccucacccgcuggaugcucaucgaggccgagcucaagugcuucggcaacaccgccgucgccaagugcaacgagaagcacgacgaggaguucugcgacaugcuccgccucuucgacuucaacaagcaggccauccgccgccucaagacccccgcccagauguccauccagcucaucaacaaggccgucaacgcccucaucaacgaccagcucaucaugaagaaccaccuccgcgacaucaugugcauccccuacugcaacuacuccaaguacugguaccucaaccacaccgucaccggcaagaccucccucccccgcugcuggcucgucuccaacggcuccuaccucaacgagacccacuucuccgacgacaucgagcagcaggccgacaacaugaucaccgagcuccuccagaaggaguacaucgaccgccagggcaagaccccccucggccucgucgaccucuucgucuucuccaccuccuucuaccucaucuccaucuuccuccaccucgucaagauccccacccaccgccacauccucggcaagcccugccccaagccccaccgccucaaccacaugggcaucugcuccugcggccucuacaagcaccccggcguccccgucaaguggaagcgcuga

SEQ ID NO: 4677 - RNA, 1473 nt, Artificial Sequence
  derived and/or modified protein sequence (opt2) from LASV(Lassa virus/H.sapiens-wt/NGA/2016/ISTH_1462;Clade II)__AVO03587__GPCstabilized
augggccagaucaucaccuucuuccaggaggucccccacgucaucgaggaggucaugaacaucguccucaucgcccucucccuccucgccauccucaagggcaucuacaacgucgccaccugcggccucuucggccucgucuccuuccuccuccucugcggccgcuccugcuccaccaccuacaagggcgucuacgagcuccagacccucgagcucgacauggccucccucaacaugaccaugccccucuccugcaccaagaacaacucccaccacuacaucauggucggcaacgagaccggccucgagcucacccucaccaacaccuccaucaucaaccacaaguucugcaaccucuccgacgcccacaagaagaaccucuacgaccacgcccucauguccaucaucuccaccuuccaccucuccauccccaacuucaaccaguacgaggccauguccugcgacuucaacggcggcaagaucuccguccaguacaaccucucccacaccuacgccgucgacgccgccaaccacugcggcaccaucgccaacggcguccuccagaccuucaugcgcauggccuggggcggcuccuacaucgcccucgacuccggcugcggcuccugggacugcaucaugaccuccuaccaguaccucaucauccagaacaccaccugggaggaccacugccaguucucccgccccucccccaucggcuaccucggccuccucucccagcgcacccgcgacaucuacaucucccgccgccgccggggcaccuucaccuggacccucuccgacuccgagggcaacgagacccccggcggcuacugccucacccgcuggaugcucaucgaggccgagcucaagugcuucggcaacaccgccgucgccaagugcaacgagaagcacgacgaggaguucugcgacaugcuccgccucuucgacuucaacaagcaggccauccgccgccucaagacccccgcccagauguccauccagcucaucaacaaggccgucaacgcccucaucaacgaccagcucaucaugaagaaccaccuccgcgacaucaugugcauccccuacugcaacuacuccaaguacugguaccucaaccacaccgucaccggccgcaccucccucccccgcugcuggcucgucuccaacggcuccuaccucaacgagacccacuucuccgacgacaucgagcagcaggccgacaacaugaucaccgagcuccuccagaaggaguacaucgagcgccagggcaagaccccccucggccucgucgaccucuucgucuucuccaccuccuucuaccucaucuccaucuuccuccaccucaucaagauccccacccaccgccacgucaucggcaagcccugccccaagccccaccgccucaaccacaugggcaucugcuccugcggccucuacaagcaccccggcguccccgucaaguggaagcgcuga

SEQ ID NO: 4678 - RNA, 1473 nt, Artificial Sequence
  derived and/or modified protein sequence (opt2) from LASV(Lassa virus/H.sapiens-wt/NGA/2016/ISTH_1472;Clade II)__AVO03605__GPCstabilized
augggccagaucaucaccuucuuccaggaggucccccacgucaucgaggaggucaugaacaucguccucaucgcccucucccuccucgccauccucaagggcaucuacaacgucgccaccugcggccucuucggccucgucuccuuccuccuccucugcggccgcuccugcuccaccaccuacaagggcgucuacgagcuccagacccucgagcucgacauggccucccucaacaugaccaugccccucuccugcaccaagaacaacucccaccacuacaucauggucggcaacgagaccggccucgagcucacccucaccaacaccuccaucaucaaccacaaguucugcaaccucuccgacgcccacaagaagaaccucuacgaccacgcccucauguccaucaucuccaccuuccaccucuccauccccaacuucaaccaguacgaggccauguccugcgacuucaacggcggcaagaucuccguccaguacaaccucucccacaccuacgccgucgacgccgccaaccacugcggcaccaucgccaacggcguccuccagaccuucaugcgcauggccuggggcggcuccuacaucgcccucgacuccggcugcggcuccugggacugcaucaugaccuccuaccaguaccucaucauccagaacaccaccugggaggaccacugccaguucucccgccccucccccaucggcuaccucggccuccucucccagcgcacccgcgacaucuacaucucccgccgccgccggggcaccuucaccuggacccucuccgacuccgagggcaacgagacccccggcggcuacugccucacccgcuggaugcucaucgaggccgagcucaagugcuucggcaacaccgccgucgccaagugcaacgagaagcacgacgaggaguucugcgacaugcuccgccucuucgacuucaacaagcaggccauccgccgccucaagacccccgcccagauguccauccagcucaucaacaaggccgucaacgcccucaucaacgaccagcucaucaugaagaaccaccuccgcgacaucaugugcauccccuacugcaacuacuccaaguacugguaccucaaccacaccgucaccggccgcaccucccucccccgcugcuggcucgucuccaacggcuccuaccucaacgagacccacuucuccgacgacaucgagcagcaggccgacaacaugaucaccgagcuccuccagaaggaguacaucgaccgccagggcaagaccccccucggccucgucgaccucuucgucuucuccaccuccuucuaccucaucuccaucuuccuccaccucaucaagauccccacccaccgccacgucaucggcaagcccugccccaagccccaccgccucaaccacaugggcaucugcuccugcggccucuacaagcaccccggcguccccgucaaguggaagcgcuga

SEQ ID NO: 4679 - RNA, 1473 nt, Artificial Sequence
  derived and/or modified protein sequence (opt2) from LASV(Lassa virus/H.sapiens-wt/NGA/2016/ISTH_1474;Clade II)__AVO03613__GPCstabilized
augggccagaucaucaccuucuuccaggaggucccccacgucaucgaggaggucaugaacaucguccucaucgcccucucccuccucgccauccucaagggcaucuacaacgucgccaccugcggccucuucggccucgucuccuuccuccuccucugcggccgcuccugcuccaccaccuacaagggcgucuacgagcuccagacccucgagcucgacauggccucccucaacaugaccaugccccucuccugcaccaagaacaacucccaccacuacaucauggucggcaacgagaccggccucgagcucacccucaccaacaccuccaucauccaccacaaguucugcaaccucuccgacgcccacaagaagaaccucuacgaccacgcccucauguccaucaucuccaccuuccaccucuccauccccaacuucaaccaguacgaggccauguccugcgacuucaacggcggcaagaucuccguccaguacaaccucucccacaccuacgccgucgacgccgccaaccacugcggcaccaucgccaacggcguccuccagaccuucaugcgcauggccuggggcggcuccuacaucgcccucgacuccggcugcggcuccugggacugcaucaugaccuccuaccaguaccucaucauccagaacaccaccugggaggaccacugccaguucucccgccccucccccaucggcuaccucggccuccucucccagcgcacccgcgacaucuacaucucccgccgccgccggggcaccuucaccuggacccucuccgacuccgagggcaacgagacccccggcggcuacugccucacccgcuggaugcucaucgaggccgagcucaagugcuucggcaacaccgccgucgccaagugcaacgagaagcacgacgaggaguucugcgacaugcuccgccucuucgacuucaacaagcaggccauccgccgccucaagacccccgcccagauguccauccagcucaucaacaaggccgucaacgcccucaucaacgaccagcucaucaugaagaaccaccuccgcgacaucaugugcauccccuacugcaacuacuccaaguacugguaccucaaccacaccgucaccggccgcaccucccucccccgcugcuggcucgucuccaacggcuccuaccucaacgagacccacuucuccgacgacaucgagcagcaggccgacaacaugaucaccgagcuccuccagaaggaguacaucgaccgccagggcaagaccccccucggccucgucgaccucuucgucuucuccaccuccuucuaccucaucuccaucuuccuccaccucaucaagauccccacccaccgccacgucaucggcaagcccugccccaagccccaccgccucaaccacaugggcaucugcuccugcggccucuacaagcaccccggcguccccgucaaguggaagcgcuga

SEQ ID NO: 4680 - RNA, 1476 nt, Artificial Sequence
  derived and/or modified protein sequence (opt2) from LASV(Lassa virus/H.sapiens-wt/NGA/2016/ISTH_1496;Clade II)__AVO03579__GPCstabilized
augggccagaucaucaccuucuuccaggaggucccccacgucaucgaggaggucaugaacaucguccucaucgcccucucccuccucgccauccucaagggcgucuacaacgucgccaccugcggccucuucggccucgucuccuuccuccuccucugcggccgcuccugcuccaccaccaucuacaagggcgucuacgagcuccagacccucgagcucgacauggccucccucaacaugaccaugccccucuccugcaccaagaacaacucccaccacuacaucauggucggcaacgagaccggccucgagcucacccucaccaacaccuccaucaucaaccacaaguucugcaaccucuccgacgcccacaagaagaaccucuacgaccacgcccucauguccaucaucuccaccuuccaccucuccauccccaacuucaaccaguacgaggccauguccugcgacuucaacggcggcaagaucuccguccaguacaaccucucccacgccuacgccgucgacgccgccaaccacugcggcaccaucgccaacggcguccuccagaccuucaugcgcauggccuggggcggcuccuacaucgcccucgacuccggcugccgcuccugggacugcaucaugaccuccuaccaguaccucaucauccagaacaccaccugggaggaccacugccaguucucccgccccucccccaucggcuaccucggccuccucucccagcgcacccgcgacaucuacaucucccgccgccgccggggcaccuucaccuggacccucuccgacuccgagggcaacgagacccccggcggcuacugccucacccgcuggaugcucaucgaggccgagcucaagugcuucggcaacaccgccgucgccaagugcaacgagaagcacgacgaggaguucugcgacaugcuccgccucuucgacuucaacaagcaggccauccgccgccucaagacccccgcccagauguccauccagcucaucaacaaggccgucaacgcccucaucaacgaccagcucaucaugaagaaccaccuccgcgacaucaugugcauccccuacugcaacuacuccaaguacugguaccucaaccacaccgucaccggcaagaccucccucccccgcugcuggcucgucuccaacggcuccuaccucaacgagacccacuucuccgacgacaucgagcagcaggccgacaacaugaucaccgagcuccuccagaaggaguacaucgaccgccagggcaagaccccccucggccucgucgaccucuucgucuucuccaccuccuucuaccucaucuccaucuuccuccaccucgucaagauccccacccaccgccacgucaucggcaagcccugccccaagccccaccgccucaaccacaugggcaucugcuccugcggccucuacaagcaccccggcguccccgucaaguggaagcgcuga

SEQ ID NO: 4681 - RNA, 1473 nt, Artificial Sequence
  derived and/or modified protein sequence (opt2) from LASV(Lassa virus/H.sapiens-wt/NGA/2016/ISTH_1541;Clade II)__AVO03553__GPCstabilized
augggccagaucgucaccuucuuccaggaggucccccacgucaucgaggagaucaugaacaucguccucaucacccucucccuccucgccguccucaagggcaucuacaacuucgccaccugcggccucaucggccucaucaccuuccucuuccucugcggccgcuccugcuccaccaucuacaagggcaacuaccagcuccagacccucgagcucaacauggagacccucaacaugaccaugccccucuccugcaccaagaacaacucccaccacuacauccgcgucggcaacgagaccggccucgagcucacccucaccaacgucuccaucaucaaccaccgcuucugcaaccucuccgacgcccacaagcgcaaccucuacgaccacacccucauguccaucaucuccaccuuccaccucuccauccccaacuucaaccaguacgaggccauguccugcgacuucaacggcggcaagaucuccguccaguacaaccucucccacggcuacgccgucgacgccgccaagcacugcggcaccgucgccaacggcguccuccagaccuucaugcgcauggccuggggcggcuccuacaucgcccucgacuccggcugcggcaacugggacugcaucaugaccuccuaccaguaccucaucauccagaacaccaccugggaggaccacugccaguucucccgccccucccccaucggcuaccucggccuccucucccagcgcacccgcgacaucuacaucucccgccgccgccggggcaccuucaccuggacccucuccgacuccgagggccgcgagacccccggcggcuacugccucacccgcuggaugcucaucgaggccgagcucaagugcuucggcaacaccgccgucgccaagugcaacgagaagcacgacgaggaguucugcgacaugcuccgccucuucgacuucaacaagcaggccauccagcgccucaagacccccgcccagauguccauccagcucaucaacaaggccgucaacgcccucaucaacgaccagcucaucaugaagaaccaccuccgcgacaucaugugcauccccuacugcaacuacuccaaguacugguaccucaaccacaccaccaccggcaagaccucccuccccaagugcuggcucgucaccaacggcuccuaccucaacgagacccacuucuccgacgacaucgagcagcaggccgacaacaugaucaccgagaugcuccagaaggaguacaucgaccgccagggcaagaccccccucggccucgucgaccucuucgucuucuccaccuccuucuaccucaucuccaucuuccuccaccucaucaagauccccaaccaccgccacaucgucggcaagcccugccccaagccccaccgccucaaccacaugggcaucugcuccugcggcuucuacaagcagcccggcguccccguccgcuggaagcgcuga

SEQ ID NO: 4682 - RNA, 1473 nt, Artificial Sequence
  derived and/or modified protein sequence (opt2) from LASV(Lassa virus/H.sapiens-wt/NGA/2016/ISTH_1546;Clade II)__AVO03537__GPCstabilized
augggccagaucgucaccuucuuccaggagaucccccacgucgucgaggagaucaugaacaucguccucaucacccucucccuccucgccauccucaagggccucuacaacuucgccaccugcggccucaucggccucaucaccuuccucuuccucugcggccgcuccugcuccaccaucuacaagggcuccuaccagcuccaggcccucgagcucaacauggagacccucaacaugaccaugccccucuccugcaccaagaacaacucccaccacuacauccgcgucggcaacgagaccggccucgagcucacccucaccaacaccuccaucaucaaccacaaguucugcaaccucuccgacgcccacaagaagaaccucuacgaccacacccucauguccaucaucuccaccuuccaccucuccauccccaacuucaaccaguacgaggccauguccugcgacuucaacggcggcaagaucuccguccaguacaaccucucccacuccuacgccggcgacgccgcccgccacugcggcaccgucgccaacggcguccuccagaccuucaugcgcauggccuggggcggcuccuacaucgcccucgacuccggcugcggcaacugggacugcaucaugaccuccuaccaguaccucaucauccagaacaccaccugggaggaccacugccaguucucccgccccucccccaucggcuaccucggccuccucucccagcgcacccgcgacaucuacaucucccgccgccgccggggcaccuucaccuggacccucuccgacuccgagggcaaggagacccccggcggcuacugccucacccgcuggaugcucaucgaggccgagcucaagugcuucggcaacaccgccgucgccaagugcaacgagaagcacgacgaggaguucugcgacaugcuccgccucuucgacuucaacaagcaggccauccagcgccucaagacccccgcccagauguccauccagcucaucaacaaggccgucaacgcccucaucaacgaccagcucaucaugaagaaccaccuccgcgacaucaugugcauccccuacugcaacuacuccaaguacugguaccucaaccacaccaccaccggcaagaccucccucccccgcugcuggcucgucuccaacggcuccuaccucaacgagacccacuucuccgacgacaucgagcagcaggccgacaacaugaucaccgagaugcuccagaaggaguacaucgaccgccagggcaagaccccccucggccucgucgaccucuucgucuucuccaccuccuucuaccucaucuccaucuuccuccaccucaucaagauccccacccaccgccacaucgucggcaaguccugccccaagccccaccgccucaaccacaugggcaucugcuccugcggccucuacaagcagcccggcguccccgucaaguggaagcgcuga

SEQ ID NO: 4683 - RNA, 1473 nt, Artificial Sequence
  derived and/or modified protein sequence (opt2) from LASV(Lassa virus/H.sapiens-wt/NGA/2016/ISTH_1591;Clade II)__AVO03647__GPCstabilized
augggccagaucaucaccuucuuccaggaggucccccacgucaucgaggaggucaugaacaucguccucaucgcccucucccuccucgccauccucaagggcaucuacaacgucgccaccugcggccucuucggccucgucuccuuccuccuccucugcggccgcuccugcuccaccaccuacaagggcgucuacgagcuccagacccucgagcucgacauggccucccucaacaugaccaugccccucuccugcaccaagaacaacucccaccacuacaucauggucggcaacgagaccggccucgagcucacccucaccaacaccuccaucauccagcacaaguucugcaaccucuccgacgcccacaagaagaaccucuacgaccacgcccucauguccaucgucuccaccuuccaccucuccauccccaacuucaaccaguacgaggccauguccugcgacuucaacggcggcaagaucaccguccaguacaaccucucccacuccuacgccaucgacgccgccaaccacugcggcaccgucgccaacggcguccuccagaccuucaugcgcauggccuggggcggcuccuacaucgcccucgacuccggcugcggcuccugggacugcaucaugaccuccuaccaguaccucaucauccagaacaccaccugggaggaccacugccaguucucccgccccucccccaucggcuaccucggccuccucucccagcgcacccgcgacaucuacaucucccgccgccgccggggcaccuucaccuggacccucuccgacuccgagggcaacgagacccccggcggcuacugccucacccgcuggaugcucaucgaggccgagcucaagugcuucggcaacaccgccgucgccaagugcaacgagaagcacgacgaggaguucugcgacaugcuccgccucuucgacuucaacaagcaggccauccgccgccucaaggcccccgcccagauguccauccagcucaucaacaaggccgucaacgcccucaucaacgaccagcucaucaugaagaaccaccuccgcgacaucaugugcauccccuacugcaacuacuccaaguacugguaccucaaccacaccgucaccggccgcaccucccucccccgcugcuggcucgucuccaacggcuccuaccucaacgagacccacuucuccgacgacaucgagcagcaggccgacaacaugaucaccgagcuccuccagaaggaguacauggaccgccagggcaagaccccccucggccucgucgaccucuucgucuucuccaccuccuucuaccucaucuccaucuuccuccaccucgucaagauccccacccaccgccacaucaucggcaagcccugccccaagccccaccgccucaaccacaugggcgucugcuccugcggccucuacaagcaccccggcguccccgucaaguggaagcgcuga

SEQ ID NO: 4684 - RNA, 1473 nt, Artificial Sequence
  derived and/or modified protein sequence (opt2) from LASV(Lassa virus/H.sapiens-wt/NGA/2016/ISTH_1604;Clade II)__AVO03541__GPCstabilized
augggccagaucgucaccuucuuccaggaggucccccacgucaucgaggagaucaugaacaucguccucaucacccucucccuccucgccauccucaagggcgucuacaaccucgccaccugcggccucaucggccucaucaccuuccucuuccucugcggccgcuccugcuccaugaccuacaagggcuccuaccagcucgagacccucgagcucaacauggagacccucaacaugaccaugccccucuccugcaccaagaacaccucccaccacuacauccgcgucggcaacgagaccggccucgagcucacccucaccaacaccuccaucaucaaccacaaguucugcaaccucuccgacgcccacaagaagaaccucuacgaccacucccucauguccaucgucuccaccuuccaccucuccauccccaacuucaaccaguacgaggccauguccugcgacuucaacggcggcaagaucuccauccaguacaaccucucccacgccuacgccggcgacgccgccaagcacugcggcacccucgccaacggcguccuccagaccuucaugcgcauggccuggggcggcuccuacaucgcccucgacuccggcugcggcaacugggacugcaucaugaccuccuaccaguaccucaucauccagaacaccaccugggaggaccacugccaguucucccgccccucccccaucggcuaccucggccuccucucccagcgcacccgcgagaucuacaucucccgccgccgccggggcaccuucaccuggacccucuccgacuccgagggcaacgaggcccccggcggcuacugccucacccgcuggaugcucaucgaggccgagcucaagugcuucggcaacgccgccgucgccaagugcaacgagaagcacgacgaggaguucugcgacaugcuccgccucuucgacuucaacaagcaggccauccagcgccucaagacccccgcccagauguccauccagcucaucaacaaggccgucaacgcccucaucaacgaccagcucaucaugaagaaccaccuccgcgacaucaugugcauccccuacugcaacuacuccaaguacugguaccucaaccacaccaccaccggccgcaccucccucccccgcugcuggcucgucuccaacggcuccuaccucaacgagacccacuucuccgacgacaucgagcagcaggccgacaacaugaucaccgagaugcuccagaaggaguacaucgaccgccagggcaagaccccccucggccucgucgaccucuucgucuucuccaccuccuucuaccucaucuccaucuuccuccaccucgucaagauccccacccaccgccacaucgucggcaaguccugccccaagccccaccgccucaaccacaugggcaucugcuccugcggccucuacaagcagcccggcguccccguccgcuggaagcgcuga

SEQ ID NO: 4685 - RNA, 1473 nt, Artificial Sequence
  derived and/or modified protein sequence (opt2) from LASV(Lassa virus/H.sapiens-wt/NGA/2016/ISTH_1609;Clade II)__AVO03661__GPCstabilized
augggccagaucgucaccuucuuccaggagaucccccacgucaucgaggaggucaugaacaucguccucaucacccucucccuccucgccguccucaagggcaucuacaacuucgccaccugcggccucaucggccucaucaccuuccucuuccucugcggccgcuccugcuccaccaucuacaagggcuccuaccagcuccagaagcucgagcucaacauggagacccucaacaugaccaugccccucuccugcaccaagaacuccucccaccacuacauccgcgucggcaacgagaccggccucgagcucacccucaccaacaccuccaucaucucccacaaguucugcaaccucuccgacgcccacaagaagaaccucuacgaccacgcccucauguccaucaucuccaccuuccaccucuccauccccaacuucaaccaguacgaggccauguccugcgacuucaacggcggcaagaucuccguccaguacaaccucucccacuccuacgccggcgacgccgcccgccacugcggcacccucgccaacggcguccuccagaccuucaugcgcauggccuggggcggcuccuacaucgcccucgacuccggcugcggcaacugggacugcaucaugaccuccuaccaguuccucaucauccagaacaccaccugggaggaccacugccaguucucccgccccucccccaugggcuaccucggccuccucucccagcgcacccgcgacaucuacaucucccgccgccgccggggcaccuucaccuggacccucuccgacuccgagggcaaggagacccccggcggcuacugccucacccgcuggaugcucaucgaggccgagcucaagugcuucggcaacaccgccgucgccaagugcaacgagaagcacgacgaggaguucugcgacaugcuccgccucuucgacuucaacaagcaggccauccagcgccucaagacccccgcccagauguccauccagcucaucaacaaggccgucaacgcccucaucaacgaccagcucaucaugaagaaccaccuccgcgacaucaugugcauccccuacugcaacuacucccaguacugguaccucaaccacaccaucaccggcaagaccucccuccccaagugcuggcucgucuccaacggcuccuaccucaacgagacccacuucuccgacgacaucgagcagcaggccgacaacaugaucaccgagaugcuccagaaggaguacaucgaccgccagggcaagaccccccucggccucgucgaccucuucgucuucuccaccuccuucuaccucaucuccaucuuccuccaccucaucaagauccccacccaccgccacaucgucggcaaguccugccccaagccccaccgccucaaccgcaugggcaucugcuccugcggccucuacaagcagcccggcguccccgucaaguggaagcgcuga

SEQ ID NO: 4686 - RNA, 1473 nt, Artificial Sequence
  derived and/or modified protein sequence (opt2) from LASV(Lassa virus/H.sapiens-wt/NGA/2016/ISTH_1610;Clade II)__AVO03603__GPCstabilized
augggccagaucaucaccuucuuccaggaggucccccacgucaucgaggaggucaugaacaucguccucaucgcccucucccuccucgccauccucaagggcaucuacaacgucgccaccugcggccucuucggccucgucuccuuccucuuccucugcggccgcuccugcuccaccaccuacaagggcgucuacgagcuccagacccucgagcucgacauggccucccucaacaugaccaugccccucuccugcaccaagaacaacucccaccacuacaucauggucggcaacgagaccggccucgagcucacccucaccaacaccuccaucaucaaccacaaguucugcaaccucuccgacgcccacaagaagaaccucuacgaccacgcccucauguccaucaucuccaccuuccaccucuccauccccaacuucaaccaguacgaggccauguccugcgacuucaacggcggcaagaucuccguccaguacaaccucucccacaccuacgccaucgacgccgccaaccacugcggcaccaucgccaacggcguccuccagaccuucaugcgcauggccuggggcggcuccuacaucgcccucgacuccggcugcggcuccugggacugcaucaugaccuccuaccaguaccucaucauccagaacaccaccugggaggaccacugccaguucucccgccccucccccaucggcuaccucggccuccucucccagcgcacccgcgacaucuacaucucccgccgccgccggggcaccuucaccuggacccucuccgacuccgagggcaacgagacccccggcggcuacugccucacccgcuggaugcucaucgaggccgagcucaagugcuucggcaacaccgccgucgccaagugcaacgagaagcacgacgaggaguucugcgacaugcuccgccucuucgacuucaacaagcaggccauccgccgccucaaggcccccgcccagaugaacauccagcucaucaacaaggccgucaacgcccucaucaacgaccagcucaucaugaagaaccaccuccgcgacaucaugugcauccccuacugcaacuacuccaaguacugguaccucaaccacaccgucaccggccgcaccucccucccccgcugcuggcucgucuccaacggcuccuaccucaacgagacccacuucuccgacgacaucgagcagcaggccgacaacaugaucaccgagcuccuccagaaggaguacauggaccgccagggcaagaccccccucggccucgucgaccucuucgucuucuccaccuccuucuaccucaucuccaucuuccuccaccucaucaagauccccacccaccgccacaucgucggcaagcccugccccaagccccaccgccucaaccacaugggcaucugcuccugcggccucuacaagcaccccggcguccccgucaaguggaagcgcuga

SEQ ID NO: 4687 - RNA, 1473 nt, Artificial Sequence
  derived and/or modified protein sequence (opt2) from LASV(Lassa virus/H.sapiens-wt/NGA/2018/ISTH_0959;Clade II)__AVV65099__GPCstabilized
augggccagaucaucaccuucuuccaggaggucccccacgucaucgaggaggucaugaacaucguccucaucgcccucucccuccucgccauccucaagggcaucuacaacgucgucaccugcggccucuucggccucgucuccuuccuccuccucugcggccgcuccugcuccaccaccuacaagggcgucuacgagcuccagacccucgagcucgacauggccucccucaacaugaccaugccccucuccugcaccaagaacaacucccaccacuacaucauggucggcaacgagaccggccucgagcucacccucaccaacaccuccaucaucaaccacaaguucugcaaccucuccgacgcccacaagaagaaccucuacgaccacgcccucauguccaucaucuccaccuuccaccucuccauccccaacuucaaccaguacgaggccauguccugcgacuucaacggcggcaagaucuccguccaguacaaccucucccacgccuacgccaucgacgccgccaaccacugcggcaccaucgccaacggcguccuccagaccuucaugcgcauggccuggggcggcuccuacaucgcccucgacuccggcugcggcuccugggacugcaucaugaccuccuaccaguaccucaucauccagaacaccaccugggaggaccacugccaguucucccgccccucccccaucggcuaccucggccuccucucccagcgcacccgcgacaucuacaucucccgccgccgccggggcaccuucaccuggacccucuccgacuccgagggcaacgagacccccggcggcuacugccucacccgcuggaugcucaucgaggccgagcucaagugcuucggcaacaccgccgucgccaagugcaacgagaagcacgacgaggaguucugcgacaugcuccgccucuucgacuucaacaagcaggccauccgccgccucaagacccccgcccagauguccauccagcucaucaacaaggccgucaacgcccucaucaacgaccagcucaucaugaagaaccaccuccgcgacaucaugugcauccccuacugcaacuacuccaaguacugguaccucaaccacaccgucaccggcaagaccucccucccccgcugcuggcucgucuccaacggcuccuaccucaacgagacccacuucuccgacgacaucgagcagcaggccgacaacaugaucaccgagcuccuccagaaggaguacaucgaccgccagggcaagaccccccucggccucgucgaccucuucgucuucuccaccuccuucuaccucaucuccaucuuccuccaccucgucaagauccccacccaccgccacgucaucggcaagcccugccccaagccccaccgccucaaccacaugggcaucugcuccugcggccucuacaagcaccccggcguccccgucaaguggaagcgcuga

SEQ ID NO: 4688 - RNA, 1473 nt, Artificial Sequence
  derived and/or modified protein sequence (opt2) from LASV(Lassa virus/H.sapiens-wt/NGA/2018/ISTH_1024;Clade II)__AVV65105__GPCstabilized
augggccagaucaucaccuucuuccaggaggucccccacgucaucgaggaggucaugaacaucguccucaucgcccucucccuccucgccauccucaagggcgucuacaacgucgccaccugcggccucuucggccucgucuccuuccuccuccucugcggccgcuccugcuccaccaccuacaagggcgucuacgagcuccagacccucgagcucgacauggccaaccucaacaugaccaugccccucuccugcaccaagaacaacucccaccacuacauccgcgucggcaacgagaccggccucgagcucacccucaccaacaccuccaucaucaaccacaaguucugcaaccucuccgacgcccacaagaacaaccucuacgaccacgcccucauguccaucaucuccaccuuccaccucuccauccccaacuucaaccaguacgaggccauguccugcgacuucaacggcggcaagaucuccguccaguacaaccucucccacgccuacgccgucgacgccgccaaccacugcggcaccaucgccaacggcguccuccagaccuucaugcgcauggccuggggcggcuccuacaucgcccucgacuccggcugcggcuccugggacugcaucaugaccuccuaccaguaccucaucauccagaacaccaccugggaggaccacugccaguucucccgccccucccccaucggcuaccucggccuccucucccagcgcacccgcgacaucuacaucucccgccgccgccggggcaccuucaccuggacccucuccgacuccgagggcaacgagacccccggcggcuacugccucacccgcuggaugcucaucgaggccgagcucaagugcuucggcaacaccgccgucgccaagugcaacgagaagcacgacgaggaguucugcgacaugcuccgccucuucgacuucaacaagcaggccauccgccgccucaagacccccgcccagauguccauccagcucaucaacaaggccgucaacgcccucaucaacgaccagcucaucaugaagaaccaccuccgcgacaucaugugcauccccuacugcaacuacuccaaguacugguaccucaaccacaccgucaccggcaagaccucccucccccgcugcuggcucgucuccaacggcaccuaccucaacgagacccacuucuccgacgacaucgagcagcaggccgacaacaugaucaccgagcuccuccagaaggaguacauggaccgccagggcaagaccccccucggccucgucgaccucuucgucuucuccaccuccuucuaccucaucuccaucuuccuccaccucgucaagauccccacccaccgccacgucaucggcaagcccugccccaagccccaccgccucaaccacaugggcaucugcuccugcggccucuacaagcaccccggcguccccgucaaguggaagcgcuga

SEQ ID NO: 4689 - RNA, 1473 nt, Artificial Sequence
  derived and/or modified protein sequence (opt2) from LASV(Lassa virus/H.sapiens-wt/NGA/2018/ISTH_1079;Clade II)__AVV65107__GPCstabilized
augggccagaucaucaccuucuuccaggaggucccccacgucaucgaggaggucaugaacaucguccucaucgcccucucccuccucgccauccucaagggcaucuacaacgucgccaccugcggccucuucggccucgucgccuuccuccuccucugcggccgcuccugcuccaccaccuacaagggcgucuacgagcuccagacccucgagcucgacauggccucccucaacaugaccaugccccucuccugcaccaagaacaacucccaccacuacaucauggucggcaacgagaccggccucgagcucacccucaccaacaccuccaucaucaaccacaaguucugcaaccucuccgacgcccacaagaagaaccucuacgaccacgcccucauguccaucaucuccaccuuccaccucuccauccccaacuucaaccaguacgaggccauguccugcgacuucaacggcggcaagaucuccguccaguacaaccucucccacaccuacgccgucgacgccgccaaccacugcggcaccaucgccaacggcguccuccagaccuucaugcgcauggccuggggcggcuccuacaucgcccucgacuccggcugcggcuccugggacugcaucaugaccuccuaccaguaccucaucauccagaacaccaccugggaggaccacugccaguucucccgccccucccccaucggcuaccucggccuccucucccagcgcacccgcgacaucuacaucucccgccgccgccggggcaccuucaccuggacccucuccgacuccgagggcaacgagacccccggcggcuacugccucacccgcuggaugcucaucgaggccgagcucaagugcuucggcaacaccgccgucgccaagugcaacgagaagcacgacgaggaguucugcgacaugcuccgccucuucgacuucaacaagcaggccauccgccgccucaagacccccgcccagauguccauccagcucaucaacaaggccgucaacgcccucaucaacgaccagcucaucaugaagaaccaccuccgcgacaucaugugcauccccuacugcaacuacuccaaguacugguaccucaaccacaccgucaccggccgcaccucccucccccgcugcuggcucgucuccaacggcuccuaccucaacgagacccacuucuccgacgacaucgagcagcaggccgacaacaugaucaccgagcuccuccagaaggaguacauggaccgccagggcaagaccccccucggccucgucgaccucuucgucuucuccaccuccuucuaccucaucuccaucuuccuccaccucaucaagauccccacccaccgccacgucaucggcaagcccugccccaagccccaccgccucaaccacaugggcaucugcuccugcggccucuacaagcaccccggcguccccgucaaguggaagcgcuga

SEQ ID NO: 4690 - RNA, 1473 nt, Artificial Sequence
  derived and/or modified protein sequence (opt2) from LASV(Lassa virus/H.sapiens-wt/NGA/2018/ISTH_1177;Clade II)__AVV65101__GPCstabilized
augggccagaucaucaccuucuuccaggaggucccccacgucaucgaggaggucaugaacaucguccucaucgcccucucccuccucgccauccucaagggcaucuacaacgucgccaccugcggccucuucggccucgucuccuuccuccuccucugcggccgcuccugcuccaccaccuacaagggcgucuacgagcuccagacccucgagcucgacauggccucccucaacaugaccaugccccucuccugcaccaagaacaacucccaccacuacauccgcgucggcaacgagaccggccucgagcucacccucaccaacaccuccaucaucgaccacaaguucugcaaccucuccgacgcccacaagaagaaccucuacgaccacgcccucauguccaucaucuccaccuuccaccucuccauccccaacuucaaccaguacgaggccauguccugcgacuucaacggcggcaagaucuccguccaguacaaccucucccacaccuacgccgucgacgccgccaaccacugcggcaccaucgccaacggcguccuccagaccuucaugcgcauggccuggggcggcuccuacaucgcccucgacuccggcugcggcuccugggacugcaucaugaccuccuaccaguaccucaucauccagaacaccaccugggaggaccacugccaguucucccgccccucccccaucggcuaccucggccuccucucccagcgcacccgcgacaucuacaucucccgccgccgccggggcaccuucaccuggacccucuccgacuccgagggcaacgagacccccggcggcuacugccucacccgcuggaugcucaucgaggccgagcucaagugcuucggcaacaccgccgucgccaagugcaacgagaagcacgacgaggaguucugcgacaugcuccgccucuucgacuucaacaagcaggccauccgccgccucaagacccccgcccagauguccauccagcucaucaacaaggccgucaacgcccucaucaacgaccagcucaucaugaagaaccaccuccgcgacaucaugugcauccccuacugcaacuacuccaaguacugguaccucaaccacaccaucaccggccgcaccucccucccccgcugcuggcucgucuccaacggcuccuaccucaacgagacccacuucuccgacgacaucgagcagcaggccgacaacaugaucaccgagcuccuccagaaggaguacauggaccgccagggcaagaccccccucggccucgucgaccucuucgucuucuccaccuccuucuaccucaucuccaucuuccuccaccucgucaagauccccacccaccgccacgucaucggcaagcccugccccaagccccaccgccucaaccacaugggcaucugcuccugcggccucuacaagcaccccggcguccccgucaaguggaagcgcuga

SEQ ID NO: 4691 - RNA, 1473 nt, Artificial Sequence
  derived and/or modified protein sequence (opt2) from LASV(Lassa virus/H.sapiens-wt/NGA/2018/ISTH_1375;Clade II)__AVV65115__GPCstabilized
augggccagaucaucaccuucuuccaggaggucccccacgucaucgaggaggucaugaacaucguccucaucgcccucucccuccucgccauccucaagggcaucuacaacaucgccaccugcggccucuucggccucgucuccuuccuccuccucugcggccgcuccugcuccaccaccuacaagggcgucuacgagcuccagacccucgagcucgacauggccucccucaacaugaccaugccccucuccugcaccaagaacaacucccaccacuacaucauggucggcaacgagaccggccucgagcucacccucaccaacaccuccaucaucaaccaccgcuucugcaaccucuccgacgcccacaagaagaaccucuacgaccacgcccucauguccaucaucuccaccuuccaccucuccauccccaacuucaaccaguacgaggccauguccugcgacuucaacggcggcaagaucuccguccaguacaaccucucccacgccuacgccgucgacgccgccaaccacugcggcaccaucgccaacggcguccuccagaccuucaugcgcauggccuggggcggcuccuacaucgcccucgacuccggcugcggcuccugggacugcaucaugaccuccuaccaguaccucaucauccagaacaccaccugggaggaccacugccaguucucccgccccucccccaucggcuaccucggccuccucucccagcgcacccgcgacaucuacaucucccgccgccgccggggcaccuucaccuggacccucuccgacuccgagggcaacgagacccccggcggcuacugccucacccgcuggaugcucaucgaggccgagcucaagugcuucggcaacaccgccgucgccaagugcaacgagaagcacgacgaggaguucugcgacaugcuccgccucuucgacuucaacaagcaggccauccgccgccucaagacccccgcccagauguccauccagcucaucaacaaggccgucaacgcccucaucaacgaccagcucaucaugaagaaccaccuccgcgacaucaugugcauccccuacugcaacuacuccaaguacugguaccucaaccacaccgucaccggcaagaccucccucccccgcugcuggcucgucuccaacggcuccuaccucaacgagacccacuucuccgacgacaucgagcagcaggccgacaacaugaucaccgagcuccuccagaaggaguacaucgaccgccagggcaagaccccccucggccucgucgaccucuucgucuucuccaccuccuucuaccucaucuccaucuuccuccaccucgucaagauccccacccaccgccacgucaucggcaagcccugccccaagccccaccgccucaaccacaugggcaucugcuccugcggccucuacaagcaccccggcguccccgucaaguggaagcgcuga

SEQ ID NO: 4692 - RNA, 1473 nt, Artificial Sequence
  derived and/or modified protein sequence (opt2) from LASV(Lassa virus/H.sapiens-wt/NGA/2018/ISTH_1381;Clade II)__AVV65111__GPCstabilized
augggccagaucgucaccuucuuccaggaggucccccacgucaucgaggaggucaugaacaucguccucaucgcccucucccuccucgccauccucaagggcaucuacaacgucgccaccugcggccucuucggccucgucuccuuccuccuccucugcggccgcuccugcuccaccaccuacaagggcgucuacgagcuccagacccucgagcucgacauggccucccucaacaugaccaugccccucuccugcaccaagaacaacucccaccacuacaucauggucggcaacgagaccggccucgagcucacccucaccaacaccuccaucaucaaccacaaguucugcaaccucuccgacgcccacaagaagaaccucuacgaccacgcccucauguccaucaucuccaccuuccaccucuccauccccaacuucaaccaguacgaggccauguccugcgacuucaacggcggcaagaucuccguccaguacaaccucucccacaccuacgccgucgacgccgccaaccacugcggcaccaucgccaacggcguccuccagaccuucaugcgcauggccuggggcggcuccuacaucgcccucgacuccggcugcggcuccugggacugcaucaugaccuccuaccaguaccucaucauccagaacaccaccugggaggaccacugccaguucucccgccccucccccaucggcuaccucggccuccucucccagcgcacccgcgacaucuacaucucccgccgccgccggggcaccuucaccuggacccucuccgacuccgagggcaacgagacccccggcggcuacugccucacccgcuggaugcucaucgaggccgagcucaagugcuucggcaacaccgccgucgccaagugcaacgagaagcacgacgaggaguucugcgacaugcuccgccucuucgacuucaacaagcaggccauccgccgccucaagacccccgcccagauguccauccagcucaucaacaaggccgucaacgcccucaucaacgaccagcucaucaugaagaaccaccuccgcgacaucaugugcauccccuacugcaacuacuccaaguacugguaccucaaccacaccgucaccggcaagaccucccucccccgcugcuggcucgucuccaacggcuccuaccucaacgagacccacuucuccgacgacaucgagcagcaggccgacaacaugaucaccgagcuccuccagaaggaguacauggaccgccagggcaagaccccccucggccucgucgaccucuucgucuucuccaccuccuucuaccucaucuccaucuuccuccaccucgucaagauccccacccaccgccacgucgucggcaagcccugccccaagccccaccgccucaaccacaugggcaucugcuccugcggccucuacaagcaccccggcguccccguccgcuggaagcgcuga

SEQ ID NO: 4693 - RNA, 1473 nt, Artificial Sequence
  derived and/or modified protein sequence (opt2) from LASV(Lassa virus/H.sapiens-wt/NGA/2018/ISTH_1643;Clade II)__AVV65119__GPCstabilized
augggccagaucaucaccuucuuccaggaggucccccacgucaucgaggaggucaugaacaucguccucaucgcccucucccuccucgccauccucaagggcaucuacaacgucgccaccugcggccucuucggccucgucuccuuccuccuccucugcggccgcuccugcuccaccaccuacaagggcgucuacgagcuccagacccucgagcucgacauggccucccucaacaugaccaugccccucuccugcaccaagaacaacucccaccacuacaucauggucggcaacgagaccggccucgagcucacccucaccaacaccuccaucaucaaccacaaguucugcaaccucuccgacgcccacaagaagaaccucuacgaccacgcccucauguccaucaucuccaccuuccaccucuccauccccaacuucaaccaguacgaggccauguccugcgacuucaacggcggcaagaucuccguccaguacaaccucucccacaccuacgccgucgacgccgccaaccacugcggcaccaucgccaacggcguccuccagaccuucaugcgcauggccuggggcggcuccuacaucgcccucgacuccggcugcggcuccugggacugcaucaugaccuccuaccaguaccucaucauccagaacaccuccugggaggaccacugccaguucucccgccccucccccaucggcuaccucggccuccucucccagcgcacccgcgacaucuacaucucccgccgccgccggggcaccuucaccuggacccucuccgacuccgagggcaacgagacccccggcggcuacugccucacccgcuggaugcucaucgaggccgagcucaagugcuucggcaacaccgccgucgccaagugcaacgagaagcacgacgaggaguucugcgacaugcuccgccucuucgacuucaacaagcaggccauccgccgccucaagacccccgcccagauguccauccagcucaucaacaaggccgucaacgcccucaucaacgaccagcucaucaugaagaaccaccuccgcgacaucaugugcauccccuacugcaacuacuccaaguacugguaccucaaccacaccgucaccggcaagaccucccucccccgcugcuggcucgucuccaacggcaccuaccucaacgagacccacuucuccgacgacaucgagcagcaggccgacaacaugaucaccgagcuccuccagaaggaguacaucgaccgccagggcaagaccccccucggccucgucgaccucuucgucuucuccaccuccuucuaccucaucuccaucuuccuccaccucgucaagauccccacccaccgccacgucaucggcaagcccugccccaagccccaccgccucaaccacaugggcaucugcuccugcggccucuacaagcaccccggcguccccgucaaguggaagcgcuga

SEQ ID NO: 4694 - RNA, 1473 nt, Artificial Sequence
  derived and/or modified protein sequence (opt2) from LASV(LASV003-NIG-2008;Clade II)__AIT17580__GPCstabilized
augggccagaucaucaccuucuuccaggaggucccccacgucaucgaggaggucaugaacaucguccucaucgcccucucccuccucgccauccucaagggcaucuacaacgucgccaccugcggccucuucggccucgucuccuuccuccuccucugcggccgcuccugcuccaccaccuacaagggcgucuacgagcuccagacccucgagcucgacauggccucccucaacaugaccaugccccucuccugcaccaagaacaacucccaccacuacaucauggucggcaacgagaccggccucgagcucacccucaccaacaccuccaucaucaaccacaaguucugcaaccucuccgacgcccacaagaagaaccucuacgaccacgcccucauguccaucaucuccaccuuccaccucuccauccccaacuucaaccaguacgaggccauguccugcgacuucaacggcggcaagaucuccguccaguacaaccucucccacaccuacgccgucgacgccgccaaccacugcggcaccaucgccaacggcguccuccagaccuucaugcgcauggccuggggcggcuccuacaucgcccucgacuccggcugcggcuccugggacugcaucaugaccuccuaccaguaccucaucauccagaacaccaccugggaggaccacugccaguucucccgccccucccccaucggcuaccucggccuccucucccagcgcacccgcgacaucuacaucucccgccgccgccggggcaccuucaccuggacccucuccgacuccgaguccaacgagacccccggcggcuacugccucacccgcuggaugcucaucgaggccgagcucaagugcuucggcaacaccgccgucgccaagugcaacgagaagcacgacgaggaguucugcgacaugcuccgccucuucgacuucaacaagcaggccauccgccgccucaaggcccccgcccagauguccauccagcucaucaacaaggccgucaacgcccucaucaacgaccagcucaucaugaagaaccaccuccgcgacaucaugugcauccccuacugcaacuacuccaaguacugguaccucaaccacaccgucaccggccgcaccucccucccccgcugcuggcucgucuccaacggcuccuaccucaacgagacccacuucuccgacgacaucgagcagcaggccgacaacaugaucaccgagcuccuccagaaggaguacauggaccgccagggcaagaccccccucggccucgucgaccucuucgucuucuccaccuccuucuaccucaucuccaucuuccuccaccucgucaagauccccacccaccgccacgucaucggcaagcccugccccaagccccaccgccucaaccacaugggcaucugcuccugcggccucuacaagcaccccggcguccccgucaaguggaagcgcuga

SEQ ID NO: 4695 - RNA, 1473 nt, Artificial Sequence
  derived and/or modified protein sequence (opt2) from LASV(LASV006-NIG-2008;Clade II)__AIT17584__GPCstabilized
augggccagaucaucaccuucuuccaggaggucccccaggucaucgaggaggucaugaacaucguccucaucgcccucucccuccucgccauccucaagggcaucuacaacgucgccaccugcggccucuucggccucgucuccuuccuccuccucugcggccgcuccugcuccaccaccuacaagggcgucuacgagcuccagacccucgagcucgacauggccucccucaacaugaccaugccccucuccugcaccaagaacaacucccaccacuacaucauggucggcaacgagaccggccucgagcucacccucaccaaccaguccaucaucaaccacaaguucugcaaccucuccgacgcccacaagaagaaccucuacgaccacgcccucauguccaucaucuccaccuuccaccucuccauccccaacuucaaccaguacgaggccauguccugcgacuucaacggcggcaagaucuccguccaguacaaccucucccacuccuucgccgucgacgccgccaaccacugcggcaccaucgccaacggcguccuccagaccuucaugcgcauggccuggggcggcuccuacaucgcccucgacuccggcugcggcuccugggacugcaucaugaccuccuaccaguaccucaucauccagaacaccaccugggaggaccacugccaguucucccgccccucccccaucggcuaccucggccuccucucccagcgcacccgcgacaucuacaucucccgccgccgccggggcaccuucaccuggacccucuccgacuccgagggcaacgagacccccggcggcuacugccucacccgcuggaugcucaucgaggccgagcucaagugcuucggcaacaccgccgucgccaagugcaacgagaagcacgacgaggaguucugcgacaugcuccgccucuucgacuucaacaagcaggccauccgccgccucaagacccccgcccagauguccauccagcucaucaacaaggccgucaacgcccucaucaacgaccagcucaucaugaagaaccaccuccgcgacaucaugugcauccccuacugcaacuacuccaaguacugguaccucaaccacaccaagaccggcaagaccucccucccccgcugcuggcucgucuccaacggcuccuaccucaacgagacccacuucuccgacgacaucgagcagcaggccgacaacaugaucaccgagcuccuccagaaggaguacauggaccgccagggcaagaccccccucggccucgucgaccucuucgucuucuccaccuccuucuaccucaucuccaucuuccuccaccucgucaagauccccacccaccgccacgucaucggcaagcccugccccaagccccaccgccucaaccacaugggcaucugcuccugcggccucuacaagcaccccggcguccccgucaaguggaagcgcuga

SEQ ID NO: 4696 - RNA, 1473 nt, Artificial Sequence
  derived and/or modified protein sequence (opt2) from LASV(LASV035-NIG-2009;Clade II)__AIT17588__GPCstabilized
augggccagaucaucaccuucuuccaggaggucccccacgucaucgaggaggucaugaacaucguccucaucgcccucucccuccucgccauccucaagggcaucuacaacgucgccaccugcggccucuucggccucgucuccuuccuccuccucugcggccgcuccugcuccaccaccuacaagggcgucuacgagcuccagacccucgagcucgacauggccucccucaacaugaccaugccccucuccugcaccaagaacaacucccaccacuacaucauggucggcaacgagaccggccucgagcucacccucaccaacaccuccaucaucaaccacaaguucugcaaccucuccgacgcccacaagaagaaccucuacgaccacgcccucauguccaucaucuccaccuuccaccucuccauccccaacuucaaccaguacgaggccauguccugcgacuucaacggcggcaagaucuccguccaguacaaccucucccacgccuacgccgucgacgccgccaaccacugcggcaccaucgccaacggcguccuccagaccuucaugcgcauggccuggggcggcuccuacaucgcccucgacuccggcugcggcuccugggacugcaucaugaccuccuaccaguaccucaucauccagaacaccaccugggaggaccacugccaguucucccgccccucccccaucggcuaccucggccuccucucccagcgcacccgcgacaucuacaucucccgccgccgccggggcaccuucaccuggacccucuccgacuccgagggcaacgagacccccggcggcuacugccucacccgcuggaugcucaucgaggccgagcucaagugcuucggcaacaccgccgucgccaagugcaacgagaagcacgacgaggaguucugcgacaugcuccgccucuucgacuucaacaagcaggccauccgccgccucaaggcccccgcccagauguccauccagcucaucaacaaggccgucaacgcccucaucaacgaccagcucaucaugaagaaccaccuccgcgacaucaugugcauccccuacugcaacuacuccaaguacugguaccucaaccacaccgucaccggcaagaccucccucccccgcugcuggcucgucuccaacggcuccuaccucaacgagacccacuucuccgacgacaucgagcagcaggccgacaacaugaucaccgagcuccuccagaaggaguacaucgaccgccagggcaagaccccccucggccucgucgaccucuucgucuucuccaccuccuucuaccucaucuccaucuuccuccaccucgucaagauccccacccaccgccacgucaucggcaagcccugccccaagccccaccgccucaaccacaugggcaucugcuccugcggccucuacaagcaccccggcguccccgucaaguggaagcgcuga

SEQ ID NO: 4697 - RNA, 1473 nt, Artificial Sequence
  derived and/or modified protein sequence (opt2) from LASV(LASV042-NIG-2009;Clade II)__AIT17592__GPCstabilized
augggccagaucaucaccuucuuccaggaggucccccacgucaucgaggaggucaugaacaucguccucaucgcccucucccuccucgccauccucaagggcaucuacaacgucgccaccugcggccucuucggccucgucuccuuccuccuccucugcggccgcuccugcuccaccaccuacaagggcgucuacgagcuccagacccucgagcucgacauggccucccucaacaugaccaugccccucuccugcaccaagaacaacucccaccacuacaucauggucggcaacgagaccggccucgagcucacccucaccaacaccuccaucaucaaccacaaguucugcaaccucuccgacgcccacaagaagaaccucuacgaccacacccucauguccaucaucuccaccuuccaccucuccauccccaacuucaaccaguacgaggccauguccugcgacuucaacggcggccgcaucuccguccaguacaaccucucccacgccuacgccgucgacgccgccaaccacugcggcaccaucgccaacggcguccuccagaccuucaugcgcauggccuggggcggcuccuacaucgcccucgacuccggcugcggcuccugggacugcaucaugaccuccuaccaguaccucaucauccagaacaccaccugggaggaccacugccaguucucccgccccucccccaucggcuaccucggccuccucucccagcgcacccgcgacaucuacaucucccgccgccgccggggcaccuucaccuggacccucuccgacuccgagggcaacgagacccccggcggcuacugccucacccgcuggaugcucaucgaggccgagcucaagugcuucggcaacaccgccgucgccaagugcaacgagaagcacgacgaggaguucugcgacaugcuccgccucuucgacuucaacaagcaggccauccgccgccucaagacccccgcccagauguccauccagcucaucaacaaggccgucaacgcccucaucaacgaccagcucaucaugaagaaccaccuccgcgacaucaugugcauccccuacugcaacuacuccaaguacugguaccucaaccacaccaucaccggcaagaccucccucccccgcugcuggcucgucuccaacggcuccuaccucaacgagacccacuucuccgacgacaucgagcagcaggccgacaacaugaucaccgagcuccuccagaaggaguacaucgaccgccagggcaagaccccccucggccucgucgaccucuucgucuucuccaccuccuucuaccucaucuccaucuuccuccaccucgucaagauccccacccaccgccacgucgucggcaagcccugccccaagccccaccgccucaaccacaugggcaucugcuccugcggccucuacaagcaccccggcguccccgucaaguggaagcgcuga

SEQ ID NO: 4698 - RNA, 1473 nt, Artificial Sequence
  derived and/or modified protein sequence (opt2) from LASV(LASV045-NIG-2009;Clade II)__AIT17596__GPCstabilized
augggccagaucaucaccuucuuccaggaggucccccacgucaucgaggaggucaugaacaucguccucaucgcccucucccuccucgccauccucaagggcaucuacaacgucgccaccugcggccucuucggccucgucuccuuccuccuccucugcggccgcuccugcuccaccaccuacaagggcgucuacgagcuccagacccucgagcucgacauggccucccucaacaugaccaugccccucuccugcaccaagaacaacucccaccacuacaucauggucggcaacgagaccggccucgagcucacccucaccaacaccuccaucaucaaccacaaguucugcaaccucuccgacgcccacaagaagaaccucuacgaccacgcccucauguccaucaucuccaccuuccaccucuccauccccaacuucaaccaguacgaggccauguccugcgacuucaacggcggcaagaucuccguccaguacaaccucucccacaccuacgccgucgacgccgccaaccacugcggcaccaucgccaacggcguccuccagaccuucaugcgcauggccuggggcggcuccuacaucgcccucgacuccggcugcggcuccugggacugcaucaugaccuccuaccaguaccucaucauccagaacaccuccugggaggaccacugccaguucucccgccccucccccaucggcuaccucggccuccucucccagcgcacccgcgacaucuacaucucccgccgccgccggggcaccuucaccuggacccucuccgacuccgagggcaacgagacccccggcggcuacugccucacccgcuggaugcucaucgaggccgagcucaagugcuucggcaacaccgccgucgccaagugcaacgagaagcacgacgaggaguucugcgacaugcuccgccucuucgacuucaacaagcaggccauccgccgccucaagacccccgcccagauguccauccagcucaucaacaaggccgucaacgcccucaucaacgaccagcucaucaugaagaaccaccuccgcgacaucaugugcauccccuacugcaacuacuccaaguacugguaccucaaccacaccgucaccggcaagaccucccucccccgcugcuggcucgucuccaacggcuccuaccucaacgagacccacuucuccgacgacaucgagcagcaggccgacaacaugaucaccgagcuccuccagaaggaguacaucgaccgccagggcaagaccccccucggccucgucgaccucuucgucuucuccaccuccuucuaccucaucuccaucuuccuccaccucgucaagauccccacccaccgccacgucaucggcaagcccugccccaagccccaccgccucaaccacaugggcaucugcuccugcggccucuacaagcaccccggcguccccgucaaguggaagcgcuga

SEQ ID NO: 4699 - RNA, 1473 nt, Artificial Sequence
  derived and/or modified protein sequence (opt2) from LASV(LASV046-NIG-2009;Clade II)__AIT17600__GPCstabilized
augggccagaucaucaccuucuuccaggaggucccccacgucaucgaggaggucaugaacaucguccucaucgcccucucccuccucgccauccucaagggcaucuacaacgucgccaccugcggccucuucggccucgucuccuuccuccuccucugcggccgcuccugcuccaccaccuacaagggcgucuacgagcuccagacccucgagcucgacauggccucccucaacaugaccaugccccucuccugcaccaagaacaacucccaccacuacaucauggucggcaacgagaccggccucgagcucacccucaccaacaccuccaucaucaaccacaaguucugcaaccucuccgacgcccacaagaagaaccucuacgaccacgcccucauguccaucaucuccaccuuccaccucuccauccccaacuucaaccaguacgaggccauguccugcgacuucaacggcggcaagaucuccguccaguacaaccucucccacgccuacgccggcgacgccgccaaccacugcggcaccaucgccaacggcguccuccagaccuucaugcgcauggccuggggcggcuccuacaucgcccucgacuccggcugcggcuccugggacugcaucaugaccuccuaccaguaccucaucauccagaacaccaccugggaggaccacugccaguucucccgccccucccccaucggcuaccucggccuccucucccagcgcacccgcgacaucuacaucucccgccgccgccggggcaccuucaccuggacccucuccgacuccgagggcaacgagacccccggcggcuacugccucacccgcuggaugcucaucgaggccgagcucaagugcuucggcaacaccgccgucgccaagugcaacgagaagcacgacgaggaguucugcgacaugcuccgccucuucgacuucaacaagcaggccauccgccgccucaagacccccgcccagauguccauccagcucaucaacaaggccgucaacgcccucaucaacgaccagcucaucaugaagaaccaccuccgcgacaucaugugcauccccuacugcaacuacuccaaguacugguaccucaaccacaccgucaccggcaagaccucccucccccgcugcuggcucgucuccaacggcuccuaccucaacgagacccacuucuccgacgacaucgagcagcaggccgacaacaugaucaccgagcuccuccagaaggaguacaucgaccgccagggcaagaccccccucggccucgucgaccucuucgucuucuccaccuccuucuaccucaucuccaucuuccuccaccucgucaagauccccacccaccgccacgucaucggcaagcccugccccaagccccaccgccucaaccacaugggcaucugcuccugcggccucuacaagcaccccggcguccccgucaaguggaagcgcuga

SEQ ID NO: 4700 - RNA, 1473 nt, Artificial Sequence
  derived and/or modified protein sequence (opt2) from LASV(LASV049-NIG-2009;Clade II)__AIT17604__GPCstabilized
augggccagaucaucaccuucuuccaggaggucccccacgucaucgaggaggucaugaacaucguccucaucgcccucucccuccucgccauccucaagggcaucuacaacgucgccaccugcggccucuucggccucgucuccuuccuccuccucugcggccgcuccugcuccaccaccuacaagggcgucuacgagcuccagacccucgagcucgacaugaccucccucaacaugaccaugccccucuccugcaccaagaacaacucccaccacuacaucauggucggcaacgagaccggccucgagcucacccucaccaacaccuccaucaucaaccacaaguucugcaaccucuccgacgcccacaagaaggaccucuacgaccacgcccucauguccaucaucuccaccuuccaccucuccauccccaacuucaaccaguacgaggccauguccugcgacuucaacggcggcaagaucuccguccaguacaaccucucccacaccuacgccgucgacgccgccaagcacugcggcaccaucgccaacggcguccuccagaccuucaugcgcauggccuggggcggcuccuacaucgcccucgacuccggcugcggcuccugggacugcaucaugaccuccuaccaguaccucaucauccagaacaccaccugggaggaccacugccaguucucccgccccucccccgucggcuaccucggccuccucucccagcgcacccgcgacaucuacaucucccgccgccgccggggcaccuucaccuggacccucuccgacuccgagggcaacgagacccccggcggcuacugccucacccgcuggaugcucaucgaggccgagcucaagugcuucggcaacaccgccgucgccaagugcaacgagaagcacgacgaggaguucugcgacaugcuccgccucuucgacuucaacaagcaggccauccgccgccucaagacccccgcccagauguccauccagcucaucaacaaggccgucaacgcccucaucaacgaccagcucaucaugaagaaccaccuccgcgacaucaugugcauccccuacugcaacuacuccaaguacugguaccucaaccacaccgucaccggcaagaccucccucccccgcugcuggcucgucuccaacggcuccuaccucaacgagacccacuucuccgacgacaucgagcagcaggccgacaacaugaucaccgagcuccuccagaaggaguaccucgaccgccagggcaagaccccccucggccucgucgaccucuucgucuucuccaccuccuucuaccucaucuccaucuuccuccaccucgucaagauccccacccaccgccacgucaucggcaagcccugccccaagccccaccgccucaaccacaugggcaucugcuccugcggccucuacaagcaccccggcguccccgucaaguggaagcgcuga

SEQ ID NO: 4701 - RNA, 1473 nt, Artificial Sequence
  derived and/or modified protein sequence (opt2) from LASV(LASV052-NIG-2008;Clade II)__AIT17608__GPCstabilized
augggccagaucaucaccuucuuccaggaggucccccacgucaucgaggaggucaugaacaucguccucaucgcccucucccuccucgccauccucaagggcaucuacaacgucgccaccugcggccucuucggccucgucuccuuccuccuccucugcggccgcuccugcuccaccaccuacaagggcgucuacgagcuccagacccucgagcucgacauggccucccucaacaugaccaugccccucuccugcaccaagaacaacucccaccacuacaucauggucggcaacgagaccggccucgagcucacccucaccaacaccuccaucaucaaccacaaguucugcaaccucuccgacgcccacaagcgcaaccucuacaaccacgcccucauguccaucaucuccaccuuccaccucuccauccccaacuucaaccaguacgaggccauguccugcgacuucaacggcggcaagaucuccguccaguacaaccucucccacaccuacgccgucgacgccgccaaccacugcggcaccaucgccaacggcguccuccagaccuucaugcgcauggccuggggcggcuccuacaucgcccucgacuccggcugcggcuccugggacugcaucaugaccuccuaccaguaccucaucauccagaacaccaccugggaggaccacugccaguucucccgccccucccccaucggcuaccucggccuccucucccagcgcacccgcgacaucuacaucucccgccgccgccggggcaccuucaccuggacccucuccgacuccgagggcaacgagacccccggcggcuacugccucacccgcuggaugcucaucgaggccgagcucaagugcuucggcaacaccgccgucgccaagugcaacgagaagcacgacgaggaguucugcgacaugcuccgccucuucgacuucaacaagcaggccauccgccgccucaagacccccgcccagauguccauccagcucaucaacaaggccgucaacgcccucaucaacgaccagcucaucaugaagaaccaccuccgcgacaucaugugcauccccuacugcaacuacuccaaguacugguaccucaaccacaccgucaccggcaagaccucccucccccgcugcuggcucgucuccaacggcuccuaccucaacgagacccacuucuccgacgacaucgagcagcaggccgacaacaugaucaccgagcuccuccagaaggaguacaucgaccgccagggcaagaccccccucggccucgucgaccucuucgucuucuccaccuccuucuaccucaucuccaucuuccuccaccucgucaagauccccacccaccgccacaucaucggcaagcccugccccaagccccaccgccucaaccacaugggcaucugcuccugcggccucuacaagcaccccggcguccccgucaaguggcgccgcuga

SEQ ID NO: 4702 - RNA, 1473 nt, Artificial Sequence
  derived and/or modified protein sequence (opt2) from LASV(LASV056-NIG-2008;Clade II)__AIT17612__GPCstabilized
augggccagaucaucaccuucuuccaggaggucccccacgucaucgaggaggucaugaacaucguccucaucgcccucucccuccucgccauccucaagggcaucuacaacgucgccaccugcggccucuucggccucgucuccuuccuccuccucugcggccgcuccugcuccaccaccuacaagggcgucuacgagcuccagacccucgagcucgacauggccucccucaacaugaccaugccccucuccugcaccaagaacaacucccaccacuacauccgcgucggcaacgagaccggccucgagcucacccucaccaacaccuccaucaucaaccacaaguucugcaaccucuccgacgcccacaagaagaaccucuacgaccacucccucauguccaucaucuccaccuuccaccucuccauccccaacuucaaccaguacgaggccauguccugcgacuucaacggcggcaagaucuccguccaguacaaccucucccacaccuacgccgucgacgccgccaaccacugcggcaccaucgccaacggcguccuccagaccuucaugcgcauggccuggggcggcuccuacaucgcccucgacuccggcugcggcaacugggacugcaucaugaccuccuaccaguaccucaucauccagaacaccaccugggaggaccacugccaguucucccgccccucccccaucggcuaccucggccuccucucccagcgcacccgcgacaucuacaucucccgccgccgccggggcaccuucaccuggacccucuccgacuccgagggcaacgagacccccggcggcuacugccucacccgcuggaugcucaucgaggccgagcucaagugcuucggcaacaccgccgucgccaagugcaacgagaagcacgacgaggaguucugcgacaugcuccgccucuucgacuucaacaagcaggccauccgccgccucaagacccccgcccagauguccauccagcucaucaacaaggccgucaacgcccucaucaacgaccagcucaucaugaagaaccaccuccgcgacaucaugugcauccccuacugcaacuacuccaaguacugguaccucaaccacaccgucaccggcaagaccucccucccccgcugcuggcucgucuccaacggcuccuaccucaacgagacccacuucuccgacgacaucgagcagcaggccgacaacaugaucaccgagcuccuccagaaggaguacaucgaccgccagggcaagaccccccucggccucgucgaccucuucgucuucuccaccuccuucuaccucaucuccaucuuccuccaccucgucaagauccccacccaccgccacgucgucggcaagcccugccccaagccccaccgccucaaccacaugggcaucugcuccugcggccucuacaagcaccccggcguccccgucaaguggaagcgcuga

SEQ ID NO: 4703 - RNA, 1473 nt, Artificial Sequence
  derived and/or modified protein sequence (opt2) from LASV(LASV058-NIG-2008;Clade II)__AIT17616__GPCstabilized
augggccagaucaucaccuucuuccaggaggucccccacgucaucgaggaggucaugaacaucguccucaucgcccucucccuccucgccauccucaagggcaucuacaacgucgccaccugcggccucuucggccucgucuccuuccuccuccucugcggccgcuccugcuccaccaccuacaagggcgucuacgagcuccagacccucgagcucgacauggccucccucaacaugaccaugccccucuccugcaccaagaacaacucccaccacuacaucauggucggcaacgagaccggccucgagcucacccucaccaacaccuccaucaucaaccacaaguucugcaaccucuccgacgcccacaagaagaaccucuacgaccacgcccucauguccaucaucuccaccuuccaccucuccauccccaacuucaaccaguacgaggccauguccugcgacuucaacggcggcaagaucuccguccaguacaaccucucccacgccuacgccgucgacgccgccaaccacugcggcaccaucgccaacggcguccuccagaccuucaugcgcauggccuggggcggcuccuacaucgcccucgacuccggcugcggcuccugggacugcaucaugaccuccuaccaguaccucaucauccagaacaccaccugggaggaccacugccaguucucccgccccucccccaucggcuaccucggccuccucucccagcgcacccgcgacaucuacaucucccgccgccgccggggcaccuucaccuggacccucuccgacuccgagggcaacgagacccccggcggcuacugccucacccgcuggaugcucaucgaggccgagcucaagugcuucggcaacaccgccgucgccaagugcaacgagaagcacgacgaggaguucugcgacaugcuccgccucuucgacuucaacaagcaggccauccgccgccucaagacccccgcccagauguccauccagcucaucaacaaggccgucaacgcccucaucaacgaccagcucaucaugaagaaccaccuccgcgacaucaugugcauccccuacugcaacuacuccaaguacugguaccucaaccacaccgucaccggcaagaccucccucccccgcugcuggcucgucuccaacggcuccuaccucaacgagacccacuucuccgacgacaucgagcagcaggccgacaacaugaucaccgagcuccuccagaaggaguacaucgaccgccagggcaagaccccccucggccucgucgaccucuucgucuucuccaccuccuucuaccucaucuccaucuuccuccaccucgucaagauccccacccaccgccacgucaucggcaagcccugccccaagccccaccgccucaaccacaugggcaucugcuccugcggccucuacaagcaccccggcguccccgucaaguggaagcgcuga

SEQ ID NO: 4704 - RNA, 1473 nt, Artificial Sequence
  derived and/or modified protein sequence (opt2) from LASV(LASV063-NIG-2009;Clade II)__AIT17620__GPCstabilized
augggccagaucaucaccuucuuccaggaggucccccacgucaucgaggaggucaugaacaucguccucaucgcccucucccuccucgccauccucaagggcaucuacaacgucgccaccugcggccucuucggccucgucuccuuccuccuccucugcggccgcuccugcuccaccaccuacaagggcgucuacgagcuccagacccucgagcucgacauggccucccucaacaugaccaugccccucuccugcaccaagaacaacucccaccacuacaucauggucggcaacgagaccggccucgagcucacccucaccaacaccuccaucaucucccacaaguucugcaaccucuccgacgcccacaagaagaaccucuacgaccacgcccucauguccaucaucuccaccuuccaccucuccauccccaacuucaaccaguacgaggccauguccugcgacuucaacggcggcaagaucuccguccaguacaaccucucccacgccuacgccaucgacgccgccaaccacugcggcaccgucgccaacggcguccuccagaccuucaugcgcauggccuggggcggcuccuacaucgcccucgacuccggcugcggcuccugggacugcaucaugaccuccuaccaguaccucaucauccagaacaccaccugggaggaccacugccaguucucccgccccucccccaucggcuaccucggccuccucucccagcgcacccgcgacaucuacaucucccgccgccgccggggcaccuucaccuggacccucuccgacuccgagggcaacgagacccccggcggcuacugccucacccgcuggaugcucaucgaggccgagcucaagugcuucggcaacaccgccgucgccaagugcaacgagaagcacgacgaggaguucugcgacaugcuccgccucuucgacuucaacaagcaggccauccgccgccucaaggcccccgcccagauguccauccagcucaucaacaaggccgucaacgcccucaucaacgaccagcucaucaugaagaaccaccuccgcgacaucaugugcauccccuacugcaacuacuccaaguacugguaccucaaccacaccgucaccggcaagaccucccucccccgcugcuggcucgucuccaacggcuccuaccucaacgagacccacuucuccgacgacaucgagcagcaggccgacaacaugaucaccgagcuccuccagaaggaguacauggaccgccagggcaagaccccccucggccucgucgaccucuucgucuucuccaccuccuucuaccucaucuccaucuuccuccaccucgucaagauccccacccaccgccacgucaucggcaagcccugccccaagccccaccgccucaaccacaugggcaucugcuccugcggccucuacaagcaccccggcguccccgucaaguggaagcgcuga

SEQ ID NO: 4705 - RNA, 1473 nt, Artificial Sequence
  derived and/or modified protein sequence (opt2) from LASV(LASV1000-NIG-2009;Clade II)__AIT17782__GPCstabilized
augggccagaucaucaccuucuuccaggaggucccccacgucaucgaggaggucaugaacaucguccucaucgcccucucccuccucgccauccucaagggcaucuacaacgucgccaccugcggccucuucggccucgucuccuuccuccuccucugcggccgcuccugcuccaccaccuacaagggcgucuacgagcuccagacccucgagcucgacauggccucccucaacaugaccaugccccucuccugcaccaagaacaacucccaccacuacaucauggucggcaacgagaccggccucgagcucacccucaccaacaccuccaucaucaaccacaaguucugcaaccucuccgacgcccacaagaagaaccucuacgaccacgcccucauguccaucaucuccaccuuccaccucuccauccccaacuucaaccaguacgaggccauguccugcgacuucaacggcggcaagaucuccguccaguacaaccucucccacaccuacgccgucgacgccgccaaccacugcggcaccaucgccaacggcguccuccagaccuucaugcgcauggccuggggcggcuccuacaucgcccucgacuccggcugcggcuccugggacugcaucaugaccuccuaccaguaccucaucauccagaacaccaccugggaggaccacugccaguucucccgccccucccccaucggcuaccucggccuccucucccagcgcacccgcgacaucuacaucucccgccgccgccggggcaccuucaccuggacccucuccgacuccgagggcaacgagacccccggcggcuacugccucacccgcuggaugcucaucgaggccgagcucaagugcuucggcaacaccgccgucgccaagugcaacgagaagcacgacgaggaguucugcgacaugcuccgccucuucgacuucaacaagcaggccaucaagcgccucaagacccccgcccagauguccauccagcucaucaacaaggccgucaacgcccucaucaacgaccagcucaucaugaagaaccaccuccgcgacaucaugugcauccccuacugcaacuacuccaaguacugguaccucaaccacaccgucaccggcaagaccucccucccccgcugcuggcucgucuccaacggcuccuaccucaacgagacccacuucuccgacgacaucgagcagcaggccgacaacaugaucaccgagcuccuccagaaggaguacaucgaccgccagggcaagaccccccucggccucgucgaccucuucgucuucuccaccuccuucuaccucaucuccaucuuccuccaccucgucaagauccccacccaccgccacgucgucggcaagcccugccccaagccccaccgccucaaccacaugggcaucugcuccugcggccucuacaagcaccccggcguccccgucaaguggaagcgcuga

SEQ ID NO: 4706 - RNA, 1473 nt, Artificial Sequence
  derived and/or modified protein sequence (opt2) from LASV(LASV1008-NIG-2009;Clade II)__AIT17786__GPCstabilized
augggccagaucaucaccuucuuccaggaggucccccacgucaucgaggaggucaugaacaucguccucaucgcccucucccuccucgccauccucaagggcaucuacaacgucgccaccugcggccucuucggccucgucuccuuccuccuccucugcggccgcuccugcuccaccaccuacaagggcgucuacgagcuccagacccucgagcucgacauggccucccucaacaugaccaugccccucuccugcaccaagaacaacucccaccacuacaucauggucggcaacgagaccggccucgagcucacccucaccaacaccuccaucaucaaccacaaguucugcaaccucuccgacgcccacaagaagaaccucuacgaccacgcccucauguccaucaucuccaccuuccaccucuccauccccaacuucaaccaguacgaggccauguccugcgacuucaacggcggcaagaucuccguccaguacaaccucucccacgccuacgccaucgacgccgccgaccacugcggcaccaucgccaacggcguccuccagaccuucaugcgcauggccuggggcggcuccuacaucgcccucgacuccggcugcggcuccugggacugcaucaugaccuccuaccaguaccucaucauccagaacaccaccugggaggaccacugccaguucucccgccccucccccaucggcuaccucggccuccucucccagcgcacccgcgacaucuacaucucccgccgccgccggggcaccuucaccuggacccucuccgacuccgagggcaacgagacccccggcggcuacugccucacccgcuggaugcucaucgaggccgagcucaagugcuucggcaacaccgccgucgccaagugcaacgagaagcacgacgaggaguucugcgacaugcuccgccucuucgacuucaacaagcaggccauccgccgccucaagacccccgcccagauguccauccagcucaucaacaaggccgucaacgcccucaucaacgaccagcucaucaugaagaaccaccuccgcgacaucaugugcauccccuacugcaacuacuccaaguacugguaccucaaccacaccgucaccggcaagaccucccucccccgcugcuggcucgucuccaacggcuccuaccucaacgagacccacuucuccgacgacaucgagcagcaggccgacaacaugaucaccgagcuccuccagaaggaguacauggaccgccagggcaagaccccccucggccucgucgaccucuucgucuucuccaccuccuucuaccucaucuccaucuuccuccaccucgucaagauccccacccaccgccacaucaccggcaagcccugccccaagccccaccgccucaaccacaugggcaucugcuccugcggccucuacaagcaccccggcguccccgucaaguggaagcgcuga

SEQ ID NO: 4707 - RNA, 1473 nt, Artificial Sequence
  derived and/or modified protein sequence (opt2) from LASV(LASV1011-NIG-2009;Clade II)__AIT17790__GPCstabilized
augggccagaucaucaccuucuuccaggaggucccccacgucaucgaggaggucaugaacaucguccucaucgcccucucccuccucgccauccucaagggcaucuacaacgucgccaccugcggccucuucggccucgucuccuuccuccuccucugcggccgcuccugcuccaccaccuacaagggcgucuacgagcuccagacccucgagcucgacauggccucccucaacaugaccaugccccucuccugcaccaagaacaacucccaccacuacaucauggucggcaacgagaccggccucgagcucacccucaccaacaccuccaucaucaaccacaaguucugcaaccucuccgacgcccacaagaagaaccucuacgaccacgcccucauguccaucaucuccaccuuccaccucuccauccccaacuucaaccaguacgaggccauguccugcgacuucaacggcggcaagaucuccguccaguacaaccucucccacaccuacgccgucgacgccgccaaccacugcggcaccaucgccaacggcguccuccagaccuucaugcgcauggccuggggcggcuccuacaucgcccucgacuccggcugcggcuccugggacugcaucaugaccuccuaccaguaccucaucauccagaacaccaccugggaggaccacugccaguucucccgccccucccccaucggcuaccucggccuccucucccagcgcacccgcgacaucuacaucucccgccgccgccggggcaccuucaccuggacccucuccgacuccgagggcaacgagacccccggcggcuacugccucacccgcuggaugcucaucgaggccgagcucaagugcuucggcaacaccgccgucgccaagugcaacgagaagcacgacgaggaguucugcgacaugcuccgccucuucgacuucaacaagcaggccauccgccgccucaagacccccgcccagauguccauccagcucaucaacaaggccgucaacgcccucaucaacgaccagcucaucaugaagaaccaccuccgcgacaucaugugcauccccuacugcaacuacuccaaguacugguaccucaaccacaccgucaccggcaagaccucccucccccgcugcuggcucgucuccaacggcuccuaccucaacgagacccacuucuccgacgacaucgagcagcaggccgacaacaugaucaccgagcuccuccagaaggaguacauggaccgccagggcaagaccccccucggccucgucgaccucuucgucuucuccaccuccuucuaccucaucuccaucuuccuccaccucgucaagauccccacccaccgccacaucaccggcaagcccugccccaagccccaccgccucaaccacaugggcaucugcuccugcggccucuacaagcaccccggcguccccgucaaguggaagcgcuga

SEQ ID NO: 4708 - RNA, 1473 nt, Artificial Sequence
  derived and/or modified protein sequence (opt2) from LASV(LASV1016-NIG-2009;Clade II)__AIT17798__GPCstabilized
augggccagaucaucaccuucuuccaggaggucccccacgucaucgaggaggucaugaacaucguccucaucgcccucucccuccucgccauccucaagggcaucuacaacgucgccaccugcggccucuucggccucgucuccuuccuccuccucugcggccgcuccugcuccaccaccuacaagggcgucuacgagcuccagacccucgagcucgacauggccucccucaacaugaccaugccccucuccugcaccaagaacaacucccaccacuacaucauggucggcaacgagaccggccucgagcucacccucaccaacaccuccaucaucaaccacaaguucugcaaccucuccgacgcccacaagaagaaccucuacgaccacgcccucauguccaucaucuccaccuuccaccucuccauccccaacuucaaccaguacgaggccauguccugcgacuucaacggcggcaagaucuccguccaguacaaccucucccacaccuacgccgucgacgccgccaaccacugcggcaccaucgccaacggcguccuccagaccuucaugcgcauggccuggggcggcuccuacaucgcccucgacuccggcugcggcuccugggacugcaucaugaccuccuaccaguaccucaucauccagaacaccaccugggaggaccacugccaguucucccgccccucccccaucggcuaccucggccuccucucccagcgcacccgcgacaucuacaucucccgccgccgccggggcaccuucaccuggacccucuccgacuccgagggcaacgagacccccggcggcuacugccucacccgcuggaugcucaucgaggccgagcucaagugcuucggcaacaccgccgucgccaagugcaacgagaagcacgacgaggaguucugcgacaugcuccgccucuucgacuucaacaagcaggccaucaugcgccucaagacccccgcccagauguccauccagcucaucaacaaggccgucaacgcccucaucaacgaccagcucaucaugaagaaccaccuccgcgacaucaugugcauccccuacugcaacuacuccaaguacugguaccucaaccacaccgucaccggcaagaccucccucccccgcugcuggcucgucuccaacggcuccuaccucaacgagacccacuucuccgacgacaucgagcagcaggccgacaacaugaucaccgagaugcuccagaaggaguaccucgaccgccagggcaagaccccccucggccucgucgaccucuucgucuucuccaccuccuucuaccucaucuccaucuuccuccaccucgucaagauccccacccaccgccacaucaucggcaagcccugccccaagccccaccgccucaaccacaugggcaucugcuccugcggccucuacaagcaccccggcguccccgucaaguggaagcgcuga

SEQ ID NO: 4709 - RNA, 1473 nt, Artificial Sequence; identical to SEQ ID NO: 4621
  derived and/or modified protein sequence (opt2) from LASV(LASV221-NIG-2010;Clade II)__AIT17624__GPCstabilized

SEQ ID NO: 4710 - RNA, 1473 nt, Artificial Sequence
  derived and/or modified protein sequence (opt2) from LASV(LASV224-NIG-2010;Clade II)__AIT17626__GPCstabilized
augggccagaucaucaccuucuuccaggaggucccccacgucaucgaggaggucaugaacaucguccucaucgcccucucccuccucgccauccucaagggcgucuacaacgucgccaccugcggccucuucggccucgucuccuuccuccuccucugcggccgcuccugcuccaccaccuacaagggcgucuacgagcuccagacccucgagcucgacauggccucccucaacaugaccaugccccucuccugcaccaagaacaacucccaccacuacaucauggucggcaacgagaccggccucgagcucacccucaccaacaccuccaucauccagcacaaguucugcaaccucuccgacgcccacaagaagaaccucuacgaccacgcccucauguccaucaucuccaccuuccaccucuccauccccaacuucaaccaguacgaggccauguccugcgacuucaacggcggcaagaucaccguccaguacaaccucucccacuccuacgccaucgacgccgccaaccacugcggcaccaucgccaacggcguccuccagaccuucaugcgcauggccuggggcggcuccuacaucgcccucgacuccggcugcggcuccugggacugcaucaugaccuccuaccaguaccucaucauccagaacaccaccugggaggaccacugccaguucucccgccccucccccaucggcuaccucggccuccucucccagcgcacccgcgacaucuacaucucccgccgccgccggggcaccuucaccuggacccucuccgacuccgagggcaacgagacccccggcggcuacugccucacccgcuggaugcucaucgaggccgagcucaagugcuucggcaacaccgccgucgccaagugcaacgagaagcacgacgaggaguucugcgacaugcuccgccucuucgacuucaacaagcaggccauccgccgccucaagacccccgcccagauguccauccagcucaucaacaaggccgucaacgcccucaucaacgaccagcucaucaugaagaaccaccuccgcgacaucaugugcauccccuacugcaacuacuccaaguacugguaccucaaccacaccgucaccggccgcaccucccucccccgcugcuggcucgucuccaacggcuccuaccucaacgagacccacuucuccgacgacaucgagcagcaggccgacaacaugaucaccgagcuccuccagaaggaguacauggaccgccagggcaagaccccccucggccucgucgaccucuucgucuucuccaccuccuucuaccucaucuccaucuuccuccaccucgucaagauccccacccaccgccacaucaucggcaagcccugccccaagccccaccgccucaaccacaugggcgucugcuccugcggccucuacaagcaccccggcguccccgucaaguggaagcgcuga

SEQ ID NO: 4711 - RNA, 1473 nt, Artificial Sequence
  derived and/or modified protein sequence (opt2) from LASV(LASV225-NIG-2010;Clade II)__AIT17630__GPCstabilized
augggccagaucaucaccuucuuccaggaggucccccacgucaucgaggaggucaugaacaucguccucaucgcccucucccuccucgccauccucaagggcaucuacaacgucgccaccugcggccucuucggccuccucuccuuccuccuccucugcggccgcuccugcuccaccaccuacaagggcgucuacgagcuccagacccucgagcucgacauggccucccucaacaugaccaugccccucuccugcaccaagaacaacucccaccacuacaucauggucggcaacgagaccggccucgagcucacccucaccaacaccuccaucaucaaccacaaguucugcaaccucuccgacgcccacaagaagaaccucuacgaccacgcccucauguccaucaucuccaccuuccaccucuccauccccaacuucaaccaguacgaggccauguccugcgacuucaacggcggcaagaucuccguccaguacaaccucucccacgccuacgccgucgacgccgccgagcacugcggcaccaucgccaacggcguccuccagaccuucaugcgcauggccuggggcggcuccuacaucgcccucgacuccggcugcggcuccugggacugcgucaugaccuccuaccaguaccucaucauccagaacaccuccugggaggaccacugccaguucucccgccccucccccaucggcuaccucggccuccucucccagcgcacccgcgacaucuacaucucccgccgccgccggggcaccuucaccuggacccucuccgacuccgagggcaacgagacccccggcggcuacugccucacccgcuggaugcucaucgaggccgagcucaagugcuucggcaacaccgccgucgccaagugcaacgagaagcacgacgaggaguucugcgacaugcuccgccucuucgacuucaacaagcaggccauccgccgccucaagacccccgcccagauguccauccagcucaucaacaaggccgucaacgcccucaucaacgaccagcucaucaugaagaaccaccuccgcgacaucaugugcauccccuacugcaacuacuccaaguacugguaccucaaccacaccgucaccggcaagaccucccucccccgcugcuggcucgucuccaacggcuccuaccucaacgagacccacuucuccgacgacaucgagcagcaggccgacaacaugaucaccgagcuccuccagaaggaguacaucgaccgccagggcaagaccccccucggccucgucgaccucuucgucuucuccaccuccuucuaccucaucuccaucuuccuccaccucgucaagauccccacccaccgccacgucaucggcaagcccugccccaagccccaccgccucaaccacaugggcaucugcuccugcggccucuacaagcaccccggcguccccgucaaguggaagcgcuga

SEQ ID NO: 4712 - RNA, 1473 nt, Artificial Sequence
  derived and/or modified protein sequence (opt2) from LASV(LASV229-NIG-2010;Clade II)__AIT17634__GPCstabilized
augggccagaucaucaccuucuuccaggaggucccccacgucaucgaggaggucaugaacaucguccucaucgcccucucccuccucgccauccucaagggcaucuacaacgucgccaccugcggccucuucggccucgucuccuuccuccuccucugcggccgcuccugcuccaccaucuacaaggacgucuacgagcuccagacccucgagcucgacauggccucccucaacaugaccaugccccucuccugcaccaagaacaacucccaccacuacaucauggucggcaacgagaccggccucgagcucacccucaccaacaccuccaucaucaaccacaaguucugcaaccucuccgacgcccacaagaagaaccucuacgaccacgcccucauguccaucaucuccaccuuccaccucuccauccccaacuucaaccaguacgaggccauguccugcgacuucaacggcggcaagaucuccguccaguacaaccucucccacaccuacgccaucgacgccgccaaccacugcggcaccaucgccaacggcguccuccagaccuucaugcgcauggccuggggcggcuccuacaucgcccucgacuccggcugcggcuccugggacugcaucaugaccuccuaccaguaccucaucauccagaacaccaccugggaggaccacugccaguucucccgccccucccccaucggcuaccucggccuccucucccagcgcacccgcgacaucuacaucucccgccgccgccggggcaccuucaccuggacccucuccgacuccgagggcaacgagacccccggcggcuacugccucacccgcuggaugcucaucgaggccgagcucaagugcuucggcaacaccgccgucgccaagugcaacgagaagcacgacgaggaguucugcgacaugcuccgccucuucgacuucaacaagcaggccauccgccgccucaagacccccgcccagauguccauccagcucaucaacaaggccgucaacgcccucaucaacgaccagcucaucaugaagaaccaccuccgcgacaucaugugcauccccuacugcaacuacucccgcuacugguaccucaaccacaccgucaccggccgcaccucccucccccgcugcuggcucgucuccaacggcuccuaccucaacgagacccacuucuccgacgacaucgagcagcaggccgacaacaugaucaccgagcuccuccagaaggaguacauggaccgccagggcaagaccccccucggccucgucgaccucuucgucuucuccaccuccuucuaccucaucuccaucuuccuccaccucgucaagauccccacccaccgccacgucaucggcaagcccugccccaagccccaccgccucaaccacaugggcaucugcuccugcggccucuacaaccaccccggcguccccgucaaguggaagcgcuga

SEQ ID NO: 4713 - RNA, 1473 nt, Artificial Sequence
  derived and/or modified protein sequence (opt2) from LASV(LASV237-NIG-2010;Clade II)__AIT17638__GPCstabilized
augggccagaucaucaccuucuuccaggaggucccccacgucaucgaggaggucaugaacaucguccucaucgcccucucccuccucgccauccucaagggcaucuacaacgucgccaccugcggccucuucggccucgucuccuuccuccuccucugcggccgcuccugcuccaccaccuacaagggcgucuacgagcuccagacccucgagcucgacauggccucccucaacaugaccaugccccucuccugcaccaagaacaacucccaccacuacaucauggucggcaacgagaccggccucgagcucacccucaccaacaccuccaucaucaaccacaaguucugcaaccucuccgacgcccacaagaaggaccucuacgaccacgcccucauguccaucaucuccaccuuccaccucuccauccccaacuucaaccaguacgaggccauguccugcgacuucaacggcggcaagaucuccguccaguacaaccucucccacaccuacgccgucgacgccgccaaccacugcggcaccaucgccaacggcguccuccagaccuucaugcgcauggccuggggcggcuccuacaucgcccucgacuccggcugcggcuccugggacugcaucaugaccuccuaccaguaccucaucauccagaacaccaccugggaggaccacugccaguucucccgccccucccccaucggcuaccucggccuccucucccagcgcacccgcgacaucuacaucucccgccgccgccggggcaccuucaccuggacccucuccgacuccgagggcaacgagacccccggcggcuacugccucacccgcuggaugcucaucgaggccgagcucaagugcuucggcaacaccgccgucgccaagugcaacgagaagcacgacgaggaguucugcgacaugcuccgccucuucgacuucaacaagcaggccauccgccgccucaagacccccgcccagauguccauccagcucaucaacaaggccgucaacgcccucaucaacgaccagcucaucaugaagaaccaccuccgcgacaucaugugcauccccuacugcaacuacuccaaguacugguaccucaaccacaccgucaccggcaagaccucccucccccgcugcuggcucgucuccaacggcuccuaccucaacgagacccacuucuccgacgacaucgagcagcaggccgacaacaugaucaccgagcuccuccagaaggaguacauggaccgccagggcaagaccccccucggccucgucgaccucuucgucuucuccaccuccuucuaccucaucuccaucuuccuccaccucaucaagauccccacccaccgccacaucaccggcaagcccugccccaagccccaccgccucaaccacaugggcaucugcuccugcggccucuacaagcaccccggcguccccgucaaguggaagcgcuga

SEQ ID NO: 4714 - RNA, 1473 nt, Artificial Sequence
  derived and/or modified protein sequence (opt2) from LASV(LASV239-NIG-2010;Clade II)__AIT17642__GPCstabilized
augggccagaucaucaccuucuuccaggaggucccccacgucaucgaggaggucaugaacaucguccucaucgcccucucccuccucgccauccucaagggcgucuacaacgucgccaccugcggccucuucggccucgucuccuuccuccuccucugcggccgcuccugcuccaccaccuacaagggcgucuacgagcuccagacccucgagcucgacauggccucccucaacaugaccaugccccucuccugcaccaagaacaacucccaccacuacaucauggucggcaacgacaccggccucgagcucacccucaccaacaccuccaucaucaaccacaaguucugcaaccucuccgacgcccacaagaagaaccucuacgaccacgcccucauguccaucaucuccaccuuccaccucuccauccccaacuucaaccaguacgaggccauguccugcgacuucaacggcggcaagaucuccguccaguacaaccucucccacgccuacgccgucgacgccgccucccacugcggcaccaucgccaacggcguccuccagaccuucaugcgcauggccuggggcggcuccuacaucgcccucgacuccggcugcggcuccugggacugcaucaugaccuccuaccaguaccucaucauccagaacaccaccugggaggaccacugccaguucucccgccccucccccaucggcuaccucggccuccucucccagcgcacccgcgacaucuacaucucccgccgccgccggggcaccuucaccuggacccucuccgacuccgagggcaacgagacccccggcggcuacugccucacccgcuggaugcucaucgaggccgagcucaagugcuucggcaacaccgccgucgccaagugcaacgagaagcacgacgaggaguucugcgacaugcuccgccucuucgacuucaacaagcaggccauccgccgccucaagacccccgcccagauguccauccagcucaucaacaaggccgucaacgcccucaucaacgaccagcucaucaugaagaaccaccuccgcgacaucaugugcauccccuacugcaacuacuccaaguacugguaccucaaccacaccgucaccggcaagaccucccucccccgcugcuggcucgucuccaacggcuccuaccucaacgagacccacuucuccgacgacaucgagcagcaggccgacaacaugaucaccgagcuccuccagaaggaguacauggaccgccagggcaagaccccccucggccucgucgaccucuucgucuucuccaccuccuucuaccucaucuccaucuuccuccaccucgucaagauccccacccaccgccacaucaucggcaagcccugccccaagccccaccgccucaaccacaugggcaucugcuccugcggccucuacaagcaccccggcguccccgucaaguggaagcgcuga

SEQ ID NO: 4715 - RNA, 1473 nt, Artificial Sequence
  derived and/or modified protein sequence (opt2) from LASV(LASV241-NIG-2011;Clade II)__AIT17646__GPCstabilized
augggccagaucaucaccuucuuccaggaggucccccacgucaucgaggaggucaugaacaucguccucaucgcccucucccuccucgccauccucaagggcaucuacaacgucgccaccugcggccucuucggccucgucuccuuccuccuccucugcggccgcuccugcuccaccaccuacaagggcgucuacgagcuccagacccucgagcucgacauggccucccucaacaugaccaugccccucuccugcaccaagaacaacucccaccacuacaucauggucggcaacgagaccggccucgagcucacccucaccaacaccuccaucaucaaccacaaguucugcaaccucuccgacgcccacaagaagaaccucuacgaccacgcccucauguccaucaucuccaccuuccaccucuccauccccaacuucaaccaguacgaggccauguccugcgacuucaacggcggcaagaucuccguccaguacaaccucucccacgccuacgccgucgacgccgccucccacugcggcaccgucgccaacggcguccuccagaccuucaugcgcauggccuggggcggcuccuacaucgcccucgacuccggcugcggcuccugggacugcaucaugaccuccuaccaguaccucaucauccagaacaccaccugggaggaccacugccaguucucccgccccucccccaucggcuaccucggccuccucucccagcgcacccgcgacaucuacaucucccgccgccgccggggcaccuucaccuggacccucuccgacuccgagggcaacgagacccccggcggcuacugccucacccgcuggaugcucaucgaggccgagcucaagugcuucggcaacaccgccgucgccaagugcaacgagaagcacgacgaggaguucugcgacaugcuccgccucuucgacuucaacaagcaggccauccgccgccucaagacccccgcccagauguccauccagcucaucaacaaggccgucaacgcccucaucaacgaccagcucaucaugaagaaccaccuccgcgacaucaugugcauccccuacugcaacuacuccaaguacugguaccucaaccacaccgucaccggcaagaccucccucccccgcugcuggcucgucuccaacggcuccuaccucaacgagacccacuucuccgacgacaucgagcagcaggccgacaacaugaucaccgagcuccuccagaaggaguacauggaccgccagggcaagaccccccucggccucgucgaccucuucgucuucuccaccuccuucuaccucaucuccaucuuccuccaccucgucaagauccccacccaccgccacgucaucggcaagcccugccccaagccccaccgccucaaccacaugggcaucugcuccugcggccucuacaagcaccccggcguccccgucaaguggaagcgcuga

SEQ ID NO: 4716 - RNA, 1473 nt, Artificial Sequence
  derived and/or modified protein sequence (opt2) from LASV(LASV242-NIG-2010;Clade II)__AIT17650__GPCstabilized
augggccagaucaucaccuucuuccaggaggucccccacgucaucgaggaggucaugaacaucguccucaucgcccucucccuccucgccauccucaagggcaucuacaacgucgccaccugcggccucuucggccucgucuccuuccuccuccucugcggccgcuccugcuccaccaccuacaagggcgucuacgagcuccagacccucgagcucgacauggccucccucaacaugaccaugccccucuccugcaccaagaacaacucccaccacuacaucauggucggcaacgagaccggccucgagcucacccucaccaacaucuccaucaucaaccacaaguucugcaaccucuccgacgcccacaagaagaaccucuacgaccacgcccucauguccaucaucuccaccuuccaccucuccauccccaacuucaaccaguacgaggccauguccugcgacuucaacggcggcaagaucuccguccaguacaaccucucccacaccuacgccgucgacgccgccaaccacugcggcaccaucgccaacggcguccuccagaccuucaugcgcauggccuggggcggcuccuacaucgcccucgacuccggcugcggcuccugggacugcaucaugaccuccuaccaguaccucaucauccagaacaccaccugggaggaccacugccaguucucccgccccucccccaucggcuaccucggccuccucucccagcgcacccgcgacaucuacaucucccgccgccgccggggcaccuucaccuggacccucuccgacuccgagggcaacgagacccccggcggcuacugccucacccgcuggaugcucaucgaggccgagcucaagugcuucggcaacaccgccgucgccaagugcaacgagaagcacgacgaggaguucugcgacaugcuccgccucuucgacuucaacaagcaggccauccgccgccucaaggcccccgcccagauguccauccagcucaucaacaaggccgucaacgcccucaucaacgaccagcucaucaugaagaaccaccuccgcgacaucaugugcauccccuacugcaacuacuccaaguacugguaccucaaccacaccgucaccggccgcaccucccucccccgcugcuggcucgucuccaacggcuccuaccucaacgagacccacuucuccgacgacaucgagcagcaggccgacaacaugaucaccgagcuccuccagaaggaguacaucgaccgccagggcaagaccccccucggccucgucgaccucuucgucuucuccaccuccuucuaccucaucuccaucuuccuccaccucgucaagauccccacccaccgccacaucaucggcaagcccugccccaagccccaccgccucaaccacaugggcaucugcuccugcggccucuacaagcaccccggcguccccgucaaguggaagcgcuga

SEQ ID NO: 4717 - RNA, 1473 nt, Artificial Sequence
  derived and/or modified protein sequence (opt2) from LASV(LASV246-NIG-2010;Clade II)__AIT17658__GPCstabilized
augggccagaucaucaccuucuuccaggaggucccccacgucaucgaggaggucaugaacaucguccucaucgcccucucccuccucgccauccucaagggcgucuacaacgucgccaccugcggccucuucggccucgucuccuuccuccuccucugcggccgcuccugcuccaucaccuacaagggcgucuacgagcuccagacccucgagcucgacauggccaaccucaacaugaccaugccccucuccugcaccaagaacaacucccaccacuacaucauggucggcaacgagaccggccucgagcucacccucaccaacaccuccaucaucaaccacaaguucugcaaccucuccgacgcccacaagaagaaccucuacgaccacgcccucauguccaucaucuccaccuuccaccucuccauccccaacuucaaccaguacgaggccauguccugcgacuucaacggcggcaagaucuccguccaguacaaccucucccacaccuacgccggcgacgccgccgaccacugcggcaccaucgccaacggcguccuccagaccuucaugcgcauggccuggggcggcuccuacaucgcccucgacuccggcugcggcuccugggacugcaucaugaccuccuaccaguaccucaucauccagaacaccaccugggaggaccacugccaguucucccgccccucccccaugggcuaccucggccuccucucccagcgcacccgcgacaucuacaucucccgccgccgccggggcaccuucaccuggacccucuccgacuccgagggcaacgagacccccggcggcuacugccucacccgcuggaugcucaucgaggccgagcucaagugcuucggcaacaccgccgucgccaagugcaacgagaagcacgacgaggaguucugcgacaugcuccgccucuucgacuucaacaagcaggccauccgccgccucaagacccccgcccagauguccauccagcucaucaacaaggccgucaacgcccucaucaacgaccagcucaucaugaagaaccaccuccgcgacaucaugugcauccccuacugcaacuacuccaaguacugguaccucaaccacaccaucaccggcaagaccucccucccccgcugcuggcucgucuccaacggcuccuaccucaacgagacccacuucuccgacgacaucgagcagcaggccgacaacaugaucaccgagcuccuccagaaggaguacaucgaccgccagggcaagaccccccucggccucgucgaccucuucgucuucuccaccuccuucuaccucaucuccaucuuccuccaccucgucaagauccccacccaccgccacaucaccggcaagcccugccccaagccccaccgccucaaccacaugggcaucugcuccugcggccucuacaagcaccccggcguccccguccgcuggaagcgcuga

SEQ ID NO: 4718 - RNA, 1473 nt, Artificial Sequence
  derived and/or modified protein sequence (opt2) from LASV(LASV251-NIG-2010;Clade II)__AIT17666__GPCstabilized
augggccagaucgucaccuucuuccaggaggucccccacgucaucgaggaggucaugaacaucguccucaucgcccucucccuccucgccauccucaagggcaucuacaacgucgccaccugcggccucuucggccucgucuccuuccuccuccucugcggccgcuccugcuccaccaccuacaagggcgucuacgagcuccagacccucgagcucgacauggccucccucaacaugaccaugccccucuccugcaccaagaacaacucccaccacuacaucauggucggcaacgagaccggccucgagcucacccucaccaacaccuccaucaucaaccacaaguucugcaaccucuccgacgcccacaagaagaaccucuacgaccacgcccucauguccaucaucuccaccuuccaccucuccauccccaacuucaaccaguacgaggccauguccugcgacuucaacggcggcaagaucuccguccaguacaaccucucccacaccuacgccgucgacgccgccaaccacugcggcaccaucgccaacggcguccuccagaccuucaugcgcauggccuggggcggcuccuacaucgcccucgacuccggcugcggcuccugggacugcaucaugaccuccuaccaguaccucaucauccagaacaccaccugggaggaccacugccaguucucccgccccucccccaucggcuaccucggccuccucucccagcgcacccgcgacaucuacaucucccgccgccgccggggcaccuucaccuggacccucuccgacuccgagggcaacgagacccccggcggcuacugccucacccgcuggaugcucaucgaggccgagcucaagugcuucggcaacaccgccgucgccaagugcaacgagaagcacgacgaggaguucugcgacaugcuccgccucuucgacuucaacaagcaggccauccgccgccucaagacccccgcccagauguccauccagcucaucaacaaggccgucaacgcccucaucaacgaccagcucaucaugaagaaccaccuccgcgacaucaugugcauccccuacugcaacuacuccaaguacugguaccucaaccacaccgucaccggcaagaccucccucccccgcugcuggcucgucuccaacggcuccuaccucaacgagacccacuucuccgacgacaucgagcagcaggccgacaacaugaucaccgagcuccuccagaaggaguacauggaccgccagggcaagaccccccucggccucgucgaccucuucgucuucuccaccuccuucuaccucaucuccaucuuccuccaccucgucaagauccccacccaccgccacaucaccggcaagcccugccccaagccccaccgccucaaccacaugggcaucugcuccugcggccucuacaagcaccccggcguccccgucaaguggaagcgcuga

SEQ ID NO: 4719 - RNA, 1473 nt, Artificial Sequence
  derived and/or modified protein sequence (opt2) from LASV(LASV253-NIG-2011;Clade II)__AIT17670__GPCstabilized
augggccagaucaucaccuucuuccaggaggucccccacgucaucgaggaggucaugaacaucguccucaucgcccucucccuccucgccauccucaagggcaucuacaacgucgccaccugcggccucuucggccucgucuccuuccuccuccucugcggccgcuccugcuccaccaccuacaagggcgucuacgagcuccagacccucgagcucgacauggccucccucaacaugaccaugccccucuccugcaccaagaacaacucccaccacuacaucauggucggcaacgagaccggccucgagcucacccucaccaacaccuccaucaucaaccacaaguucugcaaccucuccgacgcccacaagaagaaccucuacgaccacgcccucauguccaucaucuccaccuuccaccucuccauccccaacuucaaccaguacgaggccauguccugcgacuucaacggcggcaagaucuccguccaguacaaccucucccacaccuacgccgucgacgccgccaaccacugcggcaccaucgccaacggcguccuccagaccuucaugcgcauggccuggggcggcuccuacaucgcccucgacuccggcugcggcuccugggacugcaucaugaccuccuaccaguaccucaucauccagaacaccaccugggaggaccacugccaguucucccgccccucccccaucggcuaccucggccuccucucccagcgcacccgcgacaucuacaucucccgccgccgccggggcaccuucaccuggacccucuccgacuccgagggcaacgagacccccggcggcuacugccucacccgcuggaugcucaucgaggccgagcucaagugcuucggcaacaccgccgucgccaagugcaacgagaagcacgacgaggaguucugcgacaugcuccgccucuucgacuucaacaagcaggccauccgccgccucaaggcccccgcccagauguccauccagcucaucaacaaggccgucaacgcccucaucaacgaccagcucaucaugaagaaccaccuccgcgacaucaugugcauccccuacugcaacuacuccaaguacugguaccucaaccacaccgucaccggccgcaccucccucccccgcugcuggcucgucuccaacggcuccuaccucaacgagacccacuucuccgacgacaucgagcagcaggccgacaacaugaucaccgagcuccuccagaaggaguacaucgaccgccagggcaagaccccccucggccucgucgaccucuucgucuucuccaccuccuucuaccucaucuccaucuuccuccaccucgucaagauccccacccaccgccacaucaucggcaagcccugccccaagccccaccgccucaaccacaugggcaucugcuccugcggccucuacaagcaccccggcguccccgucaaguggaagcgcuga

SEQ ID NO: 4720 - RNA, 1473 nt, Artificial Sequence
  derived and/or modified protein sequence (opt2) from LASV(LASV254-NIG-2011;Clade II)__AIT17674__GPCstabilized
augggccagaucaucaccuucuuccaggaggucccccacgucaucgaggaggucaugaacaucguccucaucgcccucucccuccucgccauccucaagggcaucuacaacgucgccaccugcggccucuucggccucgucuccuuccuccuccucugcggccgcuccugcuccaccaccuacaagggcgucuacgagcuccagacccucgagcucgacaugaccaaccucaacaugaccaugccccucuccugcaccaagaacaacucccaccacuacaucauggucggcaacgagaccggccucgagcucacccucaccaacaccuccaucaucaaccacaaguucugcaaccucuccgacgcccacaagaagaaccucuacaaccacgcccucauguccaucaucuccaccuuccaccucuccauccccaacuucaaccaguacgaggccauguccugcgacuucaacggcggcaagaucuccguccaguacaaccucucccacuccuacgccgucgacgccgccaaccacugcggcaccaucgccaacggcguccuccagaccuucaugcgcauggccuggggcggcuccuacaucgcccucgacuccggcugcggcaacugggacugcaucaugaccuccuaccaguaccucaucauccagaacaccaccugggaggaccacugccaguucucccgccccucccccaucggcuaccucggccuccucucccagcgcacccgcgacaucuacaucucccgccgccgccggggcaccuucaccuggacccucuccgacuccgagggcaacgagacccccggcggcuacugccucacccgcuggaugcucaucgaggccgagcucaagugcuucggcaacaccgccgucgccaagugcaacgagaagcacgacgaggaguucugcgacaugcuccgccucuucgacuucaacaagcaggccauccgccgccucaagacccccgcccaggccaacauccagcucaucaacaaggccgucaacgcccucaucaacgaccagcucaucaugaagaaccaccuccgcgacaucaugugcauccccuacugcaacuacuccaaguacugguaccucaaccacaccgucaccggcaagaccucccucccccgcugcuggcucgucuccaacggcuccuaccucaacgagacccacuucuccgacgacaucgagcagcaggccgacaacaugaucaccgagcuccuccagaaggaguacauggaccgccagggcaagaccccccucggccucgucgaccucuucgucuucuccaccuccuucuaccucaucuccaucuuccuccaccucgucaagauccccacccaccgccacgucaucggcaagcccugccccaagccccaccgccucaaccacaugggcaucugcuccugcggccucuacaagcaccccggcguccccgucaaguggaagcgcuga

SEQ ID NO: 4721 - RNA, 1473 nt, Artificial Sequence
  derived and/or modified protein sequence (opt2) from LASV(LASV256-NIG-2010;Clade II)__AIT17678__GPCstabilized
augggccagaucaucaccuucuuccaggaggucccccacgucaucgaggaggucaugaacaucguccucaucacccucucccuccucgccauccucaagggcaucuacaacaucgccaccugcggccucuucggccucgucuccuuccuccuccucugcggccgcuccugcuccaccaccuacaagggcgucuacgagcuccagacccucgagcucgacaugaccucccucaacaugaccaugccccucuccugcaccaagaacaacucccaccacuacaucauggucggcaacgagaccggccucgagcucacccucaccaacaccuccaucaucaaccacaaguucugcaaccucuccgacgcccacaagaagaaccucuacgaccacgcccucauguccaucaucuccaccuuccaccucuccauccccaacuucaaccaguacgaggccauguccugcgacuucaacggcggcaagaucuccguccaguacaaccucucccacaccuacgccgucgacgccgccaaccacugcggcaccaucgccaacggcguccuccagaccuucaugcgcauggccuggggcggcuccuacaucgcccucgacuccggcugcggcuccugggacugcaucaugaccuccuaccaguaccucaucauccagaacaccaccugggaggaccacugccaguucucccgccccucccccaucggcuaccucggccuccucucccagcgcacccgcgacaucuacaucucccgccgccgccggggcaccuucaccuggacccucuccgacuccgagggcaacgagacccccggcggcuacugccucacccgcuggaugcucaucgaggccgagcucaagugcuucggcaacaccgccgucgccaagugcaacgagaagcacgacgaggaguucugcgacaugcuccgccucuucgacuucaacaagcaggccauccgccgccucaagacccccgcccagauguccauccagcucaucaacaaggccgucaacgcccucaucaacgaccagcucaucaugaagaaccaccuccgcgacaucaugugcauccccuacugcaacuacuccaaguacugguaccucaaccacaccgucaccggcaagaccucccucccccgcugcuggcucgucuccaacggcuccuaccucaacgagacccacuucuccgacgacaucgagcagcaggccgacaacaugaucaccgagcuccuccagaaggaguacaucgaccgccagggcaagaccccccucggccucgucgaccucuucgucuucuccaccuccuucuaccucaucuccaucuuccuccaccucgucaagauccccacccaccgccacaucaucggcaagcccugccccaagccccaccgccucaaccacaugggcaucugcuccugcggccucuacaagcaccccggcauccccgucaaguggaagcgcuga

SEQ ID NO: 4722 - RNA, 1473 nt, Artificial Sequence
  derived and/or modified protein sequence (opt2) from LASV(LASV267-NIG-2010;Clade II)__AIT17686__GPCstabilized
augggccagaucaucaccuucuuccaggaggucccccacgucaucgaggaggucaugaacaucguccucaucgcccucucccuccucgccauccucaagggcaucuacaacgucgccaccugcggccucuucggccucgucuccuuccuccuccucugcggccgcuccugcuccaccaccuacaagggcgucuacgagcuccagacccucgagcucgacauggccucccucaacaugaccaugccccucuccugcaccaagaacaacucccaccacuacaucauggucggcaacgagaccggccucgagcucacccucaccaacaccuccaucaucaaccacaaguucugcaaccucuccgacgcccacaagaagaaccucuacgaccacgcccucauguccaucaucuccaccuuccaccucuccauccccaacuucaaccaguacgaggccauguccugcgacuucaacggcggcaagaucuccguccaguacaaccucucccacaccuacgccgucgacgccgccaaccacugcggcaccaucgccaacggcguccuccagaccuucaugcgcauggccuggggcggcuccuacaucgcccucgacucccgcugcggcuccugggacugcaucaugaccuccuaccaguaccucaucauccagaacaccaccugggaggaccacugccaguucucccgccccucccccaucggcuaccucggccuccucucccagcgcacccgcgacaucuacaucucccgccgccgccggggcaccuucaccuggacccucuccgacuccgagggcaacgagacccccggcggcuacugccucacccgcuggaugcucaucgaggccgagcucaagugcuucggcaacaccgccgucgccaagugcaacgagaagcacgacgaggaguucugcgacaugcuccgccucuucgacuucaacaagcaggccauccgccgccucaagacccccgcccagauguccauccagcucaucaacaaggccgucaacgcccucaucaacgaccagcucaucaugaagaaccaccuccgcgacaucaugugcauccccuacugcaacuacuccaaguacugguaccucaaccacaccgucaccggcaagaccucccucccccgcugcuggcucgucuccaacggcuccuaccucaacgagacccacuucuccgacgacaucgagcagcaggccgacaacaugaucaccgagcuccuccagaaggaguacauggaccgccagggcaagaccccccucggccucgucgaccucuucgucuucuccaccuccuucuaccucaucuccaucuuccuccaccucaucaagauccccacccaccgccacgucaucggcaagcccugccccaagccccaccgccucaaccacaugggcaucugcuccugcggccucuacaagcaccccggcguccccgucaaguggaagcgcuga

SEQ ID NO: 4723 - RNA, 1473 nt, Artificial Sequence
  derived and/or modified protein sequence (opt2) from LASV(LASV271-NIG-2010;Clade II)__AIT17690__GPCstabilized
augggccagaucaucaccuucuuccaggaggucccccacgucaucgaggaggucaugaacaucguccucaucgcccucucccuccucgccauccucaagggcaucuacaacgucgccaccugcggccucuucggccucgucuccuuccuccuccucugcggccgcuccugcuccaccaccuacaagggcgucuacgagcuccagacccucgagcucgacauggccucccucaacaugaccaugccccucuccugcaccaagaacaacucccaccacuacaucauggucggcaacgagaccggccucgagcucacccucaccaacaccuccaucaucaaccacaaguucugcaaccucuccgacgcccacaagaagaaccucuacgaccacgcccucauguccaucaucuccaccuuccaccucuccauccccaacuucaaccaguacgaggccauguccugcgacuucaacggcggcaagaucuccguccaguacaaccucucccacgccuacgccgucgacgccgccucccacugcggcaccgucgccaacggcguccuccagaccuucaugcgcauggccuggggcggcuccuacaucgcccucgacuccggcugcggcuccugggacugcaucaugaccuccuaccaguaccucaucauccagaacaccaccugggaggaccacugccaguucucccgccccucccccaucggcuaccucggccuccucucccagcgcacccgcgacaucuacaucucccgccgccgccggggcaccuucaccuggacccucuccgacuccgagggcaacgagacccccggcggcuacugccucacccgcuggaugcucaucgaggccgagcucaagugcuucggcaacaccgccgucgccaagugcaacgagaagcacgacgaggaguucugcgacaugcuccgccucuucgacuucaacaagcaggccauccgccgccucaagacccccgcccagauguccauccagcucaucaacaaggccgucaacgcccucaucaacgaccagcucaucaugaagaaccaccuccgcgacaucaugugcauccccuacugcaacuacuccaaguacugguaccucaaccacaccgucaccggccgcaccucccucccccgcugcuggcucgucuccaacggcuccuaccucaacgagacccacuucuccgacgacaucgagcagcaggccgacaacaugaucaccgagcuccuccagaaggaguacauggaccgccagggcaagaccccccucggccucgucgaccucuucgucuucuccaccuccuucuaccucaucuccaucuuccuccaccucgucaagauccccacccaccgccacgucaucggcaagcccugccccaagccccaccgccucaaccacaugggcaucugcuccugcggccucuacaagcaccccggcguccccgucaaguggaagcgcuga

SEQ ID NO: 4724 - RNA, 1473 nt, Artificial Sequence
  derived and/or modified protein sequence (opt2) from LASV(LASV274-NIG-2010;Clade II)__AIT17694__GPCstabilized
augggccagaucaucaccuucuuccaggaggucccccacgucaucgaggaggucaugaacaucguccucaucgcccucucccuccucgccauccucaagggcaucuacaacgucgccaccugcggccucuucggccucgucuccuuccuccuccucugcggccgcuccugcuccaccaucuacaagggcgucuacgagcuccagacccucgagcucgacauggccucccucaacaugaccaugccccucuccugcaccaagaacaacucccaccacuacaucauggucggcaacgagaccggccucgagcucacccucaccaacaccuccaucaucaaccacaaguucugcaaccucuccgacgcccacaagaagaaccucuacgaccacgcccucauguccaucaucuccaccuuccaccucuccauccccaacuucaaccaguacgaggccauguccugcgacuucaacggcggcaagaucuccguccaguacaaccucucccacaccuacgccgucgacgccgccaaccacugcggcaccaucgccaacggcguccuccagaccuucaugcgcauggccuggggcggcuccuacaucgcccucgacuccggcugcggcuccugggacugcaucaugaccuccuaccaguaccucaucauccagaacaccaccugggaggaccacugccaguucucccgccccucccccaucggcuaccucggccuccucucccagcgcacccgcgacaucuacaucucccgccgccgccggggcaccuucaccuggacccucuccgacuccgagggcaacgagacccccggcggcuacugccucacccgcuggaugcucaucgaggccgagcucaagugcuucggcaacaccgccgucgccaagugcaacgagaagcacgacgaggaguucugcgacaugcuccgccucuucgacuucaacaagcaggccauccgccgccucaagacccccgcccagauguccauccagcucaucaacaaggccgucaacgcccucaucaacgaccagcucaucaugaagaaccaccuccgcgacaucaugugcauccccuacugcaacuacuccaaguacugguaccucaaccacaccgucaccggcaagaccucccucccccgcugcuggcucgucuccaacggcuccuaccucaacgagacccacuucuccgacgacaucgagcagcaggccgacaacaugaucaccgagcuccuccagaaggaguacaucgaccgccagggcaagaccccccucggccucgucgaccucuucgucuucuccaccuccuucuaccucaucuccaucuuccuccaccucgucaagauccccacccaccgccacgucgucggcaagcccugccccaagccccaccgccucaaccacaugggcaucugcuccugcggccucuacaagcaccccggcguccccgucaaguggaagcgcuga

SEQ ID NO: 4725 - RNA, 1473 nt, Artificial Sequence
  derived and/or modified protein sequence (opt2) from LASV(LASV719-NIG-2009;Clade II)__AIT17704__GPCstabilized
augggccagaucaucaccuucuuccaggaggucccccacgucaucgaggaggucaugaacaucguccucaucgcccucucccuccucgccauccucaagggcaucuacaacgucgccaccugcggccucuucggccucgucuccuuccuccuccucugcggccgcuccugcuccaccaccuacaagggcgucuacgagcuccagacccucgagcucgacauggccucccucaacaugaccaugccccucuccugcaccaagaacaacucccaccacuacaucauggucggcaacgagaccggccucgagcucacccucaccaacaccuccaucaucaaccacaaguucugcaaccucuccgacgcccacaagaagaaccucuacgaccacgcccucauguccaucaucuccaccuuccaccucuccauccccaacuucaaccaguacgaggccauguccugcgacuucaacggcggcaagaucuccguccaguacaaccucucccacaccuacgccgucgacgccgccaaccacugcggcaccaucgccaacggcguccuccagaccuucaugcgcauggccuggggcggcuccuacaucgcccucgacuccggcugcggcuccugggacugcaucaugaccuccuaccaguaccucaucauccagaacaccaccugggaggaccacugccaguucucccgccccucccccaucggcuaccucggccuccucucccagcgcacccgcgacaucuacaucucccgccgccgccggggcaccuucaccuggacccucuccgacuccgagggcaacgagacccccggcggcuacugccucacccgcuggaugcucaucgaggccgagcucaagugcuucggcaacaccgccgucgccaagugcaacgagaagcacgacgaggaguucugcgacaugcuccgccucuucgacuucaacaagcaggccauccgccgccucaagacccccgcccagauguccauccagcucaucaacaaggccgucaacgcccucaucaacgaccagcucaucaugaagaaccaccuccgcgacaucaugugcauccccuacugcaacuacuccaaguacugguaccucaaccacaccgucaccggcaagaccucccucccccgcugcuggcucgucuccaacggcuccuaccucaacgagacccacuucuccgacgacaucgagcagcaggccgacaacaugaucaccgagcuccuccagaaggaguacaucgaccgccagggcaagaccccccucggccucgucgaccucuucgucuucuccaccuccuucuaccucaucuccaucuuccuccaccucgucaagauccccacccaccgccacgucaucggcaagcccugccccaagccccaccgccucaaccacaugggcaucugcuccugcggccucuacaagcaccccggcguccccgucaaguggaagcgcuga

SEQ ID NO: 4726 - RNA, 1473 nt, Artificial Sequence
  derived and/or modified protein sequence (opt2) from LASV(LASV738-NIG-2009;Clade II)__AIT17712__GPCstabilized
augggccagaucaucaccuucuuccaggaggucccccacgucaucgaggaggucaugaacaucguccucaucgcccucucccuccucgccauccucaagggcaucuacaacgucgccaccugcggccucuucggccucgucuccuuccuccuccucugcggccgcuccugcuccaccaccuacaagggcgucuacgagcuccagacccucgagcucgacauggccucccucaacaugaccaugccccucuccugcaccaagaacaacucccaccacuacaucauggucggcaacgagaccggccucgagcucacccucaccaacaccuccaucaucaaccacaaguucugcaaccucuccgacgcccacaagaagaaccucuacgaccacgcccucauguccaucaucuccaccuuccaccucuccauccccaacuucaaccaguacgaggccauguccugcgacuucaacggcggcaagaucuccguccaguacaaccucucccacaccuacgccgucgacgccgccaaccacugcggcaccaucgccaacggcguccuccagaccuucaugcgcauggccuggggcggcuccuacaucgcccucgacuccggcugcggcgccugggacugcaucaugaccuccuaccaguaccucaucauccagaacaccaccugggaggaccacugccaguucucccgccccucccccaucggcuaccucggccuccucucccagcgcacccgcgacaucuacaucucccgccgccgccggggcaccuucaccuggacccucuccgacuccgagggcaacgagacccccggcggcuacugccucacccgcuggaugcucaucgaggccgagcucaagugcuucggcaacaccgccgucgccaagugcaacgagaagcacgacgaggaguucugcgacaugcuccgccucuucgacuucaacaagcaggccaucaugcgccucaagacccccgcccagauguccauccagcucaucaacaaggccgucaacgcccucaucaacgaccagcucaucaugaagaaccaccuccgcgacaucaugugcauccccuacugcaacuacuccaaguacugguaccucaaccacaccgucaccggcaagaccucccucccccgcugcuggcucgucuccaacggcuccuaccucaacgagacccacuucuccgacgacaucgagcagcaggccgacaacaugaucaccgagaugcuccagaaggaguacaucgaccgccagggcaagaccccccucggccucgucgaccucuucgucuucuccaccuccuucuaccucaucuccaucuuccuccaccucgucaagauccccacccaccgccacgucaucggcaagcccugccccaagccccaccgccucaaccacaugggcaucugcuccugcggccucuacaagcaccccggcguccccguccgcuggaagcgcuga

SEQ ID NO: 4727 - RNA, 1473 nt, Artificial Sequence
  derived and/or modified protein sequence (opt2) from LASV(LASV966-NIG-2009;Clade II)__AIT17718__GPCstabilized
augggccagaucaucaccuucuuccaggaggucccccacgucaucgaggaggucaugaacaucguccucaucgcccucucccuccucgccauccucaagggcaucuacaacgucgccaccugcggccucuucggccucgucuccuuccuccuccucugcggccgcuccugcuccaccaccuacaagggcgucuacgagcuccagacccucgagcucgacauggccucccucaacaugaccaugccccucuccugcaccaagaacaacucccaccacuacauccgcgucggcaacgagaccggccucgagcucacccucaccaacgccuccaucaucaaccacaaguucugcaaccucuccgacgcccacaagaagaaccucuacgaccacgcccucauguccaucaucuccaccuuccaccucuccauccccaacuucaaccaguacgaggccauguccugcgacuucaacggcggcaagaucuccguccaguacaaccucucccacgccuacgccaucgacgccgccaaccacugcggcaccgucgccaacggcguccuccagaccuucaugcgcauggccuggggcggcuccuacaucgcccucgacuccggcugcggcaacugggacugcaucaugaccuccuaccaguaccucaucauccagaacaccaccugggaggaccacugccaguucucccgccccucccccaucggcuaccucggccuccucucccagcgcacccgcgacaucuacaucucccgccgccgccggggcaccuucaccuggacccucuccgacuccgagggcaacgagacccccggcggcuacugccucacccgcuggaugcucaucgaggccgagcucaagugcuucggcaacaccgccgucgccaagugcaacgagaagcacgacgaggaguucugcgacaugcuccgccucuucgacuucaacaagcaggccauccgccgccucaagacccccgcccagauguccauccagcucaucaacaaggccgucaacgcccucaucaacgaccagcucaucaugaagaaccaccuccgcgacaucaugugcauccccuacugcaacuacuccaaguacugguaccucaaccacaccgucaccggcaagaccucccucccccgcugcuggcucgucuccaacggcuccuaccucaacgagacccacuucuccgacgacaucgagcagcaggccgacaacaugaucaccgagcuccuccagaaggaguacauggaccgccagggcaagaccccccucggccucgucgaccucuucgucuucuccaccuccuucuaccucaucuccaucuuccuccaccucgucaagauccccacccaccgccacgucaucggcaagcccugccccaagccccaccgccucaaccacaugggcaucugcuccugcggcuucuacaagcaccccggcguccccgucaaguggaagcgcuga

SEQ ID NO: 4728 - RNA, 1473 nt, Artificial Sequence
  derived and/or modified protein sequence (opt2) from LASV(LASV969-NIG-2009;Clade II)__AIT17724__GPCstabilized
augggccagaucaucaccuucuuccaggaggucccccacgucaucgaggaggucaugaacaucguccucaucgcccucucccuccucgccauccucaagggcaucuacaacgucgccaccugcggccucuucggccucgucuccuuccuccuccucugcggccgcuccugcuccaccaccuacaagggcgucuacgagcuccagacccucgagcucgacauggccaaccucaacaugaccaugccccucuccugcaccaagaacaacucccaccacuacaucauggucggcaacgagaccggccucgagcucacccucaccaacaccuccaucaucaaccacaaguucugcaaccucuccgacgcccacaagaagaaccucuacgaccacgcccucauguccaucaucuccaccuuccaccucuccauccccaacuucaaccaguacgaggccauguccugcgacuucaacggcggcaagaucuccguccaguacaaccucucccacaccuacgccgucgacgccgccaaccacugcggcaccgucgccaacggcguccuccagaccuucaugcgcauggccuggggcggcuccuacaucgcccucgacuccggcugcggcuccugggacugcaucaugaccuccuaccaguaccucaucauccagaacaccaccugggaggaccacugccaguucucccgccccucccccaucggcuaccucggccuccucucccagcgcacccgcgacaucuacaucucccgccgccgccggggcaccuucaccuggacccucuccgacuccgagggcaacgagacccccggcggcuacugccucacccgcuggaugcucaucgaggccgagcucaagugcuucggcaacaccgccgucgccaagugcaacgagaagcacgacgaggaguucugcgacaugcuccgccucuucgacuucaacaagcaggccauccgccgccucaagacccccgcccagauguccauccagcucaucaacaaggccgucaacgcccucaucaacgaccagcucaucaugaagaaccaccuccgcgacaucaugugcauccccuacugcaacuacuccaaguacugguaccucaaccacaccgucaccggcaagaccucccucccccgcugcuggcucgucuccaacggcuccuaccucaacgagacccacuucuccgacgacaucgagcagcaggccgacaacaugaucaccgagcuccuccagaaggaguacauggaccgccagggcaagaccccccucggccucgucgaccucuucgucuucuccaccuccuucuaccucaucuccaucuuccuccaccucgucaagauccccacccaccgccacaucaugggcaagcccugccccaagccccaccgccucaaccacaugggcaucugcuccugcggccucuacaagcaccccggcguccccgucaaguggaagcgcuga

SEQ ID NO: 4729 - RNA, 1473 nt, Artificial Sequence
  derived and/or modified protein sequence (opt2) from LASV(LASV971-NIG-2009;Clade II)__AIT17728__GPCstabilized
augggccagaucaucaccuucuuccaggaggucccccacgucaucgaggaggucaugaacaucguccucaucgcccucucccuccucgccauccucaagggcaucuacaacgucgccaccugcggccucuucggccucgucuccuuccuccuccucugcggccgcuccugcuccaccaccuacaagggcgucuacgagcuccagacccucgagcucgacaugggcucccucaacaugaccaugccccucuccugcaccaagaacaacucccaccacuacaucauggucggcaacgagaccggccucgagcucacccucaccaacaccuccaucaucaaccacaaguucugcaaccucuccgacgcccacaagaagaaccucuacgaccacgcccucauguccaucaucuccaccuuccaccucuccauccccaacuucaaccaguacgaggccauguccugcgacuucaacggcggcaagaucuccguccaguacaaccucucccacaccuacgccgucgacgccgccaaccacugcggcaccaucgccaacggcguccuccagaccuucaugcgcauggccuggggcggcuccuacaucgcccucgacuccggcugcggcuccugggacugcaucaugaccuccuaccaguaccucaucauccagaacaccaccugggaggaccacugccaguucucccgccccucccccaucggcuaccucggccuccucucccagcgcacccgcgacaucuacaucucccgccgccgccggggcaccuucaccuggacccucuccgacuccgagggcaacgagacccccggcggcuacugccucacccgcuggaugcucaucgaggccgagcucaagugcuucggcaacaccgccgucgccaagugcaacgagaagcacgacgaggaguucugcgacaugcuccgccucuucgacuucaacaagcaggccauccgccgccucaagacccccgcccagauguccauccagcucaucaacaaggccgucaacgcccucaucaacgaccagcucaucaugaagaaccaccuccgcgacaucaugugcauccccuacugcaacuacuccaaguacugguaccucaaccacaccgucaccggcaagaccucccucccccgcugcuggcucgucuccaacggcuccuaccucaacgagacccacuucuccgacgacaucgagcagcaggccgacaacaugaucaccgagcuccuccagaaggaguacauggaccgccagggcaagaccccccucggccucgucgaccucuucgucuucuccaccuccuucuaccucaucuccaucuuccuccaccucgucaagauccccacccaccgccacgucaucggcaagcccugccccaagccccaccgccucaaccacaugggcaucugcuccugcggccucuacaagcaccccggcguccccgucaaguggaagcgcuga

SEQ ID NO: 4730 - RNA, 1473 nt, Artificial Sequence
  derived and/or modified protein sequence (opt2) from LASV(LASV975-NIG-2009;Clade II)__AIT17732__GPCstabilized
augggccagaucaucaccuucuuccaggaggucccccacgucaucgaggaggucaugaacaucguccucaucgcccucucccuccucgccauccucaagggcaucuacaacgucgccaccugcggccucuucggccucgucuccuuccuccuccucugcggccgcuccugcuccaccaccuacaagggcgucuacgagcuccagacccucgagcucgacauggccucccucaacaugaccaugccccucuccugcaccaagaacaacucccaccacuacaucauggucggcaacgagaccggccucgagcucacccucaccaacaccuccaucaucaaccacaaguucugcaaccucuccgacgcccacaagaagaaccucuacgaccacgcccucauguccaucaucuccaccuuccaccucuccauccccaacuucaaccaguacgaggccauguccugcgacuucaacggcggcaagaucuccguccaguacaaccucucccacaccuacgccgucgacgccgccaaccacugcggcaccaucgccaacggcguccuccagaccuucaugcgcauggccuggggcggcuccuacaucgcccucgacuccggcugcggcuccugggacugcaucaugaccuccuaccaguaccucaucauccagaacaccaccugggaggaccacugccaguucucccgccccucccccaucggcuaccucggccuccucucccagcgcacccgcgacaucuacaucucccgccgccgccggggcaccuucaccuggacccucuccgacuccgagggcaacgagacccccggcggcuacugccucacccgcuggaugcucaucgaggccgagcucaagugcuucggcaacaccgccgucgccaagugcaacgagaagcacgacgaggaguucugcgacaugcuccgccucuucgacuucaacaagcaggccauccgccgccucaagacccccgcccagauguccauccagcucaucaacaaggccgucaacgcccucaucaacgaccagcucaucaugaagaaccaccuccgcgacaucaugugcauccccuacugcaacuacuccaaguacugguaccucaaccacaccgucaccggcaagaccucccucccccgcugcuggcucgucuccaacggcuccuaccucaacgagacccacuucuccgacgacaucgagcagcaggccgacaacaugaucaccgagcuccuccagaaggaguacaucgaccgccagggcaagaccccccucggccucgucgaccucuucgucuucuccaccuccuucuaccucaucuccaucuuccuccaccucgucaagauccccacccaccgccacaucgucggcaagcccugccccaagccccaccgccucaaccacaugggcaucugcuccugcggccucuacaagcaccccggcguccccgucaaguggaagcgcuga

SEQ ID NO: 4731 - RNA, 1473 nt, Artificial Sequence
  derived and/or modified protein sequence (opt2) from LASV(LASV976-NIG-2009;Clade II)__AIT17736__GPCstabilized
augggccagaucgucaccuucuuccaggaggucccccacgucaucgaggaggucaugaacaucguccucaucgcccucucccuccucgccauccucaagggcaucuacaacgucgccaccugcggccucuucggccucgucuccuuccuccuccucugcggccgcuccugcuccaccaccuacaagggcgucuacgagcuccagacccucgagcucgacauggccucccucaacaugaccaugccccucuccugcaccaagaacaacucccaccacuacaucauggucggcaacgagaccggccucgagcucacccucaccaacaccuccaucaucaaccacaaguucugcaaccucuccgacgcccacaagaaggaccucuacgaccacgcccucauguccaucaucuccaccuuccaccucuccauccccaacuucaaccaguacgaggccauguccugcgacuucaacggcggcaagaucuccguccaguacaaccucucccacaccuacgccgucgacgccgccaaccacugcggcaccaucgccaacggcguccuccagaccuucaugcgcauggccuggggcggcuccuacaucgcccucgacuccggcugcggcuccugggacugcaucaugaccuccuaccaguaccucaucauccagaacaccaccugggaggaccacugccaguucucccgccccucccccaucggcuaccucggccuccucucccagcgcacccgcgacaucuacaucucccgccgccgccggggcaccuucaccuggacccucuccgacuccgagggcaacgagacccccggcggcuacugccucacccgcuggaugcucaucgaggccgagcucaagugcuucggcaacaccgccgucgccaagugcaacgagaagcacgacgaggaguucugcgacaugcuccgccucuucgacuucaacaagcaggccaucaugcgccucaagacccccgcccagauguccauccagcucaucaacaaggccgucaacgcccucaucaacgaccagcucaucaugaagaaccaccuccgcgacaucaugugcauccccuacugcaacuacuccaaguacugguaccucaaccacaccgucaccggcaagaccucccucccccgcugcuggcucgucuccaacggcuccuaccucaacgagacccgcuucuccgacgacaucgagcagcaggccgacaacaugaucaccgagaugcuccagaaggaguaccucgaccgccagggcaagaccccccucggccucgucgaccucuucgucuucuccaccuccuucuaccucaucuccaucuuccuccaccucgucaagauccccacccaccgccacaucaucggcaagcccugccccaagccccaccgccucaaccacaugggcaucugcuccugcggccucuacaagcaccccggcguccccgucaaguggaagcgcuga

SEQ ID NO: 4732 - RNA, 1473 nt, Artificial Sequence
  derived and/or modified protein sequence (opt2) from LASV(LASV978-NIG-2009;Clade II)__AIT17744__GPCstabilized
augggccagaucaucaccuucuuccaggaggucccccacgucaucgaggaggucaugaacaucguccucaucgcccucucccuccucgccauccucaagggcaucuacaacgucgccaccugcggccucuucggccucauguccuuccuccuccucugcggccgcuccugcuccaccaccuacaagggcgucuacgagcuccagacccucgagcucgacauggccaaccucaacaugaccaugccccucuccugcaccaagaacaacucccaccacuacaucauggucggcaacgagaccggccucgagcucacccucaccaacaccuccaucaucaaccacaaguucugcaaccucuccgacgcccacaagaagaaccucuacgaccacgcccucauguccaucaucuccaccuuccaccucuccauccccaacuucaaccaguacgaggccauguccugcgacuucaacggcggcaagaucuccguccaguacaaccucucccacgccuacgccgucgacgccgccaaccacugcggcaccaucgccaacggcguccuccagaccuucaugcgcauggccuggggcggcuccuacaucgcccucgacuccggcugcggcuccugggacugcaucaugaccuccuaccaguaccucaucauccagaacaccuccugggaggaccacugccaguucucccgccccucccccaucggcuaccucggccuccucucccagcgcacccgcgacaucuacaucucccgccgccgccggggcaccuucaccuggacccucuccgacuccgagggcaacgagacccccggcggcuacugccucacccgcuggaugcucaucgaggccgagcucaagugcuucggcaacaccgccgucgccaagugcaacgagaagcacgacgaggaguucugcgacaugcuccgccucuucgacuucaacaagcaggccauccgccgccucaagacccccgcccagauguccauccagcucaucaacaaggccgucaacgcccucaucaacgaccagcucaucaugaagaaccaccuccgcgacaucaugugcauccccuacugcaacuacuccaaguacugguaccucaaccacaccgucaccggcaagaccucccucccccgcugcuggcucgucuccaacggcuccuaccucaacgagacccacuucuccgacgacaucgagcagcaggccgacaacaugaucaccgagcuccuccagaaggaguacaucgaccgccagggcaagaccccccucggccucgucgaccucuucgucuucuccaccuccuucuaccucaucuccaucuuccuccaccucgucaagauccccacccaccgccacgucaucggcaagcccugccccaagccccaccgccucaaccacaugggcaucugcuccugcggccucuacaagcaccccggcguccccgucaaguggaagcgcuga

SEQ ID NO: 4733 - RNA, 1473 nt, Artificial Sequence
  derived and/or modified protein sequence (opt2) from LASV(LASV981-NIG-2009;Clade II)__AIT17752__GPCstabilized
augggccagaucaucaccuucuuccacgaggucccccacgucaucgaggaggucaugaacaucguccucaucgcccucucccuccucgccauccucaagggcaucuacaacgucgccaccugcggccucuucggccucgucuccuuccuccuccucugcggccgcuccugcuccaccaccuacaagggcgucuacgagcuccagacccucgagcucgacauggccucccucaacaugaccaugccccucuccugcaccaagaacaacucccaccacuacaucauggucggcaacgagaccggccucgagcucacccucaccaacaccuccaucaucaaccacaaguucugcaaccucuccgacgcccacaagaagaaccucuacgaccacgcccucauguccaucaucuccaccuuccaccucuccauccccaacuucaaccaguacgaggccauguccugcgacuucaacggcggcaagaucuccguccaguacaaccucucccacaccuacgccaucgacgccgccaaccacugcggcaccaucgccaacggcguccuccagaccuucaugcgcauggccuggggcggcuccuacaucgcccucgacuccggcugcggcuccugggacugcaucaugaccuccuaccaguaccucaucauccagaacaccaccugggaggaccacugccaguucucccgccccucccccaucggcuaccucggccuccucucccagcgcacccgcgacaucuacaucucccgccgccgccggggcaccuucaccuggacccucuccgacuccgagggcaacgagacccccggcggcuacugccucacccgcuggaugcucaucgaggccgagcucaagugcuucggcaacaccgccgucgccaagugcaacgagaagcacgacgaggaguucugcgacaugcuccgccucuucgacuucaacaagcaggccauccgccgccucaagacccccgcccagauguccauccagcucaucaacaaggccgucaacgcccucaucaacgaccagcucaucaugaagaaccaccuccgcgacaucaugugcauccccuacugcaacuacuccaaguacugguaccucaaccacaccgucaccggcaagaccucccucccccgcugcuggcucgucuccaacggcuccuaccucaacgagacccacuucuccgacgacaucgagcagcaggccgacaacaugaucaccgagcuccuccagaaggaguacaucgaccgccagggcaagaccccccucggccucgucgaccucuucgucuucuccaccuccuucuaccucaucuccaucuuccuccaccucgucaagauccccacccaccgccacgucaucggcaagcccugccccaagccccaccgccucaaccacaugggcaucugcuccugcggccucuacaagcaccccggcguccccgucaaguggaagcgcuga

SEQ ID NO: 4734 - RNA, 1473 nt, Artificial Sequence
  derived and/or modified protein sequence (opt2) from LASV(LASV982-NIG-2009;Clade II)__AIT17756__GPCstabilized
augggccagaucaucaccuucuuccaggaggucccccacgucaucgaggaggucaugaacaucguccucaucgcccucucccuccucgccauccucaagggcaucuacaacgucgccaccugcggccucuucggccucgucuccuuccuccuccucugcggccgcuccugcuccaucaccuacaagggcgucuacgagcuccagacccucgagcucgacauggccucccucaacaugaccaugccccucuccugcaccaagaacaacucccaccacuacaucauggucggcaacgagaccggccucgagcucacccucaccaacaccuccaucaucaaccacaaguucugcaaccucuccgacgcccacaagaagaaccucuacgaccacgcccucauguccaucaucuccaccuuccaccucuccauccccaacuucaaccaguacgaggccauguccugcgacuucaacggcggcaagaucuccguccaguacaaccucucccacaccuacgccgucgacgccgccaaccacugcggcaccaucgccaacggcguccuccagaccuucaugcgcauggccuggggcggcuccuacaucgcccucgacuccggcugcggcuccugggacugcaucaugaccuccuaccaguaccucaucauccagaacaccaccugggaggaccacugccaguucucccgccccucccccaucggcuaccucggccuccucucccagcgcacccgcgacaucuacaucucccgccgccgccggggcaccuucaccuggacccucuccgacuccgagggcaacgagacccccggcggcuacugccucacccgcuggaugcucaucgaggccgagcucaagugcuucggcaacaccgccgucgccaagugcaacgagaagcacgacgaggaguucugcgacaugcuccgccucuucgacuucaacaagcaggccauccgccgccucaaggcccccgcccagauguccauccagcucaucaacaaggccgucaacgcccucaucaacgaccagcucaucaugaagaaccaccuccgcgacaucaugugcauccccuacugcaacuacuccaaguacugguaccucaaccacaccgucaccggccgcaccucccucccccgcugcuggcucgucuccaacggcuccuaccucaacgagacccacuucuccgacgacaucgagcagcaggccgacaacaugaucaccgagcuccuccagaaggaguacaucgaccgccagggcaagaccccccucggccucgucgaccucuucgucuucuccaccuccuucuaccucaucuccaucuuccuccaccucgucaagauccccacccaccgccacaucaucggcaagcccugccccaagccccaccgccucaaccacaugggcaucugcuccugcggccucuacaagcaccccggcguccccgucaaguggaagcgcuga

SEQ ID NO: 4735 - RNA, 1473 nt, Artificial Sequence
  derived and/or modified protein sequence (opt2) from LASV(LASV988-NIG-2009;Clade II)__AIT17758__GPCstabilized
augggccagaucaucaccuucuuccaggaggucccccacgucaucgaggaggucaugaacaucguccucaucgcccucucccuccucgccauccucaagggcaucuacaacgucgccaccugcggccucuucggccucgucuccuuccuccuccucugcggccgcuccugcuccaccaccuacaagggcgucuacgagcuccagacccucgagcucaacauggccucccucaacaugaccaugccccucuccugcaccaagaacaacucccaccacuacaucauggucggcaacgagaccggccucgagcucacccucaccaacaccuccaucaucaaccacaaguucugcaaccucuccgacgcccacaagcgcaaccucuacgaccacgcccucauguccaucaucuccaccuuccaccucuccauccccaacuucaaccaguacgaggccauguccugcgacuucaacggcggcaagaucuccguccaguacaaccucucccacaccuacgccgucgacgccgccaagcacugcggcaccaucgccaacggcguccuccagaccuucaugcgcauggccuggggcggcuccuacaucgcccucgacuccggcugcggcuccugggacugcaucaugaccuccuaccaguaccucaucauccagaacaccaccugggaggaccacugcgaguucucccgccccucccccaucggcuaccucggccuccucucccagcgcacccgcgacaucuacaucucccgccgccgccggggcaccuucaccuggacccucuccgacuccgagggcaacgagacccccggcggcuacugccucacccgcuggaugcucaucgaggccgagcucaagugcuucggcaacaccgccgucgccaagugcaacgagaagcacgacgaggaguucugcgacaugcuccgccucuucgacuucaacaagcaggccauccgccgccucaaggcccccgcccagauguccauccagcucaucaacaaggccgucaacgcccucaucaacgaccagcucaucaugaagaaccaccuccgcgacaucaugugcauccccuacugcaacuacuccaaguacugguaccucaaccacaccgucaccggcaagaccucccucccccgcugcuggcucgucuccaacggcuccuaccucaacgagacccacuucuccgacgacaucgagcagcaggccgacaacaugaucaccgagcuccuccagaaggaguacaucgaccgccagggcaagaccccccucggccucgucgaccucuucgucuucuccaccuccuucuaccucaucuccaucuuccuccaccucgucaagauccccacccaccgccacgucaucggcaagcccugccccaagccccaccgccucaaccacaugggcaucugcuccugcggccucuacaagcaccccggcguccccgucaaguggaagcgcuga

SEQ ID NO: 4736 - RNA, 1473 nt, Artificial Sequence
  derived and/or modified protein sequence (opt2) from LASV(LASV989-NIG-2009;Clade II)__AIT17762__GPCstabilized
augggccagaucaucaccuucuuccaggaggucccccacgucaucgaggaggucaugaacaucguccucaucgcccucucccuccucgccauccucaagggcaucuacaacgucgccaccugcggccucuucggccucgucuccuuccuccuccucugcggccgcuccugcuccaccaccuacaagggcgucuacgagcuccagacccucgagcucgacauggccucccucaacaugaccaugccccucuccugcaccaagaacaacucccaccacuacaucauggucggcaacgagaccggccucgagcucacccucaccaacaccuccaucaucucccacaaguucugcaaccucuccgacgcccacaagaagaaccucuacgaccacgcccucauguccaucaucuccaccuuccaccucuccauccccaacuucaaccaguacgaggccauguccugcgacuucaacggcggcaagaucuccguccaguacaaccucucccacaccuacgccgucgacgccgccaaccacugcggcaccaucgccaacggcguccuccagaccuucaugcgcauggccuggggcggcuccuacaucgcccucgacuccggcugcggcuccugggacugcaucaugaccuccuaccaguaccucaucauccagaacaccaccugggaggaccacugccaguucucccgccccucccccaucggcuaccucggccuccucucccagcgcacccgcgacaucuacaucucccgccgccgccggggcaccuucaccuggacccucuccgacuccgagggcaacgaggcccccggcggcuacugccucacccgcuggaugcucaucgaggccgagcucaagugcuucggcaacaccgccgucgccaagugcaacgagaagcacgacgaggaguucugcgacaugcuccgccucuucgacuucaacaagcaggccauccgccgccucaagacccccgcccagauguccauccagcucaucaacaaggccgucaacgcccucaucaacgaccagcucaucaugaagaaccaccuccgcgacaucaugugcauccccuacugcaacuacucccgcuacugguaccucaaccacaccgucaccggcaagaccucccucccccgcugcuggcucgucuccaacggcuccuaccucaacgagacccacuucuccgacgacaucgagcagcaggccgacaacaugaucaccgagcuccuccagaaggaguacauggaccgccagggcaagaccccccucggccucgucgaccucuucgucuucuccaccuccuucuaccucaucuccaucuuccuccaccucgucaagauccccacccaccgccacgucaucggcaagcccugccccaagccccaccgccucaaccacaugggcaucugcuccugcggccucuacaagcaccccggcguccccgucaaguggaagcgcuga

SEQ ID NO: 4737 - RNA, 1473 nt, Artificial Sequence
  derived and/or modified protein sequence (opt2) from LASV(LASV991-NIG-2009;Clade II)__AIT17770__GPCstabilized
augggccagaucgucaccuucuuccaggaggucccccacgucaucgaggaggucaugaacaucguccucaucgcccucucccuccucgccauccucaagggcaucuacaacgucgccaccugcggccucuucggccucgucuccuuccuccuccucugcggccgcuccugcuccaccaccuacaagggcgucuacgagcuccaggcccucgagcucgacauguccucccucaacaugaccaugccccucuccugcaccaagaacaacucccaccacuacaucauggucggcaacgagaccggccucgagcucacccucaccaacaccuccaucauccaccacaaguucugcaaccucuccgacgcccacaagaaggaccucuacgaccacgcccucauguccaucaucuccaccuuccaccucuccauccccaacuucaaccaguacgaggccauguccugcgacuucaacggcggcaagaucuccguccaguacaaccucucccacaccuacgccgucgacgccgccaaccacugcggcaccaucgccaacggcguccuccagaccuucaugcgcauggccuggggcggcuccuacaucgcccucgacuccggcugcggcggcugggacugcaucaugaccuccuaccaguuccucaucauccagaacaccaccugggaggaccacugccaguucucccgccccucccccaucggcuaccucggccuccucucccagcgcacccgcgacaucuacaucucccgccgccgccggggcaccuucaccuggacccucuccgacuccgagggcaacgagacccccggcggcuacugccucacccgcuggaugcucaucgaggccgagcucaagugcuucggcaacaccgccgucgccaagugcaacgagaagcacgacgaggaguucugcgacaugcuccgccucuucgacuucaacaagcaggccaucaagcgccucaagacccccgcccagauguccauccaccucaucaacaaggccgucaacgcccucaucaacgaccagcucaucaugaagaaccaccuccgcgacaucaugugcauccccuacugcaacuacuccaaguacugguaccucaaccacaccgucaccggcaagaccucccucccccgcugcuggcucgucuccaacggcuccuaccucaacgagacccacuucuccgacgacaucgagcagcaggccgacaacaugaucaccgagcuccuccagaaggaguacaucgaccgccagggcaagaccccccucggccucgucgaccucuucgucuucuccaccuccuucuaccucaucuccaucuuccuccaccucgucaagauccccacccaccgccacgucaucggcaagcccugccccaagccccaccgccucaaccacaugggcaucugcuccugcggccucuacaagcaccccggcguccccguccgcuggaagcgcuga

SEQ ID NO: 4738 - RNA, 1473 nt, Artificial Sequence
  derived and/or modified protein sequence (opt2) from LASV(LASV993-NIG-2009;Clade II)__AIT17778__GPCstabilized
augggccagaucaucaccuucuuccaggaggucccccacgucaucgaggaggucaugaacaucguccucaucgcccucucccuccucgccauccucaagggcaucuacaacgucgccaccugcggccucuucggccucgucuccuuccuccuccucugcggccgcuccugcuccaccaccuacaagggcgucuacgagcuccagacccucgagcucgacauggccaaccucaacaugaccaugccccucuccugcaccaagaacaacucccaccacuacaucauggucggcaacgagaccggccucgagcucacccucaccaacaccuccaucaucaaccacaaguucugcaaccucuccgacgcccacaagaagaaccucuacgaccacgcccucauguccaucaucuccaccuuccaccucuccauccccaacuucaaccaguacgaggccauguccugcgacuucaacggcggcaagaucuccguccaguacaaccucucccacaccuacgcccgcgacgccgccaaccacugcggcaccaucgccaacggcguccuccagaccuucaugcgcauggccuggggcggcuccuacaucgcccucgacuccggcugcggcuccugggacugcaucaugaccuccuaccaguaccucaucauccagaacaccaccugggaggaccacugccaguucucccgccccucccccaucggcuaccucggccuccucucccagcgcacccgcgacaucuacaucucccgccgccgccggggcaccuucaccuggacccucuccgacuccgagggcaacgagacccccggcggcuacugccucacccgcuggaugcucaucgaggccgagcucaagugcuucggcaacaccgccgucgccaagugcaacgagaagcacgacgaggaguucugcgacaugcuccgccucuucgacuucaacaagcaggccauccgccgccucaagacccccgcccagaugaacauccagcucaucaacaaggccgucaacgcccucaucaacgaccagcucaucaugaagaaccaccuccgcgacaucaugugcauccccuacugcaacuacuccaaguacugguaccucaaccacaccgucaccggcaagaccucccucccccgcugcuggcucgucuccaacggcuccuaccucaacgagacccacuucuccgacgacaucgagcagcaggccgacaacaugaucaccgagcuccuccagaaggaguacauggaccgccagggcaagaccccccucggccucgucgaccucuucgucuucuccaccuccuucuaccucaucuccaucuuccuccaccucgucaagauccccacccaccgccacgucaucggcaagcccugccccaagccccaccgccucaaccacaugggcaucugcuccugcggccucuacaagcaccccggcguccccgucaaguggaagcgcuga

SEQ ID NO: 4739 - RNA, 1473 nt, Artificial Sequence
  derived and/or modified protein sequence (opt2) from LASV(Nig08-04;Clade II)__ADU56610__GPCstabilized
augggccagaucgucaccuucuuccaggaggucccccacgucaucgaggaggucaugaacaucguccucaucgcccucucccuccucgccauccucaagggcaucuacaacgucgccaccugcggccucuucggccucaucuccuuccuccuccucugcggccgcuccugcuccaccaccuacaagggcgucuacgagcuccagacccucgagcucgacauggccaaccucaacaugaccaugccccucuccugcaccaagaacuccucccaccacuacaucauggucggcaacgagaccggccucgagcucacccucaccaacaccuccaucaucaaccacaaguucugcaaccucuccgacgcccacaagaagaaccucuacgaccacgcccucauguccaucaucuccaccuuccaccucuccauccccaacuucaaccaguacgaggccauguccugcgacuucaacggcggcaagaucuccguccaguacaaccucucccacgccuacgccgucgacgccgccaaccacugcggcaccaucgccaacggcguccuccagaccuucaugcgcauggccuggggcggcuccuacaucgcccucgacuccggcugcggcaacugggacugcaucaugaccuccuaccaguaccucaucauccagaacaccaccugggaggaccacugccaguucucccgccccucccccaucggcuaccucggccuccucucccagcgcacccgcgacaucuacaucucccgccgccgccggggcaccuucaccuggacccucuccgacuccgagggcaacgaggcccccggcggcuacugccucacccgcuggaugcucaucgaggccgagcucaagugcuucggcaacaccgccaucgccaagugcaacgagaagcacgacgaggaguucugcgacaugcuccgccucuucgacuucaacaagcaggccaucaagcgccucaaggcccccgcccagauguccauccagcucaucaacaaggccgucaacgcccucaucaacgaccagcucaucaugaagaaccaccuccgcgacaucaugugcauccccuacugcaacuacuccaaguacugguaccucaaccacaccgucaccggcaagaccucccucccccgcugcuggcucaucuccaacggcuccuaccucaacgagacccacuucuccgacgacaucgagcagcaggccgacaacaugaucaccgagcuccuccagaaggaguacauggaccgccagggcaagaccccccucggccucgucgaccucuucgucuucuccaccuccuucuaccucaucuccaucuuccuccaccucgucaagauccccacccaccgccacaucgucggccgccccugccccaagccccaccgccucaaccacaugggcaucugcuccugcggccucuacaagcaccccggcguccccgucaaguggaagcgcuga

SEQ ID NO: 4740 - RNA, 1473 nt, Artificial Sequence
  derived and/or modified protein sequence (opt2) from LASV(Nig08-A41;Clade II)__ADU56626__GPCstabilized
augggccagaucaucaccuucuuccaggaggucccccacgucaucgaggaggucaugaacaucguccucaucgcccucucccuccucgccauccucaagggcaucuacaacgucgccaccugcggccucuucggccucgucuccuuccuccuccucugcggccgcuccugcuccaccaccuacaagggcgucuacgagcuccagacccucgagcucaacauggccucccucaacaugaccaugccccucuccugcaccaagaacaacucccaccacuacaucauggucggcaacgagaccggccucgagcucacccucaccaacaccuccaucaucaaccacaaguucugcaaccucuccgacgcccacaagcgcaaccucuacgaccacgcccucauguccaucaucuccaccuuccaccucuccauccccaacuucaaccaguacgaggccauguccugcgacuucaacggcggcaagaucuccguccaguacaaccucucccacaccuacgccgucgacgccgccaagcacugcggcaccaucgccaacggcguccuccagaccuucaugcgcauggccuggggcggcuccuacaucgcccucgacuccggcugcggcuccugggacugcaucaugaccuccuaccaguaccucaucauccagaacaccaccugggaggaccacugccaguucucccgccccucccccaucggcuaccucggccuccucucccagcgcacccgcgacaucuacaucucccgccgccgccggggcaccuucaccuggacccucuccgacuccgagggcaacgagacccccggcggcuacugccucacccgcuggaugcucaucgaggccgagcucaagugcuucggcaacaccgccgucgccaagugcaacgagaagcacgacgaggaguucugcgacaugcuccgccucuucgacuucaacaagcaggccauccgccgccucaaggcccccgcccagauguccauccagcucaucaacaaggccgucaacgcccucaucaacgaccagcucaucaugaagaaccaccuccgcgacaucaugugcauccccuacugcaacuacuccaaguacugguaccucaaccacaccgucaccggcaagaccucccucccccgcugcuggcucgucuccaacggcuccuaccucaacgagacccacuucuccgacgacaucgagcagcaggccgacaacaugaucaccgagcuccuccagaaggaguacaucgaccgccagggcaagaccccccucggccucgucgaccucuucgucuucuccaccuccuucuaccucaucuccaucuuccuccaccucgucaagauccccacccaccgccacgucaucggcaagcccugccccaagccccaccgccucaaccacaugggcaucugcuccugcggccucuacaagcaccccggcguccccgucaaguggaagcgcuga

SEQ ID NO: 4741 - RNA, 1473 nt, Artificial Sequence
  derived and/or modified protein sequence (opt2) from LASV(Nig08-A47;Clade II)__ADU56630__GPCstabilized
augggccagaucaucaccuucuuccaggaggucccccacgucaucgaggaggucaugaacaucguccucaucgcccucucccuccucgccauccucaagggcaucuacaacgucgccaccugcggccucuucggccucgucuccuuccuccuccucugcggccgcuccugcuccaccaccuacaagggcgucuacgagcuccagacccucgagcucgacauggccucccucaacaugaccaugccccucuccugcaccaagaacaacucccaccacuacaucauggucggcaacgagaccggccucgagcucacccucaccaacaccuccaucaucaaccacaaguucugcaaccucuccgacgcccacaagaagaaccucuacgaccacgcccucauguccaucaucuccaccuuccaccucuccauccccaacuucaaccaguacgaggccauguccugcgacuucaacggcggcaagaucuccguccaguacaaccucucccacgccuacgccgucgacgccgccaaccacugcggcaccaucgccaacggcguccuccagaccuucaugcgcauggccuggggcggcuccuacaucgcccucgacuccggcugcggcuccugggacugcaucaugaccuccuaccaguaccucaucauccagaacaccaccugggaggaccacugccaguucucccgccccucccccaucggcuaccucggccuccucucccagcgcacccgcgacaucuacaucucccgccgccgccggggcaccuucaccuggacccucuccgacuccgagggcaacgagacccccggcggcuacugccucacccgcuggaugcucaucgaggccgagcucaagugcuucggcaacaccgccgucgccaagugcaacgagaagcacgacgaggaguucugcgacaugcuccgccucuucgacuucaacaagcaggccauccgccgccucaagacccccgcccagauguccauccagcucaucaacaaggccgucaacgcccucaucaacgaccagcucaucaugaagaaccaccuccgcgacaucaugugcauccccuacugcaacuacuccaaguacugguaccucaaccacaccgucaccggcaagaccucccucccccgcugcuggcucgucuccaacggcuccuaccucaacgagacccacuucuccgacgacaucgagcagcaggccgacaacaugaucaccgagcuccuccagaaggaguacauggaccgccagggcaagaccccccucggccucgucgaccucuucgucuucuccaccuccuucuaccucaucuccaucuuccuccaccucguccgcauccccacccaccgccacgucaucggcaagcccugccccaagccccaccgccucaaccacaugggcaucugcuccugcggccucuacaagcaccccggcguccccgucaaguggaagcgcuga

SEQ ID NO: 4742 - RNA, 1473 nt, Artificial Sequence
  derived and/or modified protein sequence (opt2) from LASV(CSF;Clade III)__AAL13212__GPCstabilized
augggccagaucgucaccuucuuccaggaggucccccacgucaucgaggagaucaugaacaucguccucaucacccucucccuccucgccauccucaagggcgucuacaaccucgccaccugcggccucaucggccucaucaccuuccucuuccucugcggccgcuccugcuccaugaccuacaagggcuccuaccagcucgagacccucgagcucaacauggagacccucaacaugaccaugccccucuccugcaccaagaacaccucccaccacuacauccgcgucggcaacgagaccggccucgagcucacccucaccaacaccuccaucaucaaccacaaguucugcaaccucuccgacgcccacaagaagaaccucuacgaccacucccucauguccaucaucuccaccuuccaccucuccauccccaacuucaaccaguacgaggccauguccugcgacuucaacggcggcaagaucuccauccaguacaaccucucccacaccuacgccggcgacgccgccaagcacugcggcacccucgccaacggcauccuccagaccuucaugcgcauggccuggggcggcuccuacaucgcccucgacuccggcugcggcaacugggacugcaucaugaccuccuaccaguaccucaucauccagaacaccaccugggaggaccacugccaguucucccgccccucccccaucggcuaccucggccuccucucccagcgcacccgcgagaucuacaucucccgccgccgccggggcaccuucaccuggacccucuccgacuccgagggcaacgagaaccccggcggcuacugccucacccgcuggaugcucaucgaggccgagcucaagugcuucggcaacaccgccgucgccaagugcaacgagaagcacgacgaggaguucugcgacaugcuccgccucuucgacuucaacaagcaggccauccagcgccucaaggcccccgcccagauguccauccagcucaucaacaaggccgucaacgcccucaucaacgaccagcucaucaugaagaaccaccuccgcgacaucaugugcauccccuacugcaacuacuccaaguacugguaccucaaccacaccaccaccggccgcaccucccucccccgcugcuggcucgucuccaacggcuccuaccucaacgagacccgcuucuccgacgacaucgagcagcaggccgacaacaugaucaccgagaugcuccagaaggaguacaucgaccgccagggcaagaccccccucggccucgucgaccucuucgucuucuccaccuccuucuaccucaucuccaucuuccuccaccucaucaagauccccacccaccgccacaucgucggcggccccugccccaagccccaccgccucaaccacaagggcaucugcuccugcggccucuacaagcgccccggcgucuccguccgcuggaagcgcuga

SEQ ID NO: 4743 - RNA, 1473 nt, Artificial Sequence
  derived and/or modified protein sequence (opt2) from LASV(ISTH2121-NIG-2012;Clade III)__AIT17540__GPCstabilized
augggccagaucgucaccuucuuccaggaggucccccacgucaucgaggagaucaugaacaucguccucaucacccucucccuccucgccauccucaagggcaucuacaacuucgccaccugcggccucaucggccucaucaccuuccucuuccucugcggccgcuccugcuccaccaucuacaagggcuccuaccagcuccagacccucgagcucaacauggagacccucaacaugaccaugccccucuccugcaccaagaacaacucccaccacuacauccgcgucggcaacgagaccggccucgagcucacccucaccaacaccuccaucaucaaccacaaguucugcaaccucuccgaggcccacaagaagaaccucuacgaccacgcccucauguccaucaucuccaccuuccaccucuccauccccaacuucaaccaguacgaggccauguccugcgacuucaacggcggcaagaucuccguccaguacaaccucucccacuccuacgccgucgacgccgccaaccacugcggcaccgucgccaacggcguccuccagaccuucaugcgcauggccuggggcggcuccuacaucgcccucgacuccggcugcggcaacugggacugcaucaugaccuccuaccaguaccucaucauccagaacaccaccugggaggaccacugccaguucucccgccccucccccaucggcuaccucggccuccucucccagcgcacccgcgacaucuacaucucccgccgccgccggggcaccuucaccuggacccucuccgacuccgagggcaaggagacccccggcggcuacugccucacccgcuggaugcucaucgaggccgagcucaagugcuucggcaacaccgccgucgccaagugcaacgagaagcacgacgaggaguucugcgacaugcuccgccucuucgacuucaacaagcaggccauccagcgccucaagacccccgcccagauguccauccagcucaucaacaaggccgucaacgcccucaucaacgaccagcucaucaugaagaaccaccuccgcgacaucaugugcauccccuacugcaacuacuccaaguacugguaccucaaccacaccuccaccggccgcaccucccuccccaagugcuggcucgucuccaacggcuccuaccucaacgagacccacuucuccgacgacaucgagcagcaggccgacaacaugaucaccgagaugcuccagaaggaguacaucgaccgccagggcaagaccccccucggccucgucgaccucuucgucuucuccaccuccuucuaccucaucuccaucuuccuccaccucgucaagauccccacccaccgccacaucgucggcaaguccugccccaagccccaccgccucaaccacaugggcaucugcuccugcggccucuacaagcagcccggcguccccgucaaguggaagcgcuga

SEQ ID NO: 4744 - RNA, 1473 nt, Artificial Sequence
  derived and/or modified protein sequence (opt2) from LASV(Nig08-A19;Clade III)__ADU56618__GPCstabilized
augggccagaucgucaccuucuuccaggaggucccccacgucaucgaggaggucaugaacaucguccucaucgcccucuccauccucgccauccucaagggccucuacaacaucgccaccugcggccucaucggccucgucaccuuccuccuccucuccggccgcuccugcuccaugaccuacaagggcgucuacgagcuccagacccucgagcucaacaugaacacccucaacaugaccaugccccucuccugcaccaagaacaacucccaccacuacaucauggucggcaacgagaccggccucgagcucacccucaccaacaccucccuccuccaccacaaguucugcaaccucuccgacgcccacaagaagaaccucuacgaccacacccucauguccaucaucuccaccuuccaccucuccauccccaacuucaaccaguacgaggccauguccugcgacuucaacggcggcaagaucaccguccaguacaaccucucccacuccuacgccaucgacgccgccaaccacugcggcaccgucgccaacggcguccuccagaccuucaugcgcauggccuggggcggcuccuacaucgcccucgacuccggcugcggcaagugggacugcaucaugaccuccuaccaguaccucaucauccagaacaccaccugggaggaccacugccaguucucccgccccucccccaucggcuaccucggccuccucucccagcgcacccgcgacaucuacaucucccgccgccgccggggcaccuucaccuggacccucuccgacuccgagggcaacgagacccccggcggcuacugccucacccgcuggaugcucaucgaggccgagcucaagugcuucggcaacaccgccgucgccaagugcaacgagaagcacgacgaggaguucugcgacaugcuccgccucuucgacuucaacaagcaggccauccgccgccucaaggcccccgcccagauguccauccagcucaucaacaaggccgucaacgcccucaucaacgaccagcucaucaugaagaaccaccuccgcgacaucaugugcauccccuacugcaacuacuccaaguacugguaccucaaccacaccuccaccggccgcaccucccucccccgcugcuggcucgucuccaacggcuccuaccucaacgagacccacuucuccgacgacaucgagcagcaggccgacaacaugaucaccgagaugcuccagaaggaguaccucgaccgccagggcaagaccccccucggccucgucgaccucuucgucuucuccaccuccuucuaccucaucuccaucuuccuccaccucgucaagauccccacccaccgccacaucgucggcaagcccugccccaagccccaccgccucaaccacaugggcaucugcuccugcggccucuacaagcagcccggcguccccguccgcuggaagcgcuga

SEQ ID NO: 4745 - RNA, 1473 nt, Artificial Sequence
  derived and/or modified protein sequence (opt2) from LASV(ONM-299;Clade III)__ANH09734__GPCstabilized
augggccagaucgucaccuucuuccaggaggucccccacgucaucgaggagaucaugaacaucguccucaucacccucucccuccucgccauccucaagggccucuacaacuucgccaccugcggccucaucggccucaucaccuuccucuuccucugcggccgcuccugcuccaugaucuacaagggcuccuaccagcucgagacccucgagcucaacauggagacccucaacaugaccaugccccucuccugcaccaagaacaacucccaccacuacauccgcgucggcaacgagaccggccucgagcucacccucaccaacaccuccaucaucggccacaaguucugcaaccucuccgacgcccacaagaagaaccucuacgaccacucccucauguccaucaucuccaccuuccaccucuccauccccaacuucaaccaguacgaggccauguccugcgacuucaacggcggcaagaucuccauccaguacaaccucucccacaccuacgccggcgacgccgccaagcacugcggcaccgucgccaacggcguccuccagaccuucaugcgcauggccuggggcggcuccuacaucgcccucgacuccggcugcggcaacugggacugcaucaugaccuccuaccaguaccucaucauccagaacaccaccugggaggaccacugccaguucucccgccccucccccaucggcuaccucggccuccucucccagcgcacccgcgacaucuacaucucccgccgccgccggggcaccuucaccuggacccucuccgacuccgagggcaaggagacccccggcggcuacugccucacccgcuggaugcucaucgaggccgagcucaagugcuucggcaacaccgccgucgccaagugcaacgagaagcacgacgaggaguucugcgacaugcuccgccucuucgacuucaacaagcaggccauccagcgccucaagacccccgcccagauguccauccagcucaucaacaaggccgucaacgcccucaucaacgaccagcucaucaugaagaaccaccuccgcgacaucaugugcauccccuacugcaacuacuccaaguacugguaccucaaccacaccuccaccggccgcaccucccuccccaagugcuggcucgucuccaacggcuccuaccucaacgagacccacuucuccgacgacaucgagcagcaggccgacaacaugaucaccgagaugcuccagaaggaguacaucgaccgccagggcaagaccccccucggccucgucgacgucuucgucuucuccaccuccuucuaccucaucuccaucuuccuccaccucgucaagauccccacccaccgccacaucgucggcaaguccugccccaagccccaccgccucaaccacaugggcaucugcuccugcggccucuacaagcagcccggcguccccguccgcuggaagcgcuga

SEQ ID NO: 4746 - RNA, 1473 nt, Artificial Sequence
  derived and/or modified protein sequence (opt2) from LASV(ONM-700;Clade III)__ANH09738__GPCstabilized
augggccagaucgucaccuucuuccaggaggucccccacgucaucgaggagaucaugaacaucguccucaucacccucucccuccucgccauccucaagggccucuacaacuucgccaccugcggccucaucggccucaucaccuuccucuuccucugcggccgcuccugcuccaugaucuacaagggcuccuaccagcucgagacccucgagcucaacauggagacccucaacaugaccaugccccucuccugcaccaagaacaacucccaccacuacauccgcgucggcaacgagaccggccucgagcucacccucaccaacaccuccaucaucaaccacaaguucugcaaccucuccgacgcccacaagcgcaaccucuacgaccacucccucauguccaucaucuccaccuuccaccucuccauccccaacuucaaccaguacgaggccauguccugcgacuucaacggcggcaagaucuccauccaguacaaccucucccacaccuacgccggcgacgccgccaagcacugcggcaccgucgccaacggcguccuccagaccuucaugcgcauggccuggggcggcuccuacaucgcccucgacuccggcugcggcaacugggacugcaucaugaccuccuaccaguaccucaucauccagaacaccaccugggaggaccacugccaguucucccgccccucccccaucggcuaccucggccuccucucccagcgcacccgcgacaucuacaucucccgccgccgccggggcaccuucaccuggacccucuccgacuccgagggcaaggagacccccggcggcuacugccucacccgcuggaugcucaucgaggccgagcucaagugcuucggcaacaccgccgucgccaagugcaacgagaagcacgacgaggaguucugcgacaugcuccgccucuucgacuucaacaagcaggccauccagcgccucaagacccccgcccagauguccauccagcucaucaacaaggccgucaacgcccucaucaacgaccagcucaucaugaagaaccaccuccgcgacaucaugugcauccccuacugcaacuacuccaaguacugguaccucaaccacaccuccaccggccgcaccucccuccccaagugcuggcucgucuccaacggcuccuaccucaacgagacccacuucuccgacgacaucgagcagcaggccgacaacaugaucaccgagaugcuccagaaggaguacaucgaccgccagggcaagaccccccucggccucgucgacgucuucauguucuccaccuccuucuaccucaucuccaucuuccuccaccucgucaagauccccacccaccgccacaucgucggcaaguccugccccaagccccaccgccucaaccacaugggcaucugcuccugcggccucuacaagcagcccggcguccccguccgcuggaagcgcuga

SEQ ID NO: 4747 - RNA, 1473 nt, Artificial Sequence
  derived and/or modified protein sequence (opt2) from LASV(Weller;Clade III)__AAT49010__GPCstabilized
augggccagaucgucaccuucuuccaggaggucccccacgucaucgaggaggucaugaacaucguccucaucgcccucuccguccucgccauccucaagggccucuacaacuucgccaccugcggccucaucggccucgucaccuuccuccuccucuccggccgcuccugcuccaugaucuacaagggcgucuacgagcuccagacccucgagcucaacauggagacccucaacaugaccaugccccucuccugcaccaagaacaccucccaccacuacauccgcgucggcaacgacaccggccucgagcucacccucaccaacgagacccuccuccaccacaaguucugcaaccucuccgacgcccacaagcgcaaccucuacgaccacgcccucauguccaucaucuccaccuuccaccucuccauccccaacuucaaccaguacgaggccauguccugcgacuucaacggcggcaagaucaccguccaguacaaccucucccacuccuacgccgucgacgccgccaagcacugcggcaccgucgccaacggcguccuccagaccuucaugcgcauggccuggggcggcuccuacaucgcccucgacucccgcugcggcaacugggacugcaucaugaccuccuaccaguaccucaucauccagaacaccaccugggaggaccacugccaguucucccgccccucccccaucggcuaccucggccuccucucccagcgcacccgcgacaucuacaucucccgccgccgccggggcaccuucaccuggacccucuccgacuccgagggcaacgagacccccggcggcuacugccucacccgcuggaugcucaucgaggccgagcucaagugcuucggcaacaccgccgucgccaagugcaacgagaagcacgacgaggaguucugcgacaugcuccgccucuucgacuucaacaagcaggccauccgccgccucaagacccccgcccagauguccauccagcucaucaacaaggccgucaacgcccucaucaacgaccagcucaucaugaagaaccaccuccgcgacaucaugugcauccccuacugcaacuacuccaaguacugguaccucaaccacaccuccaccggcaagaccucccucccccgcugcuggcucgucuccaacggcuccuaccucaacgagacccacuucuccgacgacaucgagcagcaggccgacaacaugaucaccgagaugcuccagaaggaguaccucgaccgccagggcaagaccccccucggccucgucgaccucuucgucuucuccaccuccuucuaccucaucuccaucuuccuccaccucaucaagauccccacccaccgccacaucgucggcaagcccugccccaagccccaccgccucaaccacaugggcaucugcuccugcggccucuacaagcagcccggcguccccguccgcuggaagcgcuga

SEQ ID NO: 4748 - RNA, 1476 nt, Artificial Sequence
  derived and/or modified protein sequence (opt2) from LASV(BA366;Clade IV)__ADI39451__GPCstabilized
augggccagaucgucaccuucuuccaggaggucccccacgucaucgaggaggucaugaacaucguccucaucgcccucuccguccucgccguccucaagggccucuacaacgucgccaccugcggccucaucggccucaucgccuuccuccuccucugcggccgcuccugcaccaccacccucuacaagggcgucuacgagcuccaggcccucgagcucaacauggagacccucaacaugaccaugccccucuccugcaccaagaacaacucccaccacuacaucauggucggcaacgagaccggccucgagcucacccucaccaacaccuccaucaucaaccacaaguucugcaaccucuccgacgcccacaagaagaaccucuacgaccacgcccucauguccaucaucuccaccuuccaccucuccauccccaacuucaaccaguacgaggccauguccugcgacuucaacggcggcaagaucuccguccaguacaaccucucccacaccuacgccgucgacgccgccaaccacugcggcaccgucgccaacggcguccuccagaccuucaugcgcauggccuggggcggcuccuacaucgcccucgacuccggcugcggcuccugggacugcaucaugaccuccuaccaguaccucaucauccagaacaccaccugggaggaccacugccaguucucccgccccucccccaucggcuaccucggccuccucucccagcgcacccgcgacaucuacaucucccgccgccgccggggcaccuucaccuggacccucuccgacuccgagggcaaggacacccccggcggcuacugccucacccgcuggaugcucaucgaggccgagcucaagugcuucggcaacaccgccgucgccaagugcaacgagaagcacgacgaggaguucugcgacaugcuccgccucuucgacuucaacaagcaggccauccagcgccucaaggcccccgcccagauguccauccagcucaucaacaaggccgucaacgcccucaucaacgaccagcucaucaugaagaaccaccuccgcgacaucaugugcauccccuacugcaacuacuccaaguacugguaccucaaccacaccaucaccggccgcaccucccuccccaagugcuggcucgucuccaacggcuccuaccucaacgagacccacuucuccgacgacaucgagcagcaggccgacaacaugaucaccgagaugcuccagaaggaguacaucgagcgccagggcaagaccccccucggccucgucgaccucuucgucuucuccaccuccuucuaccucaucuccaucuuccuccaccucaucaagauccccacccaccgccacaucgucaacaagcccugccccaagccccaccgccucaaccacaugggcgucugcuccugcggccucuacaagcagcccggcguccccguccgcuggaagcgcuga

SEQ ID NO: 4749 - RNA, 1476 nt, Artificial Sequence
  derived and/or modified protein sequence (opt2) from LASV(G1180-SLE-2010;Clade IV)__AIT17168__GPCstabilized
augggccagaucgucaccuucuuccaggaggucccccacgucaucgaggaggucaugaacaucguccucaucgcccucuccauccucgccguccucaagggccucuacaacuucgccaccugcggccucgucggccuccucaccuuccuccuccucugcggccgcuccugcaccgccucccgcuacaagggcgucuacgagcuccagacccucgagcucaacauggagacccucaacaugaccaugccccucuccugcaccaagaacaacucccaccacuacaucauggucggcaacgagaccggccucgagcucacccucaccaacaccuccaucaucaaccacaaguucugcaaccucuccgacgcccacaagaagaaccucuacgaccacgcccucauguccaucaucuccaccuuccaccucuccauccccaacuucaaccaguacgaggccauguccugcgacuucaacggcggcaagaucuccguccaguacaaccucucccacuccuacgccggcgacgccgccaaccacugcggcaccgucgccaacggcguccuccagaccuucaugcgcauggccuggggcggcuccuacaucgcccucgacuccggcugcggcuccugggacugcaucaugaccuccuaccaguaccucaucauccagaacaccaccugggaggaccacugccaguucucccgccccucccccaucggcuaccucggccuccucucccagcgcacccgcgacaucuacaucucccgccgccgccggggcaccuucaccuggacccucuccgacuccgagggcaaggacacccccggcggcuacugccucacccgcuggaugcucaucgaggccgagcucaagugcuucggcaacaccgccgucgccaagugcaacgagaagcacgacgaggaguucugcgacaugcuccgccucuucgacuucaacaagcaggccauccagcgccucaaggcccccgcccagauguccauccagcucaucaacaaggccgucaacgcccucaucaacgaccagcucaucaugaagaaccaccuccgcgacaucaugugcauccccuacugcaacuacuccaaguacugguaccucaaccacaccaccaccggcaagaccucccuccccaagugcuggcucgucuccaacggcuccuaccucaacgagacccacuucuccgacgacaucgagcagcaggccgacaacaugaucaccgagaugcuccagaaggaguacauggagcgccagggcaagaccccccucggccucgucgaccucuucgucuucuccaccuccuucuaccucaucuccaucuuccuccaccucgucaagauccccacccaccgccacaucgucggcaaguccugccccaagccccaccgccucaaccacaugggcaucugcuccugcggccucuacaagcagcccggcguccccgucaaguggaagcgcuga

SEQ ID NO: 4750 - RNA, 1476 nt, Artificial Sequence
  derived and/or modified protein sequence (opt2) from LASV(G1190-SLE-2010;Clade IV)__AIT17172__GPCstabilized
augggccagaucgucaccuucuuccaggaggucccccacgucaucgaggaggucaugaacaucguccucaucgcccucuccauccucgccguccucaagggccucuacaacuucgccaccugcggccucgucggccucgucaccuuccuccuccucugcggccgcuccugcaccaccucccucuacaagggcgucuacgagcuccagacccucgagcucaacauggagacccucaacaugaccaugccccucuccugcaccaagaacaacucccaccacuacaucauggucggcaacgagaccggccucgagcucacccucaccaacaccuccaucaucaaccacaaguucugcaaccucuccgacgcccacaagaagaaccucuacgaccacgcccucauguccaucaucuccaccuuccaccucuccauccccaacuucaaccaguacgaggccauguccugcgacuucaacggcggcaagaucuccguccaguacaaccucucccacuccuacgccggcgacgccgccaaccacugcggcaccgucgccaacggcguccuccagaccuucaugcgcauggccuggggcggcuccuacaucgcccucgacuccggcugcggccgcugggacugcaucaugaccuccuaccaguaccucaucauccagaacaccaccugggaggaccacugccaguucucccgccccucccccaucggcuaccucggccuccucucccagcgcacccgcgacaucuacaucucccgccgccgccggggcaccuucaccuggacccucuccgacuccgagggcaaggacacccccggcggcuacugccucacccgcuggaugcucaucgaggccgagcucaagugcuucggcaacaccgccgucgccaagugcaacgagaagcacgacgaggaguucugcgacaugcuccgccucuucgacuucaacaagcaggccauccagcgccucaaggcccccgcccagauguccauccagcucaucaacaaggccgucaacgcccucaucaacgaccagcucaucaugaagaaccaccuccgcgacaucaugugcauccccuacugcaacuacuccaaguacugguaccucaaccacaccaccaccggcaagaccucccuccccaagugcuggcucgucuccaacggcuccuaccucaacgagacccacuucuccgacgacaucgagcagcaggccgacaacaugaucaccgagaugcuccagaaggaguacauggagcgccagggcaagaccccccucggccucgucgaccucuucgucuucuccaccuccuucuaccucaucuccaucuuccuccaccucgucaagauccccacccaccgccacaucgucggcaagcccugcccccgcccccaccgccucaaccacaugggcaucugcuccugcggccucuacaagcagcccggcguccccgucaaguggaagcgcuga

SEQ ID NO: 4751 - RNA, 1476 nt, Artificial Sequence
  derived and/or modified protein sequence (opt2) from LASV(G1200-LIB-2010;Clade IV)__AIT17176__GPCstabilized
augggccagaucgucaccuucuuccaggaggucccccacgucaucgaggaggucaugaacaucguccucaucgcccucucccuccucgccguccucaagggccucuacaacgucgccaccugcggccucaucggccucaucaccuuccuccuccucugcggccgcuccugcaccaccaaccucuacaagggcgucuacgagcuccaggcccucgagcucaacauggagacccucaacaugaccaugccccucuccugcaccaagaacaacucccaccacuacaucauggucggcaacgagaccggccucgagcucacccucaccaacaccuccaucaucaaccacaaguucugcaaccucuccgacgcccacaagaagaaccucuacgaccacgcccucauguccaucaucuccaccuuccaccucuccauccccaacuucaaccaguacgaggccauguccugcgacuucaacggcggccgcaucuccguccaguacaaccucucccacuccuacgccggcgacgccgccucccacugcggcaccaucgccaacggcguccuccagaccuucaugcgcauggccuggggcggcuccuacaucgcccucgacuccggcugcggcggcugggacugcaucaugaccuccuaccaguaccucaucauccagaacaccaccugggaggaccacugccaguucucccgccccucccccaucggcuaccucggccuccucucccagcgcacccgcgacaucuacaucucccgccgccgccggggcaccuucaccuggacccucuccgacuccgagggcaaggacacccccggcggcuacugccucacccgcuggaugcucaucgaggccgagcucaagugcuucggcaacaccgccgucgccaagugcaacgagaagcacgacgaggaguucugcgacaugcuccgccucuucgacuucaacaagcaggccauccagcgccucaaggcccccgcccagauguccauccagcucaucaacaaggccgucaacgcccucaucaacgaccagcucaucaugaagaaccaccuccgcgacaucaugugcauccccuacugcaacuacuccaaguacugguaccucaaccacaccgucaccggcaagaccucccuccccaagugcuggcucgucuccaacggcuccuaccucaacgagacccacuucuccgacgacaucgagcagcaggccgacaacaugaucaccgagaugcuccagaaggaguacauggagcgccagggcaagaccccccucggccucgucgaccucuucgucuucuccaccuccuucuaccucaucuccaucuuccuccaccucgucaagauccccacccaccgccacgucgucggcaagcccugccccaagccccaccgccucaaccacaugggcaucugcuccugcggccucuacaagcagcccggcguccccguccgcuggaagcgcuga

SEQ ID NO: 4752 - RNA, 1476 nt, Artificial Sequence
  derived and/or modified protein sequence (opt2) from LASV(G1442-SLE-2011;Clade IV)__AIT17180__GPCstabilized
augggccagaucgucaccuucuuccaggaggucccccacgucaucgaggaggucaugaacaucguccucaucgcccucuccauccucgccguccucaagggccucuacaacgucgccaccugcggccucaucggccucgucaccuuccuccuccucugcggccgcuccugcaccaccacccucuacaagggcgucuacgagcuccagacccucgagcucaacauggagacccucaacaugaccaugccccucuccugcaccaagaacaacucccaccacuacauccgcgucggcaacgagaccggccucgagcucacccucaccaacaccuccaucaucaaccacaaguucugcaaccucuccgacgcccacaagaagaaccucuacgaccacgcccucauguccaucaucuccaccuuccaccucuccauccccaacuucaaccaguacgaggccauguccugcgacuucaacggcggcaagaucuccguccaguacaaccucucccacuccuacgccggcgacgccgccaaccacugcggcaccgucgccaacggcguccuccagaccuucaugcgcauggccuggggcggcuccuacaucgcccucgacuccggcugcggcaacugggacugcaucaugaccuccuaccaguaccucaucauccagaacaccaccugggacgaccacugccaguucucccgccccucccccaucggcuaccucggccuccucucccagcgcacccgcgacgucuacaucucccgccgccgccggggcaccuucaccuggacccucuccgacuccgagggcaaggacacccccggcggcuacugccucacccgcuggaugcucaucgaggccgagcucaagugcuucggcaacaccgccgucgccaagugcaacgagaagcacgacgaggaguucugcgacaugcuccgccucuucgacuucaacaagcaggccauccagcgccucaaggcccccgcccagauguccauccagcucaucaacaaggccgucaacgcccucaucaacgaccagcucaucaugaagaaccaccuccgcgacaucaugugcauccccuacugcaacuacuccaaguacugguaccucaacaacaccgccaccggcaagaccucccuccccaagugcuggcucaucuccaacggcuccuaccucaacgagacccacuucuccgacgacaucgagcaggaggccgacaacaugaucaccgagaugcuccagaaggaguacauggagcgccagggcaagaccccccucggccucgucgaccucuucgucuucuccaccuccuucuaccucaucuccaucuuccuccaccucgucaagauccccacccaccgccacaucgucggcaaguccugccccaagccccaccgccucaaccacaugggcaucugcuccugcggccucuacaagcagcccggcguccccguccgcuggaagcgcuga

SEQ ID NO: 4753 - RNA, 1476 nt, Artificial Sequence
  derived and/or modified protein sequence (opt2) from LASV(G1529-SLE-2011;Clade IV)__AIT17184__GPCstabilized
augggccagaucgucaccuucuuccaggaggucccccacgucaucgaggaggucaugaacaucguccucaucgcccucuccauccucgccguccucaagggccucuacaacgucgccaccugcggccucaucggccucgucaccuuccuccuccucugcggccgcuccugcaccaccacccucuacaagggcgucuacgagcuccaggcccucgagcucaacauggagacccucaacaugaccaugccccucuccugcaccaagaacaacucccaccacuacauccgcgucggcaacgagaccggccucgagcucacccucaccaacaccuccaucaucgaccacaaguucugcaaccucuccgacgcccacaagaagaaccucuacgaccacgcccucauguccaucaucuccaccuuccaccucuccauccccaacuucaaccaguacgaggccauguccugcgacuucaacggcggcaagaucuccguccaguacaaccucucccacuccuacgccggcgacgccgccaaccacugcggcaccgucgccaacggcguccuccagaccuucaugcgcauggccuggggcggcuccuacaucgcccucgacuccggcugcaacggcugggacugcaucaugaccuccuaccaguaccucaucauccagaacaccaccugggacgaccacugccaguucucccgccccucccccaucggcuaccucggccuccucucccagcgcacccgcgacaucuacaucucccgccgccgccggggcaccuucaccuggacccucuccgacuccgagggcaaggacacccccggcggcuacugccucacccgcuggaugcucaucgaggccgagcucaagugcuucggcaacaccgccgucgccaagugcaacgagaagcacgacgaggaguucugcgacaugcuccgccucuucgacuucaacaagcaggccauccgccgccucaaggcccccgcccagauguccauccagcucaucaacaaggccgucaacgcccucaucaacgaccagcucaucaugaagaaccaccuccgcgacaucaugugcauccccuacugcaacuacuccaaguacugguaccucaacaacaccgccaccggcaagaccucccucccccgcugcuggcucgucuccaacggcuccuaccucaacgagacccacuucuccgacgacaucgagcagcaggccgacaacaugaucaccgagaugcuccagcgcgaguacauggagcgccagggcaagaccccccucggccucgucgaccucuucgucuucuccaccuccuucuaccucaucuccaucuuccuccaccucgucaagauccccacccaccgccacaucgucggcaagcccugccccaagccccaccgccucaaccacaugggcaucugcuccugcggccucuacaagcagcccggcguccccgucaaguggaagcgcuga

SEQ ID NO: 4754 - RNA, 1476 nt, Artificial Sequence
  derived and/or modified protein sequence (opt2) from LASV(G1618-SLE-2011;Clade IV)__AIT17188__GPCstabilized
augggccagaucgucaccuucuuccaggaggucccccacgucaucgaggaggucaugaacaucguccucaucgcccucuccauccucgccguccucaagggccucuacaacuucgccaccugcggcuucgucggccucgucuccuuccuccuccucugcggccgcuccugcaccaccucccucuacaagggcgucuacgagcuccagacccucgagcucaacauggagacccucaacaugaccaugccccucuccugcaccaagaacaacucccaccacuacaucauggucggcaacgagaccggccucgagcucacccucaccaacaccuccaucaucaaccacaaguucugcaaccucuccgacgcccacaagaagaaccucuacgaccacgcccucauguccaucaucuccaccuuccaccucuccauccccaacuucaaccaguacgaggccauguccugcgacuucaacggcggcaagaucuccguccaguacaaccucucccacuccuacgccgucgacgccgccaaccacugcggcaccgucgccaacggcguccuccagaccuucaugcgcauggccuggggcggcuccuacaucgcccucgacuccggcugcggcuccugggacugcaucaugaccuccuaccaguaccucaucauccagaacaccaccugggaggaccacugccaguucucccgccccucccccaucggcuaccucggccuccucucccagcgcacccgcgacaucuacaucucccgccgccgccggggcaccuucaccuggacccucuccgacuccgagggcaaggacacccccggcggcuacugccucacccgcuggaugcucaucgaggccgagcucaagugcuucggcaacaccgccgucgccaagugcaacgagaagcacgacgaggaguucugcgacaugcuccgccucuucgacuucaacaagcaggccauccagcgccuccgcgcccccgcccagauguccauccagcucaucaacaaggccgucaacgcccucaucaacgaccagcucaucaugaagaaccaccuccgcgacaucaugugcauccccuacugcaacuacuccaaguacugguaccucaaccacaccaccaccggccgcaccucccuccccaagugcuggcucgucuccaacggcuccuaccucaacgagacccacuucuccgacgacaucgagcagcaggccgacaacaugaucaccgagaugcuccagaaggaguacauggagcgccagggcaagaccccccucggccucgucgaccucuucgucuucuccaccuccuucuaccucaucuccaucuuccuccaccucgucaagauccccacccaccgccacaucgucggcaaguccugccccaagccccaccgccucaaccacaugggcaucugcuccugcggccucuacggccagcccggcguccccgucaaguggaagcgcuga

SEQ ID NO: 4755 - RNA, 1476 nt, Artificial Sequence
  derived and/or modified protein sequence (opt2) from LASV(G1646-SLE-2011;Clade IV)__AIT17192__GPCstabilized
augggccagaucgucaccuucuuccaggaggucccccacgucaucgaggaggucaugaacaucguccucaucgcccucuccauccucgccguccucaagggccucuacaacuucgccaccugcggcuucaucggccucgucuccuuccuccuccucugcggccgcuccugcaccaccucccucuacaagggcgucuacgagcuccagacccucgagcucaacauggagacccucaacaugaccaugccccucuccugcaccaagaacaacucccaccacuacaucauggucggcaacgagaccggccucgagcucacccucaccaacaccuccaucaucaaccacaaguucugcaaccucuccgacgcccacaagaagaaccucuacgaccacgcccucauguccaucaucuccaccuuccaccucuccauccccaacuucaaccaguucgaggccauguccugcgacuucaacggcggcaagaucuccguccaguacaaccucucccacuccuacgccgucgacgccgccaaccacugcggcaccgucgccaacggcguccuccagaccuucaugcgcauggccuggggcggcuccuacaucgcccucgacuccggcugcggcuccugggacugcaucaugaccuccuaccaguaccucaucauccagaacaccaccugggaggaccacugccaguucucccgccccucccccaucggcuaccucggccuccucucccagcgcacccgcgacaucuacaucucccgccgccgccggggcaccuucaccuggacccucuccgacuccgagggcaaggacacccccggcggcuacugccucacccgcuggaugcucaucgaggccgagcucaagugcuucggcaacaccgccgucgccaagugcaacgagaagcacgacgaggaguucugcgacaugcuccgccucuucgacuucaacaagcaggccauccagcgccucaaggcccccgcccagauguccauccagcucaucaacaaggccgucaacgcccucaucaacgaccagcucaucaugaagaaccaccuccgcgacaucaugugcauccccuacugcaacuacuccaaguacugguaccucaaccacaccaccaccggccgcaccucccuccccaagugcuggcucgucuccaacggcuccuaccucaacgagacccacuucuccgacgacaucgagcagcaggccgacaacaugaucaccgagaugcuccagaaggaguacauggagcgccagggcaagaccccccucggccucgucgaccucuucgucuucuccaccuccuucuaccucaucuccaucuuccuccaccucgucaagauccccacccaccgccacaucgucggcaaguccugccccaagccccaccgccucaaccacaugggcaucugcuccugcggccucuacggccagcccggcguccccgucaaguggaagcgcuga

SEQ ID NO: 4756 - RNA, 1476 nt, Artificial Sequence
  derived and/or modified protein sequence (opt2) from LASV(G1647-SLE-2011;Clade IV)__AIT17196__GPCstabilized
augggccagaucgucaccuucuuccaggaggucccccacgucaucgaggaggucaugaacaucguccucaucgcccucuccauccucgccguccucaagggccucuacaaccucgccaccugcggccucgucggccucgucaccuuccuccuccucugcggccgcuccugcaccaccucccucuacaagggcgucuacgagcuccagacccucgagcucaacauggagacccucaacaugaccaugccccucuccugcaccaagaacaacucccaccacuacaucauggucggcaacgagaccggccucgagcucacccucaccaacaccuccaucaucaaccacaaguucugcaaccucuccgacgcccacaagaagaaccucuacgaccacgcccucauguccaucaucuccaccuuccaccucuccauccccaacuucaaccaguacgaggccauguccugcgacuucaacggcggcaagaucuccguccaguacaaccucucccacuccuacgccggcgacgccgccaaccacugcggcaccgucgccaacggcguccuccagaccuucaugcgcauggccuggggcggcuccuacaucgcccucgacuccggcugcggccgcugggacugcaucaugaccuccuaccaguaccucaucauccagaacaccaccugggaggaccacugccaguucucccgccccucccccaucggcuaccucggccuccucucccagcgcacccgcgacaucuacaucucccgccgccgccggggcaccuucaccuggacccucuccgacuccgagggcaaggacacccccggcggcuacugccucacccgcuggaugcucaucgaggccgagcucaagugcuucggcaacaccgccgucgccaagugcaacgagaagcacgacgaggaguucugcgacaugcuccgccucuucgacuucaacaagcaggccauccagcgccucaaggcccccgcccagaugaacauccagcucaucaacaaggccgucaacgcccucaucaacgaccagcucaucaugaagaaccaccuccgcgacaucaugugcauccccuacugcaacuacuccaaguacugguaccucaaccacaccaccaccggcaagaccucccucccccgcugcuggcucgucuccaacggcuccuaccucaacgagacccacuucuccgacgacaucgagcagcaggccgacaacaugaucaccgagaugcuccagaaggaguacauggagcgccagggcaagaccccccucggccucgucgaccucuucgucuucuccaccuccuucuaccucaucuccaucuuccuccaccucgucaagauccccacccaccgccacaucgucggcaagcccugccccaagccccaccgccucaaccacaugggcaucugcuccugcggcuucuacaagcagcccggcguccccgucaaguggaagcgcuga

SEQ ID NO: 4757 - RNA, 1476 nt, Artificial Sequence
  derived and/or modified protein sequence (opt2) from LASV(G1774-SLE-2011;Clade IV)__AIT17204__GPCstabilized
augggccagaucgucaccuucuuccaggaggucccccacgucaucgaggaggucaugaacaucguccucaucgcccucuccauccucgccguccucaagggccucuacaaccucgccaccugcggccucgucggccucgucaccuuccuccuccucugcggccgcuccugcaccuccucccucuacaagggcgucuacgagcuccagacccucgagcucaacauggagacccucaacaugaccaugccccucuccugcaccaagaacuccucccaccacuacauccgcgucggcaacgagaccggccucgagcucacccucaccaacaccuccaucaucaaccacaaguucugcaaccucuccgacgcccacaagaagaaccucuacgaccacgcccucauguccaucaucuccaccuuccaccucuccauccccaacuucaaccaguacgaggccauguccugcgacuucaacggcggcaagaucuccguccaguacaaccucucccacuccuacgccggcgacgccgccaaccacugcggcaccgucgccaacggcguccuccagaccuucaugcgcauggccuggggcggcuccuacaucgcccucgacuccggcugcgaccgcugggacugcaucaugaccuccuaccaguaccucaucauccagaacaccaccugggaggaccacugccaguucucccgccccucccccaucggcuaccucggccuccucucccagcgcacccgcgacaucuacaucucccgccgccgccggggcaccuucaccuggacccucuccgacuccgagggcaaggacacccccggcggcuacugccucacccgcuggaugcucaucgaggccgagcucaagugcuucggcaacaccgccgucgccaagugcaacgagaagcacgacgaggaguucugcgacaugcuccgccucuucgacuucaacaagcaggccauccagcgccucaaggcccccgcccagauguccauccagcucaucaacaaggccgucaacgcccucaucaacgaccagcucaucaugaagaaccaccuccgcgacaucaugugcauccccuacugcaacuacuccaaguacugguaccucaaccacaccaucaccggcaagaccucccuccccaagugcuggcucgucuccaacggcuccuaccucaacaagacccacuucuccgacgacaucgagcagcaggccgacaacaugaucaccgagaugcuccagaaggaguacauggagcgccagggcaagaccccccucggccucgucgaccucuucgucuucuccaccuccuucuaccucaucuccaucuuccuccaccucaucaagauccccacccaccgccacaucgucggcaagcccugccccaagccccaccgccucaaccacaugggcaucugcuccugcggccucuacaagcagcccggcguccccgucaaguggaagcgcuga

SEQ ID NO: 4758 - RNA, 1476 nt, Artificial Sequence
  derived and/or modified protein sequence (opt2) from LASV(G1792-SLE-2011;Clade IV)__AIT17208__GPCstabilized
augggccagaucgucaccuucuuccaggaggucccccacgucaucgaggaggucaugaacaucguccucaucgcccucuccauccucgccguccucaagggccucuacaacuucgccaccugcggccucaucggccucgucaccuuccuccuccucugcggccgcuccugcaccaccucccucuacaagggcgucuacgagcuccagacccucgagcucaacauggagacccucaacaugaccaugccccucuccugcaccaagaacaacucccaccacuacaucauggucggcaacgagaccggccucgagcucacccucaccaacaccuccaucaucaaccacaaguucugcaaccucuccgacgcccacaagaagaaccucuacgaccacgcccucauguccaucaucuccaccuuccaccucuccauccccaacuucaaccaguacgaggccauguccugcgacuucaacggcggcaagaucuccguccaguacaaccucucccacuccuacgccggcgacgccgccaaccacugcggcaccgucgccaacggcguccuccagaccuucaugcgcauggccuggggcggcuccuacaucgcccucgacuccggcugcggccagugggacugcaucaugaccuccuaccaguaccucaucauccagaacaccaccugggaggaccacugccaguucucccgccccucccccaucggcuaccucggccuccucucccagcgcacccgcgacaucuacaucucccgccgccgccggggcaccuucaccuggacccucuccgacuccgagggcaaggacacccccggcggcuacugccucacccgcuggaugcucaucgaggccgagcucaagugcuucggcaacaccgccgucgccaagugcaacgagaagcacgacgaggaguucugcgacaugcuccgccucuucgacuucaacaagcaggccauccagcgccucaaggcccccgcccagauguccauccagcucaucaacaaggccgucaacgcccucaucaacgaccagcucaucaugaagaaccaccuccgcgacaucaugugcauccccuacugcaacuacuccaaguacugguaccucaaccacaccaccaccggcaagaccucccuccccaagugcuggcucgucuccaacggcuccuaccucaacgagacccacuucuccgacgacaucgagcagcaggccgacaacaugaucaccgagaugcuccagaaggaguacauggagcgccagggcaagaccccccucggccucgucgaccucuucgucuucuccaccuccuucuaccucaucuccaucuuccuccaccucgucaagauccccacccaccgccacaucgucggcaaguccugccccaagccccaccgccucaaccacaugggcaucugcuccugcggccucuacaagcagcccggcguccccgucaaguggaagcgcuga

SEQ ID NO: 4759 - RNA, 1476 nt, Artificial Sequence
  derived and/or modified protein sequence (opt2) from LASV(G1897-SLE-2011;Clade IV)__AIT17210__GPCstabilized
augggccagaucgucaccuucuuccaggaggucccccacgucaucgaggaggucaugaacaucguccucaucgcccucuccauccucgccguccucaagggccucuacaaccucgccaccugcggccucgucggccucgucaccuuccuccuccucugcggccgcuccugcaccaccucccucuacaagggcgucuacgagcuccagacccucgagcucaacauggagacccucaacaugaccaugccccucuccugcaccaagaacaacucccaccacuacaucauggucggcaacgagaccggccucgagcucacccucaccaacaccuccaucaucaaccacaaguucugcaaccucuccgacgcccacaagaagaaccucuacgaccacgcccucauguccaucaucuccaccuuccaccucuccauccccaacuucaaccaguacgaggccauguccugcgacuucaacggcggcaagaucuccguccaguacaaccucucccacuccuacgccggcgacgccgccaaccacugcggcaccgucgccaacggcguccuccagaccuucaugcgcauggccuggggcggcuccuacaucgcccucgacuccggcugcgaccgcugggacugcaucaugaccuccuaccaguaccucaucauccagaacaccaccugggaggaccacugccaguucucccgccccucccccaucggcuaccucggccuccucucccagcgcacccgcgacaucuacaucucccgccgccgccggggcaccuucaccuggacccucuccgacuccgagggcaaggacacccccggcggcuacugccucacccgcuggaugcucaucgaggccgagcucaagugcuucggcaacaccgccgucgccaagugcaacgagaagcacgacgaggaguucugcgacaugcuccgccucuucgacuucaacaagcaggccauccagcgccucaaggcccccgcccagauguccauccagcucaucaacaaggccgucaacgcccucaucaacgaccagcucaucaugaagaaccaccuccgcgacaucaugugcauccccuacugcaacuacuccaaguacugguaccucaaccacaccaccaccggcaagaccucccuccccaagugcuggcucgucuccaacggcuccuaccucaacgagacccacuucuccgacgacaucgagcagcaggccgacaacaugaucaccgagaugcuccagaaggaguacauggagcgccagggcaagaccccccucggccucgucgaccucuucgucuucuccaccuccuucuaccucaucuccaucuuccuccgccucgucaagauccccacccaccgccacaucgucggcaagcccugccccaagccccaccgccucaaccacaugggcaucugcuccugcggccucuacaagcagcccggcguccccgucaaguggaagcgcuga

SEQ ID NO: 4760 - RNA, 1476 nt, Artificial Sequence
  derived and/or modified protein sequence (opt2) from LASV(G1932-SLE-2011;Clade IV)__AIT17212__GPCstabilized
augggccagaucgucaccuucuuccaggaggucccccacgucaucgaggaggucaugaacaucguccucaucgcccucuccauccucgccguccucaagggccucuacaaccucgccaccugcggccucgucggccucgucaccuuccuccuccucugcggccgcuccugcaccaccucccucuacaagggcgucuacgagcuccagacccucgagcucaacauggagacccucaacaugaccaugccccucuccugcaccaagaacaacucccaccacuacaucauggucggcaacgagaccggccucgagcucacccucaccaacaccuccaucaucaaccacaaguucugcaaccucuccgacgcccaccgcaagaaccucuacgaccacgcccucauguccaucaucuccaccuuccaccucuccauccccaacuucaaccaguacgaggccauguccugcgacuucaacggcggcaagaucuccguccaguacaaccucucccacuccuacgccggcgacgccgccaaccacugcggcaccgucgccaacggcguccuccagaccuucaugcgcauggccuggggcggcuccuacaucgcccucgacuccggcugcggcaagugggacugcaucaugaccuccuaccaguaccucaucauccagaacaccaccugggaggaccacugccaguucucccgccccucccccaucggcuaccucggccuccucucccagcgcacccgcgacaucuacaucucccgccgccgccggggcaccuucaccuggacccucuccgacuccgagggcaaggacacccccggcggcuacugccucacccgcuggaugcucaucgaggccgagcucaagugcuucggcaacaccgccgucgccaagugcaacgagaagcacgacgaggaguucugcgacaugcuccgccucuucgacuucaacaagcaggccauccagcgccucaaggcccccgcccagauguccauccagcucaucaacaaggccgucaacgcccucaucaacgaccagcucaucaugaagaaccaccuccgcgacaucaugugcauccccuacugcaacuacuccaaguacugguaccucaaccacaccaccaccggcaagaccucccucccccgcugcuggcucgucuccaacggcuccuaccucaacgagacccacuucuccgacgacaucgagcagcaggccgacaacaugaucaccgagaugcuccagaaggaguacauggagcgccagggcaagaccccccucggccucgucgaccucuucgucuucuccaccuccuucuaccucaucuccaucuuccuccaccucgucaagauccccacccaccgccacaucgucggcaagcccugccccaagccccaccgccucaaccacaugggcaucugcuccugcggccucuacaagcagcccggcguccccgucaaguggaagcgcuga

SEQ ID NO: 4761 - RNA, 1476 nt, Artificial Sequence
  derived and/or modified protein sequence (opt2) from LASV(G1959-SLE-2011;Clade IV)__AIT17216__GPCstabilized
augggccagaucgucaccuucuuccaggaggucccccacgucaucgaggaggucaugaacaucguccucaucgcccucuccauccucgccguccucaagggccucuacaacuucgccaccugcggccucgucggccucgucaccuuccuccuccucugcggccgcuccugcaccaccucccucuacaagggcgucuacgagcuccagacccucgagcucaacauggagacccucaacaugaccaugccccucuccugcaccaagaacaacucccaccacuacaucauggucggcaacgagaccggccucgagcucacccucaccaacaccuccaucaucaaccacaaguucugcaaccucuccgacgcccacaagaagaaccucuacgaccacgcccucauguccaucaucuccaccuuccaccucuccauccccaacuucaaccaguacgaggccauguccugcgacuucaacggcggcaagaucuccguccaguacaaccucucccacuccuacgccggcgacgccgccaaccacugcggcaccgucgccaacggcguccuccagaccuucaugcgcauggccuggggcggcuccuacaucgcccucgacuccggcugcggccgcugggacugcaucaugaccuccuaccaguaccucaucauccagaacaccaccugggaggaccacugccaguucucccgccccucccccaucggcuaccucggccuccucucccagcgcacccgcgacaucuacaucucccgccgccgccggggcaccuucaccuggacccucuccgacuccgagggcaaggacacccccggcggcuacugccucacccgcuggaugcucaucgaggccgagcucaagugcuucggcaacaccgccgucgccaagugcaacgagaagcacgacgaggaguucugcgacaugcuccgccucuucgacuucaacaagcaggccauccagcgccucaaggcccccgcccagauguccauccagcucaucaacaaggccgucaacgcccucaucaacgaccagcucaucaugaagaaccaccuccgcgacaucaugugcauccccuacugcaacuacuccaaguacugguaccucaaccacaccaccaccggcaagaccucccuccccaagugcuggcucgucuccaacggcuccuaccucaacgagacccacuucuccgacgacaucgagcagcaggccgacaacaugaucaccgagaugcuccagaaggaguacauggagcgccagggcaagaccccccucggccucgucgaccucuucgucuucuccaccuccuucuaccucaucuccaucuuccuccaccucgucaagauccccacccaccgccacaucgucggcaagcccugccccaagccccaccgccucaacuacaugggcaucugcuccugcggccucuacaagcagcccggcguccccguccgcuggaagcgcuga

SEQ ID NO: 4762 - RNA, 1476 nt, Artificial Sequence
  derived and/or modified protein sequence (opt2) from LASV(G2141-SLE-2011;Clade IV)__AIT17224__GPCstabilized
augggccagaucgucaccuucuuccaggaggucccccacgucaucgaggaggucaugaacaucguccucaucgcccucuccauccucgccguccucaagggccucuacaacgucgccaccugcggccucaucggccucgucaccuuccuccuccucugcggccgcuccugcaccaccacccucuacaagggcgucuacgagcuccaggcccucgagcucaacauggagacccucaacaugaccaugccccucuccugcaccaagaacaacucccaccacuacauccgcgucggcaacgacaccggccucgagcucacccucaccaacaccuccaucauccagcacaaguucugcaaccucuccgacgcccacaagaagaaccucuacgaccacacccucauguccaucaucuccaccuuccaccucuccauccccaacuucaaccaguacgaggccauguccugcgacuucaacggcggcaagaucuccguccaguacaaccucucccacuccuacgccggcgacgccgccucccacugcggcaccgucgccaacggcguccuccagaccuucaugcgcauggccuggggcggcuccuacaucgcccucgacuccggcugcggcaacugggacugcaucaugaccuccuaccaguaccucaucauccagaacaccaccugggaggaccacugccaguucucccgccccucccccaucggcuaccucggccuccucucccagcgcacccgcgacaucuacaucucccgccgccgccggggcaccuucaccuggacccucuccgacuccgagggccgcgacacccccggcggcuacugccucacccgcuggaugcucaucgaggccgagcucaagugcuucggcaacaccgccgucgccaagugcaacgagaagcacgacgaggaguucugcgacaugcuccgccucuucgacuucaacaagcaggccauccagcgccucaagacccccgcccagauguccauccagcucaucaacaaggccgucaacgcccucaucaacgaccagcucaucaugaagaaccaccuccgcgacaucaugugcauccccuacugcaacuacuccaaguacugguaccucaacaacaccaucaccggcaaguccucccuccccaagugcuggcucgucuccaacggcuccuaccucaacgagacccacuucuccgacgacaucgagcaggaggccgacaacaugaucaccgagaugcuccagaaggaguacauggagcgccagggcaagaccccccucggccucgucgaccucuucgucuucuccaccuccuucuaccucaucuccaucuuccuccaccucgucaagauccccacccaccgccacaucgucggcaagcccugccccaagccccaccgccucaaccacaugggcgucugcuccugcggccucuacaagcagcccggcguccccguccgcuggaagcgcuga

SEQ ID NO: 4763 - RNA, 1476 nt, Artificial Sequence
  derived and/or modified protein sequence (opt2) from LASV(G2147-SLE-2011;Clade IV)__AIT17228__GPCstabilized
augggccagaucgucaccuucuuccaggaggucccccacgucaucgaggaggucaugaacaucguccucaucgcccucuccauccucgccguccucaagggccucuacaacuucgccaccugcggccucgucggccuccucaccuuccuccuccucugcggccgcuccugcaccaccucccucuacaagggcgucuacgagcuccagacccucgagcucaacauggagacccucaacaugaccaugccccucuccugcaccaagaacaacucccaccacuacaucauggucggcaacgagaccggccucgagcucacccucaccaacaccuccaucaucgaccacaaguucugcaaccucuccgacgcccacaagaagaaccucuacgaccacgcccucauguccaucaucuccaccuuccaccucuccauccccaacuucaaccaguacgaggccauguccugcgacuucaacggcggcaagaucuccguccaguacaaccucucccacuccuacgccggcgacgccgccaaccacugcggcaccgucgccaacggcguccuccagaccuucaugcgcauggccuggggcggcuccuacaucgcccucgacuccggcugcggcggcugggacugcaucaugaccuccuaccaguaccucaucauccagaacaccaccugggaggaccacugccaguucucccgccccucccccaucggcuaccucggccuccucucccagcgcacccgcgacaucuacaucucccgccgccgccggggcaccuucaccuggacccucuccgacuccgagggcaaggacacccccggcggcuacugccucacccgcuggaugcucaucgaggccgagcucaagugcuucggcaacaccgccgucgccaagugcaacgagaagcacgacgaggaguucugcgacaugcuccgccucuucgacuucaacaagcaggccauccagcgccucaaggcccccgcccagauguccauccagcucaucaacaaggccgucaacgcccucaucaacgaccagcucaucaugaagaaccaccuccgcgacaucaugugcauccccuacugcaacuacuccaaguacugguaccucaaccacaccaccaccggcaagaccucccuccccaagugcuggcucgucuccaacggcuccuaccucaacgagacccacuucuccgacgacaucgagcagcaggccgacaacaugaucaccgagaugcuccagaaggaguacauggagcgccagggcaagaccccccucggccucgucgaccucuucgucuucuccaccuccuucuaccucaucuccaucuuccuccaccucgucaagauccccacccaccgccacaucgucggcaaguccugccccaagccccaccgccucaaccacaugggcaucugcuccugcggccucuacaagcagcccggcguccccgucaaguggaagcgcuga

SEQ ID NO: 4764 - RNA, 1476 nt, Artificial Sequence
  derived and/or modified protein sequence (opt2) from LASV(G2165-SLE-2011;Clade IV)__AIT17232__GPCstabilized
augggccagaucgucaccuucuuccaggaggucccccacgucaucgaggaggucaugaacaucguccucaucgcccucuccauccucgccguccucaagggccucuacaacuucgccaccugcggccucgucggccucgucaccuuccuccuccucugcggccgcuccugcaccaccucccucuacaagggcgucuacgagcuccagacccucgagcucaacauggagacccucaacaugaccaugccccucuccugcaccaagaacaacucccaccacuacauccgcgucggcaacgagaccggccucgagcucacccucaccaacaccuccaucaucaaccacaaguucugcaaccucuccgacgcccacaagaagaaccucuacgaccacgcccucauguccaucaucuccaccuuccaccucuccauccccaacuucaaccaguacgaggccauguccugcgacuucaacgagggcaagaucuccguccaguacaaccucucccacuccuacgccggcgacgccgccaaccacugcggcaccgucgccaacggcguccuccagaccuucaugcgcauggccuggggcggcuccuacaucgcccucgacuccggcugcggcaagugggacugcaucaugaccuccuaccaguaccucaucauccagaacaccaccugggaggaccacugccaguucucccgccccucccccaucggcuaccucggccuccucucccagcgcacccgcgacaucuacaucucccgccgccgccggggcaccuucaccuggacccucuccgacuccgagggcaaggacacccccggcggcuacugccucacccgcuggaugcucaucgaggccgagcucaagugcuucggcaacaccgccgucgccaagugcaacgagaagcacgacgaggaguucugcgacaugcuccgccucuucgacuucaacaagcaggccaucgagcgccucaaggcccccgcccagauguccauccagcucaucaacaaggccgucaacgcccucaucaacgaccagcucaucaugaagaaccaccuccgcgacaucaugugcauccccuacugcaacuacuccaaguacugguaccucaaccacaccaccaccggcaagaccucccuccccaagugcuggcucgucuccaacggcuccuaccucaacgagacccacuucuccgacgacaucgagcagcaggccgacaacaugaucaccgagaugcuccagaaggaguacauggagcgccagggcaagaccccccucggccucgucgaccucuucgucuucuccaccuccuucuaccucaucuccaucuuccuccaccucgucaagauccccacccaccgccacaucgucggcaaguccugccccaagccccaccgccucaaccacaugggcaucugcuccugcggccucuacaagcagcccggcguccccgucaaguggaagcgcuga

SEQ ID NO: 4765 - RNA, 1476 nt, Artificial Sequence
  derived and/or modified protein sequence (opt2) from LASV(G2184-SLE-2011;Clade IV)__AIT17236__GPCstabilized
augggccagaucgucaccuucuuccaggaggucccccacgucaucgaggaggucaugaacaucguccucaucgcccucuccauccucgccguccucaagggccucuacaacuucgccaccugcggccucgucggccucgucaccuuccuccuccucugcggccgcuccugcaccaccucccucuacaagggcgucuacgagcuccagacccucgagcucaacauggagacccucaacaugaccaugccccucuccugcaccaagaacaacucccaccacuacaucauggucggcaacgagaccggccucgagcucacccucaccaacaccuccaucaucaaccacaaguucugcaaccucuccgacgcccacaagaagaaccucuacgaccacgcccucauguccaucaucuccaccuuccaccucuccauccccaacuucaaccaguacgaggccauguccugcgacuucaacggcggccgcaucuccguccaguacaaccucucccacuccuacgccggcgaggccgccaaccacugcggcaccgucgccaacggcguccuccagaccuucaugcgcauggccuggggcggcuccuacaucgcccucgacuccggcugcggcaagugggacugcaucaugaccuccuaccaguaccucaucauccagaacaccaccugggaggaccacugccaguucucccgccccucccccaucggcuaccucggccuccucucccagcgcacccgcgacaucuacaucucccgccgccgccggggcaccuucaccuggacccucuccgacuccgagggcaaggacacccccggcggcuacugccucacccgcuggaugcucaucgaggccgagcucaagugcuucggcaacaccgccgucgccaagugcaacgagaagcacgacgaggaguucugcgacaugcuccgccucuucgacuucaacaagcaggccauccagcgccucaaggcccccgcccagauguccauccagcucaucaacaaggccgucaacgcccucaucaacgaccagcucaucaugaagaaccaccuccgcgacaucaugugcauccccuacugcaacuacucccgcuacugguaccucaaccacaccaccaccggcaagaccucccuccccaagugcuggcucgucuccaacggcuccuaccucaacgagacccacuucuccgacgacaucgagcagcaggccgacaacaugaucaccgagaugcuccagaaggaguacauggagcgccagggcaagaccccccucggccucgucgaccucuucgucuucuccaccuccuucuaccucaucuccaucuuccuccaccucgucaagauccccacccaccgccacaucgucggcaaguccugccccaagccccaccgccucaaccacaugggcaucugcuccugcggccucuacaagcagcccggcguccccgucaaguggaagcgcuga

SEQ ID NO: 4766 - RNA, 1476 nt, Artificial Sequence
  derived and/or modified protein sequence (opt2) from LASV(G2197-SLE-2011;Clade IV)__AIT17240__GPCstabilized
augggccagaucgucaccuucuuccaggaggucccccacgucaucgaggaggucaugaacaucguccucaucgcccucuccauccucgccguccucaagggccucuacaaccucgccaccugcggccucgucggccucgucaccuuccuccuccucugcggccgcuccugcaccaccucccucuacaagggcuucuacgagcuccagacccucgagcucaacauggagacccucaacaugaccaugccccucuccugcaccaagaacaacucccaccacuacauccgcgucggcaacgagaccggccucgagcucacccucaccaacaccuccaucaucgaccacaaguucugcaaccucuccgacgcccacaagaagaaccucuacgaccacgcccucauguccaucaucuccaccuuccaccucuccauccccaacuucaaccaguacgaggccauguccugcgacuucaacggcggcaagaucuccguccaguacaaccucucccacuccuacgccggcgacgccgccaaccacugcggcaccgucgccaacggcguccuccagaccuucaugcgcauggccuggggcggcuccuacaucgcccucgacuccggcugcggccgcugggacugcaucaugaccuccuaccaguaccucaucauccagaacaccaccugggaggaccacugccaguucucccgccccucccccaucggcuaccucggccuccucucccagaagacccgcgacaucuacaucucccgccgccgccggggcaccuucaccuggacccucuccgacuccgagggcaaggacacccccggcggcuacugccucacccgcuggaugcucaucgaggccgagcucaagugcuucggcaacaccgccgucgccaagugcaacgagaagcacgacgaggaguucugcgacaugcuccgccucuucgacuucaacaagcaggccauccagcgccucaaggcccccgcccagauguccauccagcucaucaacaaggccgucaacgcccucaucaacgaccagcucaucaugaagaaccaccuccgcgacaucaugugcauccccuacugcaacuacuccaaguacugguaccucaaccacaccaccaccggcaagaccucccuccccaagugcuggcucgucuccaacggcuccuaccucaacgagacccacuucuccgacgacaucgagcagcaggccgacaacaugaucaccgagaugcuccagaaggaguacauggagcgccagggcaagaccccccucggccucgucgaccucuucgucuucuccaccuccuucuaccucaucuccaucuuccuccaccucgucaagauccccacccaccgccacaucgucggcaaguccugccccaagccccaccgccucaaccacaugggcaucugcuccugcggccucuacaagcagcccggcguccccgucaaguggaagcgcuga

SEQ ID NO: 4767 - RNA, 1476 nt, Artificial Sequence
  derived and/or modified protein sequence (opt2) from LASV(G2222-SLE-2011;Clade IV)__AIT17244__GPCstabilized
augggccagaucgucaccuucuuccaggaggucccccacgucaucgaggaggucaugaacaucguccucaucgcccucuccauccucgccguccucaagggccucuacaaccucgccaccugcggccucgucggccucgucaccuuccuccuccucugcggccgcuccugcaccaccaaccucuacaagggcgucuacgagcuccagacccucgagcucaacauggagacccucaacaugaccaugccccucuccugcaccaagaacuccucccaccacuacauccgcgucggcaacgagaccggccucgagcucacccucaccaacaccuccaucaucgaccacaaguucugcaaccucuccgacgcccacaagaagaaccucuacgaccacgcccucauguccaucaucuccaccuuccaccucuccauccccaacuucaaccaguacgaggccauguccugcgacuucaacggcggcaagaucuccguccaguacaaccucucccacuccuacgucggcgacgccgccgaccacugcggcaccgucgccaacggcguccuccagaccuucaugcgcauggccuggggcggcuccuacaucgcccucgacuccggcugcggcaagugggacugcaucaucaccuccuaccaguaccucaucauccagaacaccaccugggaggaccacugccaguucucccgccccucccccaucggcuaccucggccuccucucccagcgcacccgcgacaucuacaucucccgccgccgccggggcaccuucaccuggacccucuccgacuccgagggcaaggacacccccggcggcuacugccucacccgcuggaugcucaucgaggccgagcucaagugcuucggcaacaccgccgucgccaagugcaacgagaagcacgacgaggaguucugcgacaugcuccgccucuucgacuucaacaagcaggccauccagcgccucaaggcccccgcccagauguccauccagcucaucaacaaggccgucaacgcccucaucaacgaccagcucaucaugaagaaccaccuccgcgacaucaugugcauccccuacugcaacuacuccaaguacugguaccucaaccacaccaucaccggcaagaccucccucccccgcugcuggcucgucuccaacggcuccuaccucaacgagacccgcuucuccgacgacaucgagcagcaggccgacaacaugaucaccgagaugcuccagaaggaguacauggagcgccagggcaagaccccccucggccucgucgaccucuucgucuucuccaccuccuucuaccucaucuccaucuuccuccaccucgucaagauccccacccaccgccacaucgucggcaagcccugccccaagccccaccgccucaaccacaugggcaucugcuccugcggccucuacaagcagcccggcguccccgucaaguggaagcgcuga

SEQ ID NO: 4768 - RNA, 1476 nt, Artificial Sequence
  derived and/or modified protein sequence (opt2) from LASV(G2230-SLE-2012;Clade IV)__AIT17246__GPCstabilized
augggccagaucgucaccuucuuccaggaggucccccacgucaucgaggaggucaugaacaucguccucaucgcccucucccuccucgccguccucaagggccucuacaacgucgccaccugcggccucaucggccucaucaccuuccuccuccucugcggccgcuccugcaccaccaaccucuacaagggcgucuacgagcuccagacccucgagcucaacauggagacccucaacaugaccaugccccucuccugcaccaagaacuccucccaccacuacaucauggucggcaacgagaccggccucgagcucacccucaccaacaccuccaucaucaaccacaaguucugcaaccucuccgacgcccacaagaagaaccucuacgaccacacccucauguccaucaucuccaccuuccaccucuccauccccaacuucaaccaguacgaggccauguccugcgacuucaacggcggcaagaucuccguccaguacaaccucucccacuccuacgccgucgacgccgccaaccacugcggcaccgucgccaacggcauccuccagaccuucaugcgcauggccuggggcggcuccuacaucgcccucgacuccggcugcggcaacugggacugcaucaugaccuccuaccaguaccucaucauccagaacaccaccugggaggaccacugccaguucucccgccccucccccaucggcuaccucggccuccucucccagcgcacccgcgacaucuacaucucccgccgccgccggggcaccuucaccuggacccucuccgacuccgagggcaacgacacccccggcggcuacugccucacccgcuggaugcucaucgaggccgagcucaagugcuucggcaacaccgccgucgccaagugcaacgagaagcacgacgaggaguucugcgacaugcuccgccucuucgacuucaacaagcaggccauccagcgccucaaggcccccgcccagauguccauccagcucaucaacaaggccgucaacgcccucaucaacgaccagcucaucaugaagaaccaccuccgcgacaucaugugcauccccuacugcaacuacuccaaguacugguaccucaaccacaccaccaccggcaagaccucccuccccaagugcuggcucgucuccaacggcuccuaccucaacgagacccacuucuccgacgacaucgagcagcaggccgacaacaugaucaccgagaugcuccagaaggaguacauggagcgccagggcaagaccccccucggccucgucgaccucuucgucuucuccaccuccuucuaccucaucuccaucuuccuccaccucgucaagauccccacccaccgccacaucgucggcaagcccugccccaagccccaccgccucaaccacaugggcaucugcuccugcggccucuacaagcagcccggcguccccguccgcuggaagcgcuga

SEQ ID NO: 4769 - RNA, 1476 nt, Artificial Sequence
  derived and/or modified protein sequence (opt2) from LASV(G2259-SLE-2012;Clade IV)__AIT17250__GPCstabilized
augggccagaucgucaccuucuuccaggaggucccccacgucaucgaggaggucaugaacaucguccucaucgcccucucccuccucgccguccucaagggccucuacaacgucgccaccugcggccucaucggccucgucaccuuccuccuccucugcggccgcuccugcaccaccaaccucuacaagggcgucuacgagcuccagacccucgagcucaacauggagacccucaacaugaccaugccccucuccugcaccaagaacaacucccaccacuacaucauggucggcaacgagaccggccucgagcucacccucaccaacaccuccaucaucaaccacaaguucugcaaccucuccgacgcccacaagaagaaccucuacgaccacacccucauguccaucaucuccaccuuccaccucuccauccccaacuucaaccaguacgaggccauguccugcgacuucaacggcggcaagaucuccguccaguacaaccucucccacuccuacgccgucgacgccgccaaccacugcggcaccgucgccaacggcguccuccagaccuucaugcgcauggccuggggcggcuccuacaucgcccucgacuccggcugcggcaacugggacugcaucaugaccuccuaccaguaccucaucauccagaacaccaccugggaggaccacugccaguucucccgccccucccccaucggcuaccucggccuccucucccagcgcacccgcgacaucuacaucucccgccgccgccggggcaccuucaccuggacccucuccgacuccgagggcaacgacacccccggcggcuacugccucacccgcuggaugcucaucgaggccgagcucaagugcuucggcaacaccgccgucgccaagugcaacgagaagcacgacgaggaguucugcgacaugcuccgccucuucgacuucaacaagcaggccauccagcgccucaaggcccccgcccagauguccauccagcucaucaacaaggccgucaacgcccucaucaacgaccagcucaucaugaagaaccaccuccgcgacaucaugugcauccccuacugcaacuacuccaaguacugguaccucaaccacaccaccaccggcaagaccucccuccccaagugcuggcucgucuccaacggcuccuaccucaacgagacccacuucuccgacgacaucgagcagcaggccgacaacaugaucaccgagaugcuccagaaggaguacauggagcgccagggcaagaccccccucggccucgucgaccucuucgucuucuccaccuccuucuaccucaucuccaucuuccuccaccucgucaagauccccacccaccgccacaucgucggcaagcccugccccaagccccaccgccucaaccacaugggcaucugcuccugcggccucuacaagcagcccggcguccccguccgcuggaagcgcuga

SEQ ID NO: 4770 - RNA, 1476 nt, Artificial Sequence
  derived and/or modified protein sequence (opt2) from LASV(G2263-SLE-2012;Clade IV)__AIT17254__GPCstabilized
augggccagaucgucaccuucuuccaggaggucccccacgucaucgaggaggucaugaacaucguccucaucgcccucuccauccucgccguccucaagggccucuacaacuucgccaccugcggcaucgucggccucgucaccuuccuccuccucugcggccgcuccugcaccaccucccucuacaagggcgucuacgagcuccagacccucgagcucaacauggagacccucaacaugaccaugccccucuccugcaccaagaacaacucccaccacuacaucauggucggcaacgagaccggccucgagcucacccucaccaacaccuccaucaucaaccacaaguucugcaaccucuccgacgcccacaagaagaaccucuacgaccacgcccucauguccaucaucuccaccuuccaccucuccauccccaacuucaaccaguacgaggccauguccugcgacuucaacggcggcaagaucuccguccaguacaaccucucccacuccuacgccggcgacgccgccaaccacugcggcaccgucgccaacggcguccuccagaccuucaugcgcauggccuggggcggcuccuacaucgcccucgacuccggcugcgaccgcugggacugcaucaugaccuccuaccaguaccucaucauccagaacaccaccugggaggaccacugccaguucucccgccccucccccaucggcuaccucggccuccucucccagcgcacccgcgacaucuacaucucccgccgccgccggggcaccuucaccuggacccucuccgacuccgagggcaagaacacccccggcggcuacugccucacccgcuggaugcucaucgaggccgagcucaagugcuucggcaacaccgccgucgccaagugcaacgagaagcacgacgaggaguucugcgacaugcuccgccucuucgacuucaacaagcaggccauccagcgccucaaggcccccgcccagauguccaucucccucaucaacaaggccgucaacgcccucaucaacgaccagcucaucaugaagaaccaccuccgcgacaucaugugcauccccuacugcaacuacuccaaguacugguaccucaaccacaccaccaccggcaagaccucccucccccgcugcuggcucgucuccaacggcuccuaccucaacgagacccacuucuccgacgacaucgagcagcaggccgacaacaugaucaccgagaugcuccagaaggaguacauggaccgccagggcaagaccccccucggccucgucgaccucuucgucuucuccaccuccuucuaccucaucuccaucuuccuccaccucgucaagauccccacccaccgccacaucgucggcaagaccugccccaagccccaccgccucaaccacaugggcaucugcuccugcggccucuacaagcagcccggcguccccgucaaguggaagcgcuga

SEQ ID NO: 4771 - RNA, 1476 nt, Artificial Sequence
  derived and/or modified protein sequence (opt2) from LASV(G2280-SLE-2012;Clade IV)__AIT17258__GPCstabilized
augggccagaucgucaccuucuuccaggaggucccccacgucaucgaggaggucaugaacaucguccucaucgcccucuccauccucgccguccucaagggccucuacaacaucgccaccugcggccucgucggccucgucaccuuccuccuccucugcggccgcuccugcaccaccucccucuacaagggcgucuacgagcuccagacccucgagcucaacauggagacccucaacaugaccaugccccucuccugcaccaagaacaacucccaccacuacaucauggucggcaacgagaccggccucgagcucacccucaccaacaccuccaucaucaaccacaaguucugcaaccucuccgacgcccacaagaagaaccucuacgaccacgcccucauguccaucgucuccaccuuccaccucuccauccccaacuucaaccaguacgaggccauguccugcgacuucaacggcggcaagaucuccguccaguacaaccucucccacuccuacgccgucgacgccgccaaccacugcggcaccgucgccaacggcguccuccagaccuucaugcgcauggccuggggcggcuccuacaucgcccucgacuccggcugcggcggcugggacugcaucaugaccuccuaccaguaccucaucauccagaacgucaccugggaggaccacugccaguucucccgccccucccccaucggcuaccucggccuccucucccagcgcacccgcgacgucuacaucucccgccgccgccggggcaccuucaccuggacccucuccgacuccgagggcaacgacacccccggcggcuacugccucacccgcuggaugcucaucgaggccgagcucaagugcuucggcaacaccgccgucgccaagugcaacgagaagcacgacgaggaguucugcgacaugcuccgccucuucgacuucaacaagcaggccauccagcgccucaaggcccccgcccagauguccauccagcucaucaacaaggccgucaacgcccucaucaacgaccagcucaucaugaagaaccaccuccgcgacaucaugugcauccccuacugcaacuacuccaaguacugguaccucaaccacaccaccaccggcaagaccucccuccccaagugcuggcucgucuccaacggcuccuaccucaacgagacccacuucuccgacgacaucgagcagcaggccgacaacaugaucaccgagaugcuccagaaggaguacauggagcgccagggcaagaccccccucggccucgucgaccucuucgucuucuccaccuccuucuaccucaucuccaucuuccuccaccucgucaagauccccacccaccgccacaucgucggcaagcccugccccaagccccaccgccucaaccacaugggcaucugcuccugcggccucuacaagcagcccggcguccccgucaaguggaagcgcuga

SEQ ID NO: 4772 - RNA, 1476 nt, Artificial Sequence
  derived and/or modified protein sequence (opt2) from LASV(G2295-SLE-2012;Clade IV)__AIT17262__GPCstabilized
augggccagaucgucaccuucuuccaggaggucccccacgucaucgaggaggucaugaacaucguccucaucgcccucuccauccucgccguccucaagggccucuacaaccucgccaccugcggccucgucggccucgucaccuuccuccuccucugcggccgcuccugcaccaccucccucuacaagggcgucuacgagcuccagacccucgagcucaacauggagacccucaacaugaccaugccccucuccugcaccaagaacaacucccaccacuacaucauggucggcaacgagaccggccucgagcucacccucaccaacaccuccaucaucaaccacaaguucugcaaccucuccgacgcccacaagaagaaccucuacgaccacgcccucauguccaucaucuccaccuuccaccucuccauccccaacuucaaccaguacgaggccauguccugcgacuucaacggcggcaagaucuccguccaguacaaccucucccacuccuacgccggcgacgccgccacccacugcggcaccgucgccaacggcguccuccagaccuucaugcgcauggccuggggcggcuccuacaucgcccucgacuccggcugcggcaagugggacugcaucaugaccuccuaccaguaccucaucauccagaacaccaccugggaggaccacugccaguucucccgccccucccccaucggcuaccucggccuccucucccagcgcacccgcgacaucuacaucucccgccgccgccggggcaccuucaccuggacccucuccgacuccgagggcaaggacacccccggcggcuacugccucacccgcuggaugcucaucgaggccgagcucaagugcuucggcaacaccgccgucgccaagugcaacgagaagcacgacgaggaguucugcgacaugcuccgccucuucgacuucaacaagcaggccauccagcgccucaagacccccgcccagauguccauccagcucaucaacaaggccgucaacgcccucaucaacgaccagcucaucaugaagaaccaccuccgcgacaucaugugcauccccuacugcaacuacuccaaguacugguaccucaaccacaccaccaccggcaagaccucccucccccgcugcuggcucgucuccaacggcuccuaccucaacgagacccacuucuccgacgacaucgagcagcaggccgacaacaugaucaccgagaugcuccagaaggaguacauggagcgccagggcaagaccccccucggccucgucgaccucuucgucuucuccaccuccuucuaccucaucuccaucuuccuccaccucgucaagauccccacccaccgccacaucgucggcaagcccugccccaagccccaccgccucaaccacaugggcaucugcuccugcggccucuacaagcagcccggcguccccgucaaguggaagcgcuga

SEQ ID NO: 4773 - RNA, 1476 nt, Artificial Sequence
  derived and/or modified protein sequence (opt2) from LASV(G2315-SLE-2012;Clade IV)__AIT17266__GPCstabilized
augggccagaucgucaccuucuuccaggaggucccccacgucaucgaggaggucaugaacaucguccucaucgcccucuccauccucgccguccucaagggccucuacaaccucgccaccugcggccucgucggccucgucaccuuccuccuccucugcggccgcuccugcaccaccucccucuacaagggcgucuacgagcuccagacccucgagcucaacauggagacccucaacaugaccaugccccucuccugcaccaagaacaacucccaccacuacaucauggucggcaacgagaccggccucgagcucacccucaccaacaccucccucaucaaccacaaguucugcaaccucuccgacgcccacaagaagaaccucuacgaccacgcccucauguccaucaucuccaccuuccaccucuccauccccaacuucaaccaguacgaggccauguccugcgacuucaacggcggcaagaucuccguccaguacaaccucucccacuccuacgccgucgacgccgccaaccacugcggcaccgucgccaacggcguccuccagaccuucaugcgcauggccuggggcggcuccuacaucgcccucgacuccggcugcggcggcugggacugcaucaugaccuccuaccaguaccucaucauccagaacaccaccugggaggaccacugccaguucucccgccccucccccaucggcuaccucggccuccucucccagcgcacccgcgacaucuacaucucccgccgccgccggggcaccuucaccuggacccucuccgacuccgagggcaaggacacccccggcggcuacugccucacccgcuggaugcucaucgaggccgagcucaagugcuucggcaacaccgccgucgccaagugcaacgagaagcacgacgaggaguucugcgacaugcuccgccucuucgacuucaacaagcaggccauccagcgccucaaggcccccgcccagauguccauccagcucaucaacaaggccgucaacgcccucaucaacgaccagcucaucaugaagaaccaccuccgcgacaucaugugcauccccuacugcaacuacuccaaguacugguaccucaaccacaccaccaccggccgcaccucccucccccgcugcuggcucgucuccaacggcuccuaccucaacgagacccacuucuccgacgacaucgagcagcaggccgacaacaugaucaccgagaugcuccagaaggaguacauggagcgccagggcaagaccccccucggccucgucgaccucuucgucuucuccaccuccuucuaccucaucuccaucuuccuccaccucgucaagauccccacccaccgccacaucgucggcaaguccugccccaagccccaccgccucaaccacaugggcaucugcuccugcggccucuacaagcagcccggcguccccgucaaguggaagcgcuga

SEQ ID NO: 4774 - RNA, 1476 nt, Artificial Sequence
  derived and/or modified protein sequence (opt2) from LASV(G2318-SLE-2012;Clade IV)__AIT17270__GPCstabilized
augggccagaucgucaccuucuuccaggaggucccccacgucaucgaggaggucaugaacaucguccucaucgcccucuccguccucgccguccucaagggccucuacaacuucgccaccugcggccucgucggccucgucaccuuccuccuccucugcggccgcuccugcuccaccuccgucuacaagggcgucuacgagcuccagacccucgagcucaacauggagacccucaacaugaccaugccccucuccugcaccaagaacaacucccaccacuacaucauggucggcaacgagaccggccucgagcucacccucaccaacaccuccaucaucaaccacaaguucugcaaccucuccgacgcccacaagaagaaccucuacgaccacgcccucauguccaucaucuccaccuuccaccucuccauccccaacuucaaccaguacgaggccauguccugcgacuucaacggcggcaagaucuccguccaguacaaccucucccacuccuacgccgucgacgccgccaaccacugcggcaccgucgccaacggcguccuccagaccuucaugcgcauggccuggggcggcuccuacaucgcccucgacuccggcugcggcggcugggacugcaucaugaccaacuaccaguaccucaucauccagaacaccaccugggaggaccacugccaguucucccgccccucccccaucggcuaccucggccuccucucccagcgcacccgcgacaucuacaucucccgccgccgccggggcaccuucaccuggacccucuccgacuccgagggcaaggacacccccggcggcuacugccucacccgcuggaugcucaucgaggccgagcucaagugcuucggcaacaccgccgucgccaagugcaacgagaagcacgacgaggaguucugcgacaugcuccgccucuucgacuucaacaagcaggccauccagcgccucaaggcccccgcccagauguccauccagcucaucaacaaggccgucaacgcccucaucaacgaccagcucaucaugaagaaccaccuccgcgacaucaugugcauccccuacugcaacuacuccaaguacugguaccucaaccacaccaccaccggccgcaccucccuccccaagugcuggcucgucuccaacggcuccuaccucaacgagacccacuucuccgacgacaucgagcagcaggccgacaacaugaucaccgagaugcuccagcgcgaguacauggagcgccagggcaagaccccccucggccucgucgaccucuucgucuucuccaccuccuucuaccucaucuccaucuuccuccaccucgucaagauccccacccaccgccacaucgucggcaaguccugccccaagccccaccgccucaaccacaugggcaucugcuccugcggccucuacaagcagcccggcguccccgucaaguggaagcgcuga

SEQ ID NO: 4775 - RNA, 1476 nt, Artificial Sequence
  derived and/or modified protein sequence (opt2) from LASV(G2363-SLE-2012;Clade IV)__AIT17274__GPCstabilized
augggccagaucgucaccuucuuccaggaggucccccacgucaucgaggaggucaugaacaucguccucaucgcccucuccauccucgccguccucaagggccucuacaacgucgccaccugcggccucaccggccucgucgccuuccuccuccucugcggccgcuccugcaccaccacccucuacaagggcgucuacgagcuccaggcccucgagcucaacauggagacccucaacaugaccaugccccucuccugcaccaagaacaacucccaccacuacauccgcgucggcaacgagaccggccucgagcucacccucaccaacaccuccaucaucgagcaccgcuucugcaaccucuccgacgcccacaagaagaaccucuacgaccacgcccucauguccaucaucuccaccuuccaccucuccauccccaacuucaaccaguacgaggccauguccugcgacuucaacggcggcaagaucuccguccaguacaaccucucccacuccuacgccgucgacgccgccaaccacugcggcaccgucgccaacggcguccuccagaccuucaugcgcauggccuggggcggcuccuacaucgcccucgacuccggcugcaacggcugggacugcaucaugaccuccuaccaguaccucaucauccagaacaccaccugggaggaccacugccaguucucccgccccucccccaucggcuaccucggccuccucucccagcgcacccgcgacaucuacaucucccgccgccgccggggcaccuucaccuggacccucuccgacuccgagggcaaggacacccccggcggcuacugccucacccgcuggaugcucaucgaggccgagcucaagugcuucggcaacaccgccgucgccaagugcaacgagaagcacgacgaggaguucugcgacaugcuccgccucuucgacuucaacaagcaggccauccagcgccucaaggcccccgcccagauguccauccagcucaucaacaaggccgucaacgcccucaucaacgaccagcucaucaugaagaaccaccuccgcgacaucaugugcauccccuacugcaacuacuccaaguacugguaccucaacaacaccgccaccggcaagaccucccucccccgcugcuggcucgucuccaacggcuccuaccucaacgagacccacuucuccgacgacaucgagcagcaggccgacaacaugaucaccgagaugcuccagaaggaguacauggagcgccagggcaagaccccccucggccucgucgaccucuucgucuucuccaccuccuucuaccucaucuccaucuuccuccaccucgucaagauccccacccaccgccacaucgucggcaagcccugccccaagccccaccgccucaaccacaugggcaucugcuccugcggccucuacaagcagcccggcgcccccguccgcuggaagcgcuga

SEQ ID NO: 4776 - RNA, 1476 nt, Artificial Sequence
  derived and/or modified protein sequence (opt2) from LASV(G2384-SLE-2012;Clade IV)__AIT17276__GPCstabilized
augggccagaucgucaccuucuuccaggaggucccccacgucaucgaggaggucaugaacaucguccucaucgcccucuccauccucgccguccucaagggccucuacaacuucgccaccugcggccucgucggccucgucaccuuccuccuccucugcggccgcuccugcaccaccucccucuacaagggcgucuacgagcuccagacccucgagcucaacauggagacccucaacaugaccaugccccucuccugcaccaagaacaacucccaccacuacaucauggucggcaacgagaccggccucgagcucacccucaccaacaccuccaucaucaaccacaaguucugcaaccucuccgacgcccacaagaagaaccucuacgaccacgcccucauguccaucaucuccaccuuccaccucuccauccccaacuucaaccaguacgaggccauguccugcgacuucaacggcggcaagaucuccguccaguacaaccucucccacuccuacgccggcgacgccgccaaccacugcggcaccgucgccaacggcguccuccagaccuucaugcgcauggccuggggcggcuccuacaucgcccucgacuccggcugcggcaagugggacugcaucaugaccuccuaccaguaccucaucauccagaacaccaccugggaggaccacugccaguucucccgccccucccccaucggcuaccucggccuccucucccagcgcacccgcgacaucuacaucucccgccgccgccggggcaccuucaccuggacccucuccgacuccgagggcaaggacacccccggcggcuacugccucacccgcuggaugcucaucgaggccgagcucaagugcuucggcaacaccgccgucgccaagugcaacgagaagcacgacgaggaguucugcgacaugcuccgccucuucgacuucaacaagcaggccauccagcgccucaaggcccccgcccagauguccauccagcucaucaacaaggccgucaacgcccucaucaacgaccagcucaucaugaagaaccaccuccgcgacaucaugugcauccccuacugcaacuacuccaaguacugguaccucaaccacaccaccaccggcaagaccucccuccccaagugcuggcucgucuccaacggcuccuaccucaacgagacccacuucuccgacgacaucgagcagcaggccgacaacaugaucaccgagaugcuccagaaggaguacauggagcgccagggcaagaccccccucggccucgucgaccucuucgucuucuccaccuccuucuaccucaucuccaucuuccuccaccucgucaagauccccacccaccgccacaucgucggcaaguccugccccaagccccaccgccucaaccacaugggcaucugcuccugcggccucuacaagcagcccggcguccccguccgcuggaagcgcuga

SEQ ID NO: 4777 - RNA, 1473 nt, Artificial Sequence
  derived and/or modified protein sequence (opt2) from LASV(G2392-SLE-2012;Clade IV)__AIT17280__GPCstabilized
augggccagaucgucaccuucuuccaggaggucccccacgucaucgaggaggucaugaacaucguccucaucgcccucuccauccucgccguccucaagggccucuacaacuucgccaccugcggccucgucggccucgucaccuuccuccuccucugcggccgcuccugcaccaccucccucuacaagggcgucuacgagcuccagacccucgagcucaacauggagacccucaacaugaccaugccccucuccugcaccaagaacaacucccaccacuacauccgcgucggcaacgagaccggccucgagcucacccucaccaacaccuccaucaucgaccacaaguucugcaaccucuccgacgcccacaagaagaaccucuacgaccacgcccucauguccaucaucuccaccuuccaccucuccauccccaacuucaaccaguacgaggccauguccugcgacuucaacggcggcaagaucuccguccaguacaaccucucccacuccuacgccggcgacgccgccaaccacugcggcaccgucgccaacggcguccuccagaccuucaugcgcauggccuggggcggcuccuacaucgcccucgacuccggcugcgagugggacugcaucaugaccuccuaccaguaccucaucauccagaacaccaccugggacaaccacugccaguucucccgccccucccccaucggcuaccucggccuccucucccagcgcacccgcgacaucuacaucucccgccgccgccggggcaccuucaccuggacccucuccgacuccgagggcaaggacacccccggcggcuacugccucacccgcuggaugcucaucgaggccgagcucaagugcuucggcaacaccgccgucgccaagugcaacgagaagcacgacgaggaguucugcgacaugcuccgccucuucgacuucaacaagcaggccauccagcgccucaagguccccgcccagauguccauccagcucaucaacaaggccgucaacgcccucaucaacgaccagcucaucaugaagaaccaccuccgcgacaucaugugcauccccuacugcaacuacuccaaguacugguaccucaaccacaccaccaccggcaagaccucccuccccaagugcuggcucgucuccaacggcuccuaccucaacgagacccacuucuccgacgacaucgagcagcaggccgacaacaugaucaccgagaugcuccagaaggaguacauggagcgccagggcaagaccccccucggccucgucgaccucuucgucuucuccaccuccuucuaccucaucuccaucuuccuccaccucgucaagauccccacccaccgccacaucgucggcaaguccugccccaagccccaccgccucaaccacaugggcaucugcuccugcggcuucuacaagcagcccggcguccccgucaaguggaagcgcuga

SEQ ID NO: 4778 - RNA, 1476 nt, Artificial Sequence
  derived and/or modified protein sequence (opt2) from LASV(G2405-SLE-2012;Clade IV)__AIT17284__GPCstabilized
augggccagaucgucaccuucuuccaggaggucccccacgucaucgaggaggucaugaacaucguccucaucgcccucuccguccucgccguccucaagggccucuacaacuucgccaccugcggcaucgucggccucgucaccuuccuccuccucugcggccgcuccugcaccaccucccucuacaagggcgucuacgagcuccagacccucgagcucaacauggagacccucaacaugaccaugccccucuccugcaccaagaacaacucccaccacuacaucauggucggcaacgacaccggccucgagcucacccucaccaacaccuccaucaucaaccacaaguucugcaaccucuccgacgcccacaagaagaaccucuacgaccacgcccucauguccaucaucuccaccuuccaccucuccauccccaacuucaaccaguacgaggccauguccugcgacuucaacggcggcaagaucuccguccaguacaaccucucccacuccuacgccggcgacgccgccgaccacugcggcaccgucgccaacggcguccuccagaccuucaugcgcauggccuggggcggcuccuacaucgcccucgacuccggcugcggccgcugggacugcaucaugaccuccuaccaguaccucaucauccagaacaccaccugggaggaccacugccaguucucccgccccucccccaucggcuaccucggccuccucucccagcgcacccgcgacaucuacaucucccgccgccgccggggcaccuucaccuggacccucuccgacuccgagggcaaggacacccccggcggcuacugccucacccgcuggaugcucaucgaggccgagcucaagugcuucggcaacaccgccgucgccaagugcaacgagaagcacgacgaggaguucugcgacaugcuccgccucuucgacuucaacaagcaggccauccagcgccucaaggcccccgcccagauguccauccagcucaucaacaaggccgucaacgcccucaucaacgaccagcucaucaugaagaaccaccuccgcgacaucaugugcauccccuacugcaacuacuccaaguacugguaccucaaccacaccaccaccggcaagaccucccuccccaagugcuggcucgucuccaacggcuccuaccucaacgagacccacuucuccgacgacaucgagcagcaggccgacaacaugaucaccgagaugcuccagaaggaguacauggagcgccagggcaagaccccccucggccucgucgaccucuucgucuucuccaccuccuucuaccucaucuccaucuuccuccaccucgucaagauccccacccaccgccacaucgucggcaagcccugccccaagccccaccgccucaaccacaugggcaucugcuccugcggccucuacaagcagcccggcguccccgucaaguggaagcgcuga

SEQ ID NO: 4779 - RNA, 1476 nt, Artificial Sequence
  derived and/or modified protein sequence (opt2) from LASV(G2427-SLE-2012;Clade IV)__AIT17288__GPCstabilized
augggccagaucgucaccuucuuccaggaggucccccacgucaucgaggaggucaugaacaucguccucaucgcccucuccauccucgccguccucaagggccucuacaacuucgccaccugcggccucgucggccucgucaccuuccuccuccucugcggccgcuccugcaccaccucccucuacaagggcgucuacgagcuccagacccucgagcucaacauggagacccucaacaugaccaugccccucuccugcaccaagaacaacucccaccacuacaucauggucggcaacgagaccggccucgagcucacccucaccaacaccuccaucaucaaccacaaguucugcaaccucuccgacgcccacaagaagaaccucuacgaccacgcccucauguccaucaucuccaccuuccaccucuccauccccaacuucaaccaguacgaggccauguccugcgacuucaacggcggcaagaucuccguccaguacaaccucucccacuccuacgccgucgacgccgccaaccacugcggcaccgucgccaacggcguccuccagaccuucaugcgcauggccuggggcggcggcuacaucgcccucgacuccggcugcggcaacugggacugcaucaugaccuccuaccaguaccucaucauccagaacaccaccugggaggaccacugccaguucucccgccccucccccaucggcuaccucggccuccucucccagcgcacccgcgacaucuacaucucccgccgccgccggggcaccuucaccuggacccucuccgacuccgagggcaaggacacccccggcggcuacugccucacccgcuggaugcucaucgaggccgagcucaagugcuucggcaacaccgccgucgccaagugcaacgagaagcacgacgaggaguucugcgacaugcuccgccucuucgacuucaacaagcaggccauccagcgccucaaggcccccgcccagauguccauccagcucaucaacaaggccgucaacgcccucaucaacgaccagcucaucaugaagaaccaccuccgcgacaucaugugcauccccuacugcaacuacuccaaguacugguaccucaaccacaccgucaccggcaagaccucccuccccaagugcuggcucgucuccaacggcuccuaccucaacgagacccacuucuccgacgacaucgagcagcaggccgacaacaugaucaccgagaugcuccagaaggaguacauggagcgccagggcaagaccccccucggccucgucgaccucuucgucuucuccaccuccuucuaccucaucuccaucuuccuccaccucgucaagauccccacccaccgccacaucgucggcaaguccugccccaagccccaccgccucaaccacaugggcaucugcuccugcggccucuacaagcagcccggcguccccguccgcuggaagcgcuga

SEQ ID NO: 4780 - RNA, 1476 nt, Artificial Sequence
  derived and/or modified protein sequence (opt2) from LASV(G2431-SLE-2012;Clade IV)__AIT17292__GPCstabilized
augggccagaucgucaccuucuuccaggaggucccccacgucaucgaggaggucaugaacaucguccucaucgcccucuccaucauggccguccucaagggccucuacaacaucgccaccugcggccucgucggccucgucaccuuccuccuccucugcggccgcuccugcaccaccacccucuacaagggcgucuacgagcuccagacccucgagcucaacauggagacccucaacaugaccaugccccucuccugcaccaagaacaacucccaccacuacaucauggucggcaacgagaccggccucgagcucacccucaccaacaccuccaucaucaaccacaaguucugcaaccucuccgacgcccacaagaagaaccucuacgaccacgcccucauguccaucaucuccaccuuccaccucuccauccccaacuucaaccaguacgaggccauguccugcgacuucaacggcggcaagaucuccguccaguacaaccucucccacuccuacgccggcgacgccgccaaccacugcggcaccgucgccaacggcguccuccagaccuucaugcgcauggccuggggcggcuccuacaucgcccucgacuccggcugcggcggcugggacugcaucaugaccuccuaccaguaccucaucauccagaacaccaccugggaggaccacugccaguucacccgccccucccccaucggcuaccucggccuccucucccagcgcacccgcgacaucuacaucucccgccgccgccggggcaccuucaccuggacccucuccgacuccgagggcaacgacacccccggcggcuacugccucacccgcuggaugcucaucgaggccgagcucaagugcuucggcaacaccgccgucgccaagugcaacgagaagcacgacgaggaguucugcgacaugcuccgccucuucgacuucaacaagcaggccauccagcgccuccgcgcccccgcccagauguccauccagcucaucaacaaggccgucaacgcccucaucaacgaccagcucaucaugaagaaccaccuccgcgacaucaugugcauccccuacugcaacuacuccaaguacugguaccucaaccacaccaccaccggccgcaccucccucccccgcugcuggcucgucuccaacggcuccuaccucaacgagacccacuucuccgacgacaucgagcagcaggccgacaacaugaucaccgagaugcuccagaaggaguacauggagcgccagggcaagaccccccucggccucgucgaccucuucgucuucuccaccuccuucuaccucaucuccaucuuccuccaccucaucaagauccccacccaccgccacaucgucggcaagcccugccccaagccccaccgccucaaccacaugggcgucugcuccugcggccucuacaagcagcccggcguccccguccgcuggaagcgcuga

SEQ ID NO: 4781 - RNA, 1476 nt, Artificial Sequence
  derived and/or modified protein sequence (opt2) from LASV(G2511-SLE-2012;Clade IV)__AIT17294__GPCstabilized
augggccagaucgucaccuucuuccaggaggucccccacgucaucgaggaggucaugaacaucguccucaucgcccucuccauccucgccguccucaagggccucuacaaccucgccaccugcggccucgucggccucgucaccuuccuccuccucugcggccgcuccugcaccaccucccucuacaagggcgucuacgagcuccagacccucgagcucaacauggagacccucaacaugaccaugccccucuccugcaccaagaacaacucccaccacuacaucauggucggcaacgagaccggccucgagcucacccucaccaacaccuccaucaucgaccacaaguucugcaaccucuccgacgcccacaagaagaaccucuacgaccacgcccucauguccaucaucuccaccuuccaccucuccauccccaacuucaaccaguacgaggccauguccugcgacuucaacggcggcaagaucuccguccaguacaaccucucccacuccuacgccggcgacgccgccaaccacugcggcaccgucgccaacggcguccuccagaccuucaugcgcauggccuggggcggcuccuacaucgcccucgacuccggcugcggcggcugggacugcaucaugaccuccuaccaguaccucaucauccagaacaccaccugggaggaccacugccaguucucccgccccucccccgucggcuaccucggccuccucucccagcgcacccgcgacaucuacaucucccgccgccgccggggcaccuucaccuggacccucuccgacuccgagggcaaggacacccccggcggcuacugccucacccgcuggaugcucaucgaggccgagcucaagugcuucggcaacaccgccgucgccaagugcaacgagaagcacgacgaggaguucugcgacaugcuccgccucuucgacuucaacaagcaggccauccagcgccucaagacccccgcccagauguccauccagcucaucaacaaggccgucaacgcccucaucaacgaccagcucaucaugaagaaccaccuccgcgacaucaugugcauccccuacugcaacuacuccaaguacugguaccucaaccacaccaccaccggcaagaccucccucccccgcugcuggcucgucuccaacggcuccuaccucaacgagacccacuucuccgacgacaucgagcagcaggccgacaacaugaucaccgagaugcuccagaaggaguacauggagcgccagggcaagaccccccucggccucgucgaccucuucgucuucuccaccuccuucuaccucaucuccaucuuccuccaccucgucaagauccccacccaccgccacaucgucggcaagcccugccccaagccccaccgccucaaccacaugggcaucugcuccugcggccucuacaagcagcccggcguccccgucaaguggaagcgcuga

SEQ ID NO: 4782 - RNA, 1476 nt, Artificial Sequence
  derived and/or modified protein sequence (opt2) from LASV(G2554-SLE-2012;Clade IV)__AIT17298__GPCstabilized
augggccagaucgucaccuucuuccaggaggucccccacgucaucgaggaggucaugaacaucguccucaucgcccucuccauccucgccguccucaagggccucuacaacaucgccaccugcggccuccucggccucgucugcuuccuccuccucugcggccgcuccugcaccaccucccucuacaagggcgucuacgagcuccagacccucgagcucaacauggagacccucaacaugaccaugccccucuccugcaccaagaacaacucccaccacuacaucauggucggcaacgagaccggccucgagcucacccucaccaacaccuccaucaucaaccacaaguucugcaaccucuccgacgcccacaagaagaaccucuacgaccacgcccucauguccaucaucuccaccuuccaccucuccauccccaacuucaaccaguacgaggccauguccugcgacuucaacggcggcaagaucuccguccaguacaaccucucccacuccuacgccgucgacgccgccucccacugcggcaccaucgccaacggcguccuccagaccuucaugcgcauggccuggggcggcuccuacaucgcccucgacuccggcugcggcggcugggacugcaucaugaccuccuaccaguaccucaucauccagaacaccaccugggaggaccacugccaguucucccgccccucccccaucggcuaccucggccuccucucccagcgcacccgcgacaucuacaucucccgccgccgccggggcaccuucaccuggacccucuccgacuccgagggcaaggacacccccggcggcuacugccucacccgcuggaugcucaucgaggccgagcucaagugcuucggcaacaccgccgucgccaagugcaacgagaagcacgacgaggaguucugcgacaugcuccgccucuucgacuucaacaagcaggccauccagcgccucaaggcccccgcccagauguccauccagcucaucaacaaggccgucaacgcccucaucaacgaccagcucaucaugaagaaccaccuccgcgacaucaugugcauccccuacugcaacuacuccaaguacugguaccucaaccacaccaccaccggcaagaccucccuccccaagugcuggcucgucuccaacggcuccuaccucaacgagacccacuucuccgacgacaucgagcagcaggccgacaacaugaucaccgagaugcuccagaaggaguacauggagcgccagggcaagaccccccucggccucgucgaccucuucgucuucuccaccuccuucuaccucaucuccaucuuccuccaccucgucaagauccccacccaccgccacgucgucggcaagcccugccccaagccccaccgccucaaccacaugggcaucugcuccugcggccucuacggccagcccggcguccccgucaaguggaagcgcuga

SEQ ID NO: 4783 - RNA, 1476 nt, Artificial Sequence
  derived and/or modified protein sequence (opt2) from LASV(G2557-SLE-2012;Clade IV)__AIT17302__GPCstabilized
augggccagaucgucaccuucuuccaggaggucccccacgucaucgaggaggucaugaacaucguccucaucgcccucucccuccucgccguccucaagggccucuacaacgucgccaccugcggccucaucggccucgucaccuuccuccuccucugcggccgcuccugcaccaccaaccucuacaagggcgucuacgagcuccagacccucgagcucaacauggagacccucaacaugaccaugccccucuccugcaccaagaacaacucccaccacuacaucauggucggcaacgagaccggccucgagcucacccucaccaacaccuccaucaucucccacaaguucugcaaccucuccgacgcccacaagaagaaccucuacgaccacacccucauguccaucaucuccaccuuccaccucuccauccccaacuucaaccaguacgaggccauguccugcgacuucaacggcggcaagaucuccguccaguacaaccucucccacuccuacgccgucgacgccgccaaccacugcggcaccgucgccaacggcguccuccagaccuucaugcgcauggccuggggcggcuccuacaucgcccucgacuccggcugcggcaacugggacugcaucaugaccuccuaccaguaccucaucauccagaacaccaccugggaggaccacugccaguucucccgccccucccccaucggcuaccucggccuccucucccagcgcacccgcgacaucuacaucucccgccgccgccggggcaccuucaccuggacccucuccgacuccgagggcaacgacacccccggcggcuacugccucacccgcuggaugcucaucgaggccgagcucaagugcuucggcaacaccgccgucgccaagugcaacgagaagcacgacgaggaguucugcgacaugcuccgccucuucgacuucaacaagcaggccauccagcgccucaaggcccccgcccagauguccauccagcucaucaacaaggccgucaacgcccucaucaacgaccagcucaucaugaagaaccaccuccgcgacaucaugugcauccccuacugcaacuacuccaaguacugguaccucaaccacaccaccaccggcaagaccucccuccccaagugcuggcucgucuccaacggcuccuaccucaacgagacccacuucuccgacgacaucgagcagcaggccgacaacaugaucaccgagaugcuccagaaggaguacauggagcgccagggcaagaccccccucggccucgucgaccucuucgucuucuccaccuccuucuaccucaucuccaucuuccuccaccucgucaagauccccacccaccgccacaucgucggcaagcccugccccaagccccaccgccucaaccacaugggcaucugcuccugcggccucuacaagcagcccggcguccccguccgcuggaagcgcuga

SEQ ID NO: 4784 - RNA, 1476 nt, Artificial Sequence
  derived and/or modified protein sequence (opt2) from LASV(G2587-SLE-2012;Clade IV)__AIT17310__GPCstabilized
augggccagaucgucaccuucuuccaggaggucccccacgucaucgaggaggucaugaacaucguccucaucgcccucuccauccucgccguccucaagggccucuacaaccucgccaccugcggccucgucggccucgucaccuuccuccuccucugcggccgcuccugcaccaccucccucuacaagggcgucuacgagcuccagacccucgagcucaacauggagacccucaacaugaccaugccccucuccugcaccaagaacaacucccaccacuacaucauggucggcaacgagaccggccucgagcucacccucaccaacaccuccaucaucaaccacaaguucugcaaccucuccgacgcccacaagaagaaccucuacgaccacgcccucauguccaucaucuccaccuuccaccucuccauccccaacuucaaccaguacgaggccauguccugcgacuucaacggcggcaagaucuccguccaguacaaccucucccacuccuacgccggcgacgccgccacccacugcggcaccgucgccaacggcguccuccagaccuucaugcgcauggccuggggcggcuccuacaucgcccucgacuccggcugcggcaagugggacugcaucaugaccuccuaccaguaccucaucauccagaacaccaccugggaggaccacugccaguucucccgccccucccccaucggcuaccucggccuccucucccagcgcacccgcgacaucuacaucucccgccgccgccggggcaccuucaccuggacccucuccgacuccgagggcaaggacacccccggcggcuacugccucacccgcuggaugcucaucgaggccgagcucaagugcuucggcaacaccgccgucgccaagugcaacgagaagcacgacgaggaguucugcgacaugcuccgccucuucgacuucaacaagcaggccauccagcgccucaagacccccgcccagauguccauccagcucaucaacaaggccgucaacgcccucaucaacgaccagcucaucaugaagaaccaccuccgcgacaucaugugcauccccuacugcaacuacuccaaguacugguaccucaaccacaccaccaccggcaagaccucccucccccgcugcuggcucgucuccaacggcuccuaccucaacgagacccacuucuccgacgacaucgagcagcaggccgacaacaugaucaccgagaugcuccagaaggaguacauggagcgccagggcaagaccccccucggccucgucgaccucuucgucuucuccaccuccuucuaccucaucuccaucuuccuccaccucgucaagauccccacccaccgccacaucgucggcaagcccugccccaagccccaccgccucaacuacaugggcaucugcuccugcggccucuacaagcagcccggcguccccgucaaguggaagcgcuga

SEQ ID NO: 4785 - RNA, 1476 nt, Artificial Sequence
  derived and/or modified protein sequence (opt2) from LASV(G2612-SLE-2012;Clade IV)__AIT17314__GPCstabilized
augggccagaucgucaccuucuuccaggaggucccccacgucaucgaggaggucaugaacaucguccucaucacccucuccauccucgccguccucaagggccucuacaacgucgccaccugcggccucgucggccucgucaccuuccuccuccucugcggccgcuccugcaccaccucccucuacaagggcgucuacgagcuccagacccucgagcucaacauggagacccucaacaugaccaugccccucuccugcaccaagaacaacucccaccacuacaucauggucggcaacgagaccggccucgagcucacccucaccaacaccuccaucaucaaccacaaguucugcaaccucuccgacgcccacaagaaggaccucuacgaccacgcccucauguccaucaucuccaccuuccaccucuccauccccaacuucaaccaguacgaggccauguccugcgacuucaacggcggcaagaucuccguccaguacaaccucucccacuccuacgccgucgacgccgccaaccacugcggcaccgucgccaacggcguccuccagaccuucaugcgcauggccuggggcggcuccuacaucgcccucgacuccggcugcggcggcugggacugcaucaugaccuccuaccaguaccucaucauccagaacaccaccugggaggaccacugccaguucucccgccccucccccaucggcuaccucggccuccucucccagcgcacccgcgacaucuacaucucccgccgccgccggggcaccuucaccuggacccucuccgacuccgagggcaacgacacccccggcggcuacugccucacccgcuggaugcucaucgaggccgagcucaagugcuucggcaacaccgccgucgccaagugcaacgagaagcacgacgaggaguucugcgacaugcuccgccucuucgacuucaacaagcaggccauccagcgccucaaggcccccgcccagauguccauccagcucaucaacaaggccgucaacgcccucaucaacgaccagcucaucaugaagaaccaccuccgcgacaucaugugcauccccuacugcaacuacuccaaguacugguaccucaaccacaccaccaccggcaagaccucccuccccaagugcuggcucgucuccaacggcuccuaccucaacgagacccacuucuccgacgacaucgagcagcaggccgacaacaugaucaccgagaugcuccagaaggaguacauggagcgccagggcaagaccccccucggccucgucgaccucuucgucuucuccaccuccuucuaccucaucuccaucuuccuccaccucgucaagauccccacccaccgccacaucgucggcaagcccugccccaagccccaccgccucaaccacaugggcaucugcuccugcggccucuacaagcagcccggcguccccgucaaguggaagcgcuga

SEQ ID NO: 4786 - RNA, 1476 nt, Artificial Sequence
  derived and/or modified protein sequence (opt2) from LASV(G2615-SLE-2012;Clade IV)__AIT17318__GPCstabilized
augggccagaucgucaccuucuuccaggaggucccccacgucaucgaggaggucaugaacaucguccucaucgcccucucccuccucgccguccucaagggccucuacaacgucgccaccugcggccucaucggccucgucaccuuccuccuccucugcggccgcuccugcaccaccaaccucuacaagggcgucuacgagcuccagacccucgagcucaacauggagacccucaacaugaccaugccccucuccugcaccaagaacaacucccaccacuacaucauggucggcaacgagaccggccucgagcucacccucaccaacaccuccaucaucaaccacaaguucugcaaccucuccgacgcccacaagaagaaccucuacgaccacgcccucauguccaucaucuccaccuuccaccucuccauccccaacuucaaccaguacgaggccauguccugcgacuucaacggcggcaagaucuccguccaguacaaccucucccacuccuacgccgucgacgccgccaaccacugcggcaccgucgccaacggcguccuccagaccuucaugcgcauggccuggggcggcuccuacaucgcccucgacuccggcugcggcaacugggacugcaucaugaccuccuaccaguaccucaucauccagaacaucaccugggaggaccacugccaguucucccgccccucccccaucggcuaccucggccuccucucccagcgcacccgcgacaucuacaucucccgccgccgccggggcaccuucaccuggacccucuccgacuccgagggcaacgacacccccggcggcuacugccucacccgcuggaugcucaucgaggccgagcucaagugcuucggcaacaccgccgucgccaagugcaacgagaagcacgacgaggaguucugcgacaugcuccgccucuucgacuucaacaagcaggccauccagcgccucaaggcccccgcccagauguccauccagcucaucaacaaggccgucaacgcccucaucaacgaccagcucaucaugaagaaccaccuccgcgacaucaugugcauccccuacugcaacuacuccaaguacugguaccucaaccacaccaccaccggcaagaccucccuccccaagugcuggcucgucuccaacggcuccuaccucaacgagacccacuucuccgacgacaucgagcagcaggccgacaacaugaucaccgagaugcuccagaaggaguacauggagcgccagggcaagaccccccucggccucgucgaccucuucgucuucuccaccuccuucuaccucaucuccaucuuccuccaccucgucaagauccccacccaccgccacaucgucggcaagcccugccccaagccccaccgccucaaccacaugggcaucugcuccugcggccucuacaagcagcccggcguccccguccgcuggaagcgcuga

SEQ ID NO: 4787 - RNA, 1476 nt, Artificial Sequence
  derived and/or modified protein sequence (opt2) from LASV(G2723-SLE-2012;Clade IV)__AIT17322__GPCstabilized
augggccagaucgucaccuucuuccaggaggucccccacgucaucgaggaggucaugaacaucguccucaucgcccucucccuccucgccguccucaagggccucuacaacgucgccaccugcggccucaucggccucgucaccuuccuccuccucugcggccgcuccugcaccaccaaccucuacaagggcgccuacgagcuccagacccucgagcucaacauggagacccucaacaugaccaugccccucuccugcaccaagaacaacucccaccacuacaucauggucggcaacgagaccggccucgagcucacccucaccaacaccuccaucaucaaccacaaguucugcaaccucuccgacgcccacaagaagaaccucuacgaccacacccucauguccaucaucuccaccuuccaccucuccauccccaacuucaaccaguacgaggccauguccugcgacuucaacggcggcaagaucuccguccaguacaaccucucccacuccuacgccgucgacgccgccaaccacugcggcaccgucgccaacggcguccuccagaccuucaugcgcauggccuggggcggcuccuacaucgcccucgacuccggcugcggcaacugggacugcaucaugaccuccuaccaguaccucaucauccagaacaccaccugggaggaccacugccaguucucccgccccucccccaucggcuaccucggccuccucucccagcgcacccgcgacaucuacaucucccgccgccgccggggcaccuucaccuggacccucuccgacuccgagggcaacgacacccccggcggcuacugccucacccgcuggaugcucaucgaggccgagcucaagugcuucggcaacaccgccgucgccaagugcaacgagaagcacgacgaggaguucugcgacaugcuccgccucuucgacuucaacaagcaggccauccagcgccucaaggcccccgcccagauguccauccagcucaucaacaaggccgucaacgcccucaucaacgaccagcucaucaugaagaaccaccuccgcgacaucaugugcauccccuacugcaacuacuccaaguacugguaccucaaccacaccaccaccggcaagaccucccuccccaagugcuggcucgucuccaacggcuccuaccucaacgagacccacuucuccgacgacaucgagcagcaggccgacaacaugaucaccgagaugcuccagaaggaguacauggagcgccagggcaagaccccccucggccucgucgaccucuucgucuucuccaccuccuucuaccucaucuccaucuuccuccaccucgucaagauccccacccaccgccacaucgucggcaagcccugccccaagccccaccgccucaaccacaugggcaucugcuccugcggccucuacaagcagcccggcguccccguccgcuggaagcgcuga

SEQ ID NO: 4788 - RNA, 1476 nt, Artificial Sequence
  derived and/or modified protein sequence (opt2) from LASV(G2868-SLE-2012;Clade IV)__AIT17328__GPCstabilized
augggccagaucgucaccuucuuccaggaggucccccacgucaucgaggaggucaugaacaucguccucaucacccucuccauccucgccguccucaagggccucuacaacaucgccaccugcggccucgucggccucgucaccuuccuccuccucugcggcaaguccugcaccaccucccucuacaagggcgucuacgagcuccagacccucgagcucaacauggagacccucaacaugaccaugccccucuccugcaccaagaacaacucccaccacuacauccgcgucggcaacgagaccggccucgagcucacccucaccaacaccuccaucaucaaccacaaguucugcaaccucuccgacgcccacaagaagaaccucuacgaccacgcccucauguccaucaucuccaccuuccaccucuccauccccaacuucaaccaguacgaggccauguccugcgacuucaacggcggcaagaucuccguccaguacaaccucucccacuccuacgccgucgacgccgccaaccacugcggcaccgucgccaacggcguccuccagaccuucaugcgcauggccuggggcggcuccuacaucgcccucgacuccggcugcggcaacugggacugcaucaugaccuccuaccaguaccucaucauccagaacaccaccugggaggaccacugccaguucucccgccccucccccaucggcuaccucggccuccucucccagcgcacccgcgacaucuacaucucccgccgccgccggggcaccuucaccuggacccucuccgacuccgagggcaacgacgcccccggcggcuacugccucacccgcuggaugcucaucgaggccgagcucaagugcuucggcaacaccgccgucgccaagugcaacgagaagcacgacgaggaguucugcgacaugcuccgccucuucgacuucaacaagcaggccauccagcgccucaaggcccccgcccagauguccauccagcucaucaacaaggccgucaacgcccucaucaacgaccagcucaucaugaagaaccaccuccgcgacaucaugugcauccccuacugcaacuacuccaaguacugguaccucaaccacaccaccaccggcaagaccucccuccccaagugcuggcucgucuccaacggcuccuaccucaacgagacccacuucuccgacgacaucgagcagcaggccgacaacaugaucaccgagaugcuccagaaggaguacauggagcgccagggcaagaccccccucggccucgucgaccucuucgucuucuccaccuccuucuaccucaucuccaucuuccuccaccucgucaagauccccacccaccgccacgucgucggcaaguccugccccaagccccaccgccucaaccacaugggcaucugcuccugcggccucuacaagcagcccggcguccccgucaaguggaagcgcuga

SEQ ID NO: 4789 - RNA, 1476 nt, Artificial Sequence
  derived and/or modified protein sequence (opt2) from LASV(G2903-SLE-2012;Clade IV)__AIT17332__GPCstabilized
augggccagaucgucaccuucuuccaggaggucccccacgucaucgaggaggucaugaacaucguccucaucgcccucuccauccucgccguccucaagggccucuacaaccucgccaccugcggccucgucggccucgucaccuuccuccuccucugcggccgcuccugcaccaccucccucuacaagggcgucuacgagcuccagacccucgagcucaacauggagacccucaacaugaccaugccccucuccugcaccaagaacaacucccaccacuacauccgcgucggcaacgagaccggccucgagcucacccucaccaacaccuccaucaucaaccacaaguucugcaaccucuccgacgcccacaagaagaaccucuacgaccacgcccucauguccaucaucuccaccuuccaccucuccauccccaacuucaaccaguacgaggccauguccugcgacuucaacggcggcaagaucuccguccaguacaaccucucccacuccuacgccgucgacgccgccaaccacugcggcaccgucgccaacggcguccuccagaccuucaugcgcauggccuggggcggcuccuacaucgcccucgacuccggcugcggccgcugggacugcaucaugaccuccuaccaguaccucaucauccagaacaccaccugggaggaccacugccucuucucccgccccucccccaucggcuaccucggccuccucucccagcgcacccgcgacaucuacaucucccgccgccgccggggcaccuucaccuggacccucuccgacuccgagggccgcgacacccccggcggcuacugccucacccgcuggaugcucaucgaggccgagcucaagugcuucggcaacaccgccgucgccaagugcaacgagaagcacgacgaggaguucugcgacaugcuccgccucuucgacuucaacaagcaggccauccagcgccucaaggcccccgcccagauguccauccagcucaucaacaaggccgucaacgcccucaucaacgaccagcucaucaugaagaaccaccuccgcgacaucaugugcauccccuacugcaacuacuccaaguacugguaccucaaccacaccaccaccggccgcaccucccucccccgcugcuggcucgucuccaacggcuccuaccucaacgagacccacuucuccgacgacaucgagcagcaggccgacaacaugaucaccgagaugcuccagaaggaguacauggagcgccagggcaagaccccccucggccucgucgaccucuucgucuucuccaccuccuucuaccucaucuccaucuuccuccaccucgucaagauccccacccaccgccacaucgucggcaaguccugccccaagccccaccgccucaaccacaugggcaucugcuccugcggccucuacaagcagcccggcguccccgucaaguggaagcgcuga

SEQ ID NO: 4790 - RNA, 1476 nt, Artificial Sequence
  derived and/or modified protein sequence (opt2) from LASV(G2944-SLE-2012;Clade IV)__AIT17340__GPCstabilized
augggccagaucgucaccuucuuccaggaggucccccacgucaucgaggaggucaugaacaucguccucaucgcccucuccauccucgccguccucaagggccucuacaacuucgccaccugcggccucgucggccucgucaccuuccuccuccucugcggccgcuccugcaccaccucccucuacaagggcgucuacgagcuccagacccucgagcucaacauggagacccucaacaugaccaugccccucuccugcaccaagaacaacucccaccacuacaucauggucggcaacgagaccggccucgagcucacccucaccaacaucuccaucaucaaccacaaguucugcaaccucuccgacgcccacaagaagaaccucuacgaccacgcccucauguccaucaucuccaccuuccaccucuccauccccaacuucaaccaguacgaggccauguccugcgacuucaacggcggcaagaucuccguccaguacaaccucucccacuccuacgccggcgacgccgccaaccacugcggcaccgucgccaacggcguccuccagaccuucaugcgcauggccuggggcggcuccuacaucgcccucgacuccggcugcggcgagugggacugcaucaugaccuccuaccaguaccucaucauccagaacaccaccugggaggaccacugccaguucucccgccccucccccaucggcuaccucggccuccucucccagcgcacccgcgacaucuacaucucccgccgccgccggggcaccuucaccuggacccucuccgacuccgagggcaaggacacccccggcggcuacugccucacccgcuggaugcucaucgaggccgagcucaagugcuucggcaacaccgccgucgccaagugcaacgagaagcacgacgaggaguucugcgacaugcuccgccucuucgacuucaacaagcaggccauccagcgccucaaggcccccgcccagauguccauccagcucaucaacaaggccgucaacgcccucaucaacgaccagcucaucaugaagaaccaccuccgcgacaucaugugcauccccuacugcaacuacuccaaguacugguaccucaaccacaccaccaccggcaagaccucccuccccaagugcuggcucgucuccaacggcuccuaccucaacgagacccacuucuccgacgacaucgagcagcaggccgacaacaugaucaccgagaugcuccagaaggaguacauggagcgccagggcaagaccccccucggccucgucgaccucuucgucuucuccaccuccuucuaccucaucuccaucuuccuccaccucgucaagauccccacccaccgccacaucgucggcaagcccugcccccgcccccaccgccucaaccacaugggcaucugcuccugcggccucuacaagcagcccggcguccccgucaaguggaagcgcuga

SEQ ID NO: 4791 - RNA, 1476 nt, Artificial Sequence
  derived and/or modified protein sequence (opt2) from LASV(G3010-SLE-2013;Clade IV)__AIT17344__GPCstabilized
augggccagaucgucaccuucuuccaggaggucccccacgucaucgaggaggucaugaacaucguccucaucgcccucuccauccucgccguccucaagggccucuacaacuucgccaccugcggccucgucggccucgucaccuuccuccuccucugcggccgcuccugcaccaccucccucuacaagggcgucuacgagcuccagacccucgagcucaacauggagacccucaacaugaccaugccccucuccugcaccaagaacaacucccaccacuacaucauggucggcaacgagaccggccucgagcucacccucaccaacaccuccaucaucaaccacaaguucugcaaccucuccgacgcccacaagaagaaccucuacaaccacgcccucauguccaucaucuccaccuuccaccucuccauccccaacuucaaccaguacgaggccauguccugcgacuucaacggcggcaagaucuccguccaguacaaccucucccacuccuacgccggcgacgccgccucccacugcggcaccgucgccaacggcguccuccagaccuucaugcgcauggccuggggcggcuccuacaucgcccucgacuccggcugcggcaagugggacugcaucaugaccuccuaccaguaccucaucauccagaacaccaccugggaggaccacugccaguucucccgccccucccccaucggcuaccucggccuccucucccagcgcacccgcgacaucuacaucucccgccgccgccggggcaccuucaccuggacccucuccgacuccgagggcaaggacacccccggcggcuacugccucacccgcuggaugcucaucgaggccgagcucaagugcuucggcaacaccgccgucgccaagugcaacgagaagcacgacgaggaguucugcgacaugcuccgccucuucgacuucaacaagcaggccauccagcgccucaagacccccgcccagauguccauccagcucaucaacaaggccgucaacgcccucaucaacgaccagcucaucaugaagaaccaccuccgcgacaucaugugcauccccuacugcaacuacuccaaguacugguaccucaaccacaccaccaccggcaagaccucccuccccaagugcuggcucgucuccaacggcuccuaccucaacgagacccacuucuccgacgacaucgagcagcaggccgacaacaugaucaccgagaugcuccagaaggaguacauggagcgccagggcaagaccccccucggccucgucgaccucuucgucuucuccaccuccuucuaccucaucuccaucuuccuccaccucgucaagauccccacccaccgccacaucgucggcaaguccugccccaagccccaccgccucaaccacaugggcaucugcuccugcggccucuacaagcagcccggcguccccguccgcuggaagcgcuga

SEQ ID NO: 4792 - RNA, 1476 nt, Artificial Sequence
  derived and/or modified protein sequence (opt2) from LASV(G3016-SLE-2013;Clade IV)__AIT17348__GPCstabilized
augggccagaucgucaccuucuuccaggaggucccccacgucaucgaggaggucaugaacaucguccucaucgcccucuccauccucgccguccucaagggccucuacaacaucgccaccugcggccucaucggccucgucaccuuccuccuccucugcggccgcuccugcaccaccucccucuacaagggcgucuacgagcuccagacccucgagcucaacauggagacccucaacaugaccaugccccucuccugcaccaagaacaacucccaccacuacaucauggucggcaacgagaccggccucgagcucacccucaccaacaccuccaucaucaaccacaaguucugcaaccucuccgacgcccacaagaagaaccucuacgaccacgcccucauguccaucaucuccaccuuccaccucuccauccccaacuucaaccaguacgaggccauguccugcgacuucaacggcggcaagaucuccguccaguacaaccucucccacuccuacgccggcgacgccgccaaccacugcggcaccgucgccaacggcguccuccagaccuucaugcgcauggccuggggcggcuccuacaucgcccucgacuccggcugcggccgcugggacugcaucaugaccuccuaccaguaccucaucauccagaacaccaccugggaggaccacugccaguucucccgccccucccccaucggcuaccucggccuccucucccagcgcacccgcgacaucuacaucucccgccgccgccggggcaccuucaccuggacccucuccgacuccgagggcaacgacacccccggcggcuacugccucacccgcuggaugcucaucgaggccgagcucaagugcuucggcaacaccgccgucgccaagugcaacgagaagcacgacgaggaguucugcgacaugcuccgccucuucgacuucaacaagcaggccauccagcgccucaaggcccccgcccagauguccauccagcucaucaacaaggccgucaacgcccucaucaacgaccagcucaucaugaagaaccaccuccgcgacaucaugugcauccccuacugcaacuacuccaaguacugguaccucaaccacaccaccaccggcaagaccucccuccccaagugcuggcucgucuccaacggcuccuaccucaacgagacccacuucuccgacgacaucgagcagcaggccgacaacaugaucaccgagaugcuccagaaggaguacauggagcgccagggcaagaccccccucggccucgucgaccucuucgucuucuccaccuccuucuaccucaucuccaucuuccuccaccucgucaagauccccacccaccgccacaucgucggcaagcccugccccaagccccaccgccucaaccacaugggcaucugcuccugcggccucuacaagcagcccggcguccccgucaaguggaagcgcuga

SEQ ID NO: 4793 - RNA, 1476 nt, Artificial Sequence
  derived and/or modified protein sequence (opt2) from LASV(G3034-SLE-2013;Clade IV)__AIT17350__GPCstabilized
augggccagaucgucaccuucuuccaggaggucccccacgucaucgaggaggucaugaacaucguccucaucgcccucuccauccucgccguccucaagggccucuacaacgucgccaccugcggccucaucggccucgucaccuuccuccuccucugcggccgcuccugcaccaccacccucuacaagggcgucuacgagcuccaggcccucgagcucaacauggagacccucaacaugaccaugccccucuccugcaccaagaacaacucccaccacuacaucauggucggcaacgagaccggccucgagcucacccucaccaacaccuccaucaucgaccacaaguucugcaaccucuccgacgcccacaagaagaaccucuacgaccacgcccucauguccaucaucuccaccuuccaccucuccauccccaacuucaaccaguacgaggccauguccugcgacuucaacggcggcaagaucuccguccaguacaaccucucccacuccuacgccggcgacgccgccaagcacugcggcaccgucgccaacggcguccuccagaccuucaugcgcauggccuggggcggcuccuacaucgcccucgacuccggcugcaacggcugggacugcgucaugaccuccuaccaguaccucaucauccagaacaccaccugggaggaccacugccaguucucccgccccucccccaucggcuaccucggccuccucucccagcgcacccgcgacaucuacaucucccgccgccgccggggcaccuucaccuggacccucuccgacuccgagggcaaggacacccccggcggcuacugccucacccgcuggaugcucaucgaggccgagcucaagugcuucggcaacaccgccgucgccaagugcaacgagaagcacgacgaggaguucugcgacaugcuccgccucuucgacuucaacaagcaggccauccagcgccucaagacccccgcccagauguccauccagcucaucaacaaggccgucaacgcccucaucaacgaccagcucaucaugaagaaccaccuccgcgacaucaugugcauccccuacugcaacuacuccaaguacugguaccucaaccacaccgucaccggcaagaccucccucccccgcugcuggcucgucuccaacggcuccuaccucaacgagacccacuucuccgacgacaucgagcagcaggccgacaacaugaucaccgagaugcuccagaaggaguacaucgagcgccagggcaagaccccccucggccucgucgaccucuucgucuucuccaccuccuucuaccucaucuccaucuuccuccaccucgucaagauccccacccaccgccacaucaucggcaagcccugccccaagccccaccgccucaaccacaugggcaucugcuccugcggccucuacaagcagcccggcguccccguccgcuggaagcgcuga

SEQ ID NO: 4794 - RNA, 1476 nt, Artificial Sequence
  derived and/or modified protein sequence (opt2) from LASV(G3101-SLE-2013;Clade IV)__AIT17354__GPCstabilized
augggccagaucgucaccuucuuccaggaggucccccacgucaucgaggaggucaugaacaucguccucaucgcccucuccauccucgccguccucaagggccucuacaacuucgccaccugcggccucgucggccucgucaccuuccuccuccucugcggccgcuccugcaccaccucccucuacaagggcgucuacgagcuccagacccucgagcucaacauggagacccucaacaugaccaugccccucuccugcaccaagaacaacucccaccacuacaucauggucggcaacgagaccggccucgagcucacccucaccaacaucuccaucaucaaccacaaguucugcaaccucuccgacgcccacaagaagaaccucuacgaccacgcccucauguccaucaucuccaccuuccaccucuccauccccaacuucaaccaguacgaggccauguccugcgacuucaacggcggcaagaucuccguccaguacaaccucucccacuccuacgccggcgacgccgccaaccacugcggcaccgucgccaacggcguccuccagaccuucaugcgcauggccuggggcggcuccuacaucgcccucgacuccggcugcggcggcugggacugcaucaugaccuccuaccaguaccucaucauccagaacaccaccugggaggaccacugccaguucucccgccccucccccaucggcuaccucggccuccucucccagcgcacccgcgacaucuacaucucccgccgccgccggggcaccuucaccuggacccucuccgacuccgagggcaaggacacccccggcggcuacugccucacccgcuggaugcucaucgaggccgagcucaagugcuucggcaacaccgccgucgccaagugcaacgagaagcacgacgaggaguucugcgacaugcuccgccucuucgacuucaacaagcaggccauccagcgccucaaggcccccgcccagauguccauccagcucaucaacaaggccgucaacgcccucaucaacgaccagcucaucaugaagaaccaccuccgcgacaucaugugcauccccuacugcaacuacuccaaguacugguaccucaaccacaccaccaccggcaagaccucccuccccaagugcuggcucgucuccaacggcuccuaccucaacgagacccacuucuccgacgacaucgagcagcaggccgacaacaugaucaccgagaugcuccagaaggaguacauggagcgccagggcaagaccccccucggccucgucgaccucuucgucuucuccaccuccuucuaccucaucuccaucuuccuccaccucgucaagauccccacccaccgccacaucgucggcaagcccugcccccgcccccaccgccucaaccacaugggcaucugcuccugcggccucuacaagcagcccggcguccccgucaaguggaagcgcuga

SEQ ID NO: 4795 - RNA, 1476 nt, Artificial Sequence
  derived and/or modified protein sequence (opt2) from LASV(G3110-SLE-2013;Clade IV)__AIT17360__GPCstabilized
augggccagaucgucaccuucuuccaggaggucccccacgucaucgaggaggucaugaacaucguccucaucgcccucuccauccucgccguccucaagggccucuacaacuucgccaccugcggccucgucggccucgucaccuuccuccuccucugcggccgcuccugcaccaccucccucuacaagggcgucuacgagcuccagacccucgagcucaacauggagacccucaacaugaccaugccccucuccugcaccaagaacaacucccaccacuacauccgcgucggcaacgagaccggccucgagcucacccucaccaacaccuccaucaucaaccaccgcuucugcaaccucuccgacgcccacaagaagaaccucuacgaccacgcccucauguccaucaucuccaccuuccaccucuccauccccaacuucaaccaguacgaggccauguccugcgacuucaacggcggcaagaucuccguccaguacaaccucucccacuccuacgccggcgacgccgccaaccacugcggcaccgucgccaacggcguccuccagaccuucaugcgcauggccuggggcggcuccuacaucgcccucgacuccggcugcggcaagugggacugcaucaugaccuccuaccaguaccucaucauccagaacaccaccugggacgaccacugccaguucucccgccccucccccaucggcuaccucggccuccucucccagcgcacccgcgacaucuacaucucccgccgccgccggggcaccuucaccuggacccucuccgacuccgagggcaaggacacccccggcggcuacugccucacccgcuggaugcucaucgaggccgagcucaagugcuucggcaacaccgccgucgccaagugcaacgagaagcacgacgaggaguucugcgacaugcuccgccucuucgacuucaacaagcaggccauccgccgccucaaggcccccgcccagauguccauccagcucaucaacaaggccgucaacgcccucaucaacgaccagcucaucaugaagaaccaccuccgcgacaucaugugcauccccuacugcaacuacuccaaguacugguaccucaaccacaccaccaccggcaagaccucccucccccgcugcuggcucgucuccaacggcuccuaccucaacgagacccacuucuccgacgacaucgagcagcaggccgacaacaugaucaccgagaugcuccagaaggaguacauggagcgccagggcaagaccccccucggccucgucgaccucuucgucuucuccaccuccuucuaccucaucuccaucuuccuccaccucgucaagauccccacccaccgccacaucgucggcaaguccugccccaagccccaccgccucaaccacaugggcaucugcuccugcggcuucuacaagcagcccggcguccccgucaaguggaagcgcuga

SEQ ID NO: 4796 - RNA, 1476 nt, Artificial Sequence
  derived and/or modified protein sequence (opt2) from LASV(G3148-SLE-2013;Clade IV)__AIT17364__GPCstabilized
augggccagaucgucaccuucuuccaggaggucccccacgucaucgaggaggucaugaacaucguccucaucgcccucuccauccucgccguccucaagggccucuacaacuucgccaccugcggccucgucggccucgucaccuuccuccuccucugcggccgcuccugcaccaccucccucuacaagggcgucuacgagcuccagacccucgagcucaacauggagacccucaacaugaccaugccccucuccugcaccaagaacaacucccaccacuacaucauggucggcaacgagaccggccucgagcucacccucaccaacaccuccaucaucaaccacaaguucugcaaccucuccgacgcccacaagaagaaccucuacgaccacgcccucauguccaucaucuccaccuuccaccucuccauccccaacuucaaccaguacgaggccauguccugcgacuucaacggcggcaagaucuccguccaguacaaccucucccacuccuacgccggcgacgccgccaaccacugcggcaccgucgccaacggcguccuccagaccuucaugcgcauggccuggggcggcuccuacaucgcccucgacuccggcugcgaccgcugggacugcaucaugaccuccuaccaguaccucaucauccagaacaccaccugggaggaccacugccaguucucccgccccucccccaucggcuaccucggccuccucucccagcgcacccgcgacaucuacaucucccgccgccgccggggcaccuucaccuggacccucuccgacuccgagggcaaggacacccccggcggcuacugccucacccgcuggaugcucaucgaggccgagcucaagugcuucggcaacaccgccgucgccaagugcaacgagaagcacgacgaggaguucugcgacaugcuccgccucuucgacuucaacaagcaggccauccagcgccucaaggcccccgcccagauguccauccagcucaucaacaaggccgucaacgcccucaucaacgaccagcucaucaugaagaaccaccuccgcgacaucaugugcauccccuacugcaacuacuccaaguacugguaccucaaccacaccaccaccggcaagaccucccuccccaagugcuggcucgucuccaacggcuccuaccucaacgagacccacuucuccgacgacaucgagcagcaggccgacaacaugaucaccgagaugcuccagaaggaguacaucgagcgccagggcaagaccccccucggccucgucgaccucuucgucuucuccaccuccuucuaccucaucuccaucuuccuccaccucgucaagauccccacccaccgccacaucgucggcaagcccugccccaagccccaccgccucaaccacaugggcaucugcuccugcggccucuacaagcagcccggcgucuccgucaaguggaagcgcuga

SEQ ID NO: 4797 - RNA, 1476 nt, Artificial Sequence
  derived and/or modified protein sequence (opt2) from LASV(G3151-SLE-2013;Clade IV)__AIT17368__GPCstabilized
augggccagaucgucaccuucuuccaggaggucccccacgucaucgaggaggucaugaacaucguccucaucgcccucuccauccucgccguccucaagggccucuacaacuucgccaccugcggccucgucggccucgucaccuuccuccuccucugcggccgcuccugcaccaccucccucuacaagggcgucuacgagcuccagacccucgagcucaacauggagacccucaacaugaccaugccccucuccugcaccaagaacaacucccaccacuacaucauggucggcaacgagaccggccucgagcucacccucaccaacaccuccaucaucaaccacaaguucugcaaccucuccgacgcccacaagaagaaccucuacgaccacgcccucauguccaucaucuccaccuuccaccucuccauccccaacuucaaccaguucgaggccauguccugcgacuucaacggcggcaagaucuccguccaguacaaccucucccacuccuacgccggcgacgccgccaaccacugcggcaccgucgccaacggcguccuccagaccuucaugcgcauggccuggggcggcuccuacaucgcccucgacuccggcugcuccaagugggacugcaucaugaccuccuaccaguaccucaucauccagaacaccaccugggacgaccacugccaguucucccgccccucccccaucggcuaccucggccuccucucccagcgcacccgcgacaucuacaucucccgccgccgccggggcaccuucaccuggacccucuccgacuccgagggcaaggacacccccggcggcuacugccucacccgcuggaugcucaucgaggccgagcucaagugcuucggcaacaccgccgucgccaagugcaacgagaagcacgacgaggaguucugcgacaugcuccgccucuucgacuucaacaagcaggccauccagcgccucaaggcccccgcccagauguccauccagcucaucaacaaggccgucaacgcccucaucaacgaccagcucaucaugaagaaccaccuccgcgacaucaugugcauccccuacugcaacuacuccaaguacugguaccucaaccacaccaccaccggcaagaccucccuccccaagugcuggcucgucuccaacggcuccuaccucaacgagacccacuucuccgacgacaucgagcagcaggccgacaacaugaucaccgagaugcuccagaaggaguacauggagcgccagggcaagaccccccucggccucgucgaccucuucgucuucuccaccuccuucuaccucaucuccaucuuccuccaccucgucaagauccccacccaccgccacaucgucggcaaguccugccccaagccccaccgccucaacuacaugggcaucugcuccugcggcuucuacaagcagcccggcguccccgucaaguggaagcgcuga

SEQ ID NO: 4798 - RNA, 1476 nt, Artificial Sequence
  derived and/or modified protein sequence (opt2) from LASV(G3157-SLE-2013;Clade IV)__AIT17370__GPCstabilized
augggccagaucgucaccuucuuccaggaggucccccacgucaucgaggaggucaugaacaucguccucaucgcccucuccauccucgccguccucaagggccucuacaacuucgccaccugcggccucgucggccucgucaccuuccuccuccucugcggccgcuccugcaccaccucccucuacaagggcgucuacgagcuccagacccucgagcucaacauggagacccucaacaugaccaugccccucuccugcaccaagaacaacucccaccacuacaucauggucggcaacgagaccggccucgagcucacccucaccaacaccuccaucaucaaccacaaguucugcaaccucuccgacgcccacaagaagaaccucuacgaccacgcccucauguccaucaucuccaccuuccaccucuccauccccaacuucaaccaguacgaggccauguccugcgacuucaacggcggcaagaucuccguccaguacaaccucucccacuccuacgccggcgacgccgccaaccacugcggcaccgucgccaacggcguccuccagaccuucaugcgcauggccuggggcggcuccuacaucgcccucgacuccggcugcgaccgcugggacugcaucaugaccuccuaccaguaccucaucauccagaacaccaccugggaggaccacugccaguucucccgccccucccccaucggcuaccucggccuccucucccagcgcacccgcgacaucuacaucucccgccgccgccggggcaccuucaccuggacccucuccgacuccgagggcaaggacacccccggcggcuacugccucacccgcuggaugcucaucgaggccgagcucaagugcuucggcaacaccgccgucgccaagugcaacgagaagcacgacgaggaguucugcgacaugcuccgccucuucgacuucaacaagcaggccauccagcgccucaaggcccccgcccagauguccauccagcucaucaacaaggccgucaacgcccucaucaacgaccagcucaucaugaagaaccaccuccgcgacaucaugugcauccccuacugcaacuacuccaaguacugguaccucaaccacaccaccaccggcaagaccucccuccccaagugcuggcucgucuccaacggcuccuaccucaacgagacccacuucuccgacgacaucgagcagcaggccgacaacaugaucaccgagaugcuccagaaggaguacauggagcgccagggcaagaccccccucggccucgucgaccucuucgucuucuccaccuccuucuaccucaucuccaucuuccuccaccucgucaagauccccacccaccgccacaucgucggcaagcccugccccaagccccaccgccucaaccacaugggcaucugcuccugcggccucuacaagcagcccggcgucuccgucaaguggaagcgcuga

SEQ ID NO: 4799 - RNA, 1476 nt, Artificial Sequence
  derived and/or modified protein sequence (opt2) from LASV(G3206-SLE-2013;Clade IV)__AIT17378__GPCstabilized
augggccagaucgucaccuucuuccaggaggucccccacgucaucgaggaggucaugaacaucguccucaucgcccucuccauccucgccguccucaagggccucuacaaccucgccaccugcggccucgucggccucgucaccuuccuccuccucugcggccgcuccugcaccaccucccucuacaagggcgucuacgagcuccagacccucgagcucaacauggagacccucaacaugaccaugccccucuccugcaccaagaacaacucccaccacuacaucauggucggcaacgagaccggccucgagcucacccucaccaacaccuccaucaucaaccacaaguucugcaaccucuccgacgcccacaagaagaaccucuacgaccacacccucauguccaucaucuccaccuuccaccucuccauccccaacuucaaccaguacgaggccauguccugcgacuucaacggcggcaagaucuccguccaguacaaccucucccacuccuacgccgucgacgccgccaaccacugcggcaccgucgccaacggcguccuccagaccuucaugcgcauggccuggggcggcuccuacaucgcccucgacuccggcugcuccggcugggacugcaucaugaccuccuaccaguaccucgucauccagaacaccaccugggaggaccacugccaguucucccgccccucccccaucggcuaccucggccuccucucccagcgcacccgcgacaucuacaucucccgccgccgccggggcaccuucaccuggacccucuccgacuccgagggcaagaacacccccggcggcuacugccucacccgcuggaugcucaucgaggccgagcucaagugcuucggcaacaccgccgucgccaagugcaacgagaagcacgacgaggaguucugcgacaugcuccgccucuucgacuucaacaagcaggccauccagcgccucaaggcccccgcccagauguccauccagcucaucaacaaggccgucaacgcccucaucaacgaccagcucaucaugaagaaccaccuccgcgacaucaugugcauccccuacugcaacuacuccaaguacugguaccucaaccacaccaccaccggccgcaccucccucccccgcugcuggcucgucuccaacggcuccuaccucaacgagacccacuucuccgacgacaucgagcagcaggccgacaacaugaucaccgagaugcuccagaaggaguacauggagcgccagggcaagaccccccucggccucgucgaccucuucgucuucuccaccuccuucuaccucaucuccaucuuccuccaccucgucaagauccccacccaccgccacaucgucggcaaguccugccccaagccccaccgccucaaccacaugggcaucugcuccugcggcuucuacaagcagcccggcguccccgucaaguggaagcgcuga

SEQ ID NO: 4800 - RNA, 1476 nt, Artificial Sequence
  derived and/or modified protein sequence (opt2) from LASV(G3234-SLE-2013;Clade IV)__AIT17388__GPCstabilized
augggccagaucgucaccuucuuccaggaggucccccacgucaucgaggaggucaugaacaucguccucaucgcccucuccauccucgccguccucaagggccucuacaacgucgccaccugcggccucaucggccucgucaccuuccuccuccucugcggccgcuccugcaccaccacccucuacaagggcgucuacgagcuccaggcccucgagcucaacauggagacccucaacaugaccaugccccucuccugcaccaagaacaacucccaccacuacauccgcgucggcaacgagaccggccucgagcucacccucaccaacaccuccaucaucaaccacaaguucugcaaccucuccgacgcccacaagaagaaccucuacgaccacgcccucauguccaucaucuccaccuuccaccucuccauccccaacuucaaccaguacgaggccauguccugcgacuucaacggcggcaucaucuccguccaguacaaccucucccacuccuacgccggcgacgccgccaaccacugcggcaccgucgccaacggcguccuccagaccuucaugcgcauggccuggggcggcuccuacaucgcccucgacuccggcugcaacggcugggacugcaucaugaccuccuaccaguaccucaucauccagaacaccaccugggacgaccacugccaguucucccgccccucccccaucggcuaccucggccuccucucccagcgcacccgcgacaucuacaucucccgccgccgccggggcaccuucaccuggacccucuccgacuccgagggcaaggacacccccggcggcuacugccucacccgcuggaugcucaucgaggccgagcucaagugcuucggcaacaccgccgucgccaagugcaacgagaagcacgacgaggaguucugcgacaugcuccgccucuucgacuucaacaagcaggccauccagcgccucaagacccccgcccagaugaacauccagcucaucaacaaggccgucaacgcccucaucaacgaccagcucaucaugaagaaccaccuccgcgacaucaugugcauccccuacugcaacuacuccaaguacugguaccucaacaacaccgccaccggcaagaccucccucccccgcugcuggcucgucuccaacggcuccuaccucaacgagacccacuucuccgacgacaucgagcagcaggccgacaacaugaucaccgagaugcuccagaaggaguacauggagcgccagggcaagaccccccucggccucgucgaccucuucgucuucuccaccuccuucuaccucaucuccaucuuccuccaccucgucaagauccccacccaccgccacaucgucggcaagcccugccccaagccccaccgccucaaccacaucggcaucugcuccugcggccucuacaagcagcccggcguccccgucaaguggaagcgcuga

SEQ ID NO: 4801 - RNA, 1476 nt, Artificial Sequence
  derived and/or modified protein sequence (opt2) from LASV(G502-SLE-2009;Clade IV)__AIT17126__GPCstabilized
augggccagaucgucaccuucuuccaggaggucccccacgucaucgaggaggucaugaacaucguccucaucgcccucuccauccucgccguccucaagggccucuacaacuucgccaccugcggccucgucggccuccucaccuuccuccuccucugcggccgcuccugcaccaccggccucuacaagggcgucuacgagcuccagacccucgagcucaacauggagacccucaacaugaccaugccccucuccugcaccaagaacaacucccaccacuacaucauggucggcaacgagaccggccucgagcucacccucaccaacaccuccaucaucaaccacaaguucugcaaccucuccgacgcccacaagaagaaccucuacgaccacgcccucauguccaucaucuccaccuuccaccucuccauccccaacuucaaccaguacgaggccauguccugcgacuucaacggcggcaagaucuccguccaguacaaccucucccacuccuacgccggcgacgccgccgaccacugcggcaccgucgccaacggcguccuccagaccuucaugcgcauggccuggggcggcuccuacaucgcccucgacuccggcugcggccgcugggacugcaucaugaccuccuaccaguaccucaucauccagaacaccaccugggaggaccacugccaguucucccgccccucccccaucggcuaccucggccuccucucccagcgcacccgcgacaucuacaucucccgccgccgccggggcaccuucaccuggacccucuccgacuccgagggcaaggacacccccggcggcuacugccucacccgcuggaugcucaucgaggccgagcucaagugcuucggcaacaccgccgucgccaagugcaacgagaagcacgacgaggaguucugcgacaugcuccgccucuucgacuucaacaagcaggccauccagcgccucaaggcccccgcccagauguccauccagcucaucaacaaggccgucaacgcccucaucaacgaccagcucgucaugaagaaccaccuccgcgacaucaugugcauccccuacugcaacuacucccgcuacugguaccucaaccacaccaccaccggccgcaccucccuccccaagugcuggcucgucuccaacggcuccuaccucaacgagacccacuucuccgacgacaucgagcagcaggccgacaacaugaucaccgagaugcuccagaaggaguacauggagcgccagggcaagaccccccucggccucgucgaccucuucgucuucuccaccuccuucuaccucaucuccaucuuccuccaccucgucaagauccccacccaccgccacaucgucggcaaguccugccccaagccccaccgccucaaccacaugggcaucugcuccugcggccucuacaagcagcccggcguccccgucaaguggaagcgcuga

SEQ ID NO: 4802 - RNA, 1476 nt, Artificial Sequence
  derived and/or modified protein sequence (opt2) from LASV(G503-SLE-2009;Clade IV)__AIT17130__GPCstabilized
augggccagaucgucaccuucuuccaggaggucccccacgucaucgaggaggucaugaacaucguccucaucgcccucuccauccucgccguccucaagggccucuacaacuucgccaccugcggcuucgucggccucgucaccuuccuccuccucugcggccgcuccugcaccaccucccucuacaagggcgucuacgagcuccagacccucgagcucaacauggagacccucaacaugaccaugccccucuccugcaccaagaacaacucccaccacuacauccgcgucggcaacgacaccggccucgagcucacccucaccaacaccuccaucaucaaccacaaguucugcaaccucuccgacgcccacaagaagaaccucuacgaccacgcccucauguccaucaucuccaccuuccaccucuccauccccaacuucaaccaguacgaggccauguccugcgacuucaacggcggcaagaucuccguccaguacaaccucucccacuccuacgccgucgacgccgccucccacugcggcaccaucgccaacggcguccuccagaccuucaugcgcauggccuggggcggcuccuacaucgcccucgacuccggcugcgaccgcugggacugcaucaugaccuccuaccaguaccucaucauccagaacaccaccugggaggaccacugccaguucucccgccccucccccaucggcuaccucggccuccucucccagcgcacccgcgacaucuacaucucccgccgccgccggggcaccuucaccuggacccucuccgacuccgagggcaaggacacccccggcggcuacugccucacccgcuggaugcucaucgaggccgagcucaagugcuucggcaacaccgccgucgccaagugcaacgagaagcacgacgaggaguucugcgacaugcuccgccucuucgacuucaacaagcaggccauccagcgccucaaggcccccgcccagauguccauccagcucaucaacaaggccgucaacgcccucaucaacgaccagcucaucaugaagaaccaccuccgcgacaucaugugcauccccuacugcaacuacuccaaguacugguaccucaaccacaccaccaccggcaagaccucccuccccaagugcuggcucgucuccaacggcuccuaccucaacgagacccacuucuccgacgacaucgagcagcaggccgacaacaugaucaccgagaugcuccagaaggaguacauggagcgccagggcaagaccccccucggccucgucgaccucuucgucuucuccaccuccuucuaccucaucuccaucuuccuccaccucgucaagauccccacccaccgccacaucgucggcaaguccugccccaagccccaccgccucaaccacaugggcaucugcuccugcggccucuacaagcagcccggcguccccgucaaguggaagcgcuga

SEQ ID NO: 4803 - RNA, 1476 nt, Artificial Sequence
  derived and/or modified protein sequence (opt2) from LASV(G610-SLE-2009;Clade IV)__AIT17134__GPCstabilized
augggccagaucgucaccuucuuccaggaggucccccacgucaucgaggaggucaugaacaucguccucaucgcccucuccauccucgccguccucaagggccucuacaacuucgccaccugcggccucgucggccucgucaccuuccuccuccucugcggccgcuccugcaccaccucccucuacaagggcgucuacgagcuccagacccucgagcucaacauggagacccucaacaugaccaugccccucuccugcaccaagaacaacucccaccacuacaucauggucggcaacgagaccggccucgagcucacccucaccaacaccuccaucaucaaccacaaguucugcaaccucuccgacgcccacaagaagaaccucuacgaccacgcccucauguccaucaucuccaccuuccaccucuccauccccaacuucaaccaguacgaggccauguccugcgacuucaacggcggcaagaucuccguccaguacaaccucucccacuccuacgccggcgacgccgccaaccacugcggcaccgucgccaacggcguccuccagaccuucaugcgcauggccuggggcggcuccuacaucgcccucgacuccggcugcggccgcugggacugcaucaugaccuccuaccaguaccucaucauccagaacaccaccugggaggaccacugccaguucucccgccccucccccaucggcuaccucggccuccucucccagcgcacccgcgacaucuacaucucccgccgccgccggggcaccuucaccuggacccucuccgacuccgagggcaaggacacccccggcggcuacugccucacccgcuggaugcucaucgaggccgagcucaagugcuucggcaacaccgccgucgccaagugcaacgagaagcacgacgaggaguucugcgacaugcuccgccucuucgacuucaacaagcaggccauccagcgccucaaggcccccgcccagauguccauccagcucaucaacaaggccgucaacgcccucaucaacgaccagcucaucaugaagaaccaccuccgcgacaucaugugcauccccuacugcaacuacuccaaguacugguaccucaaccacaccaccaccggcaagaccucccuccccaagugcuggcucgucuccaacggcuccuaccucaacgagacccacuucuccgacgacaucgagcagcaggccgacaacaugaucaccgagaugcuccagaaggaguacauggagcgccagggcaagaccccccucggccucgucgaccucuucgucuucuccaccuccuucuaccucaucuccaucuuccuccaccucgucaagauccccacccaccgccacaucgucggcaaguccugccccaagccccaccgccucaaccacaugggcaucugcuccugcggccucuacaagcagcccggcguccccgucaaguggaagcgcuga

SEQ ID NO: 4804 - RNA, 1476 nt, Artificial Sequence
  derived and/or modified protein sequence (opt2) from LASV(G636-SLE-2009;Clade IV)__AIT17138__GPCstabilized
augggccagaucgucaccuucuuccaggaggucccccacgucaucgaggaggucaugaacaucguccucaucgcccucuccauccucgccguccucaagggccucuacaaccucgccaccugcggccucgucggccucgucaccuuccuccuccucugcggccgcuccugcaccaccucccucuacaagggcgucuacgagcuccagacccucgagcucaacauggagacccucaacaugaccaugccccucuccugcaccaagaacaacucccaccacuacaucauggucggcaacgagaccggccucgagcucacccucaccaacaccucccucaucaaccacaaguucugcaaccucuccgacgcccacaagaagaaccucuacgaccacgcccucauguccaucaucuccaccuuccaccucuccauccccaacuucaaccaguacgaggccauguccugcgacuucaacggcggcaagaucuccguccaguacaaccucucccacuccuacgccgucgacgccgccucccacugcggcaccgucgccaacggcguccuccagaccuucaugcgcauggccuggggcggcuccuacaucgcccucgacuccggcugcggcggcugggacugcaucaugaccuccuaccaguaccucaucauccagaacaccaccugggaggaccacugccaguucucccgccccucccccaucggcuaccucggccuccucucccagcgcacccgcgacaucuacaucucccgccgccgccggggcaccuucaccuggacccucuccgacuccgagggcaaggacacccccggcggcuacugccucacccgcuggaugcucaucgaggccgagcucaagugcuucggcaacaccgccgucgccaagugcaacgagaagcacgacgaggaguucugcgacaugcuccgccucuucgacuucaacaagcaggccauccagcgccucaaggcccccgcccagauguccauccagcucaucaacaaggccgucaacgcccucaucaacgaccagcucaucaugaagaaccaccuccgcgacaucaugugcauccccuacugcaacuacuccaaguacugguaccucaaccacaccaccaccggccgcaccucccucccccgcugcuggcucgucuccaacggcuccuaccucaacgagacccacuucuccgacgacaucgagcagcaggccgacaacaugaucaccgagaugcuccagaaggaguacauggagcgccagggcaagaccccccucggccucgucgaccucuucgucuucuccaccuccuucuaccucaucuccaucuuccuccaccucgucaagauccccacccaccgccacaucgucggcaaguccugccccaagccccaccgccucaaccacaugggcaucugcuccugcggccucuacaagcagcccggcguccccgucaaguggaagcgcuga

SEQ ID NO: 4805 - RNA, 1476 nt, Artificial Sequence
  derived and/or modified protein sequence (opt2) from LASV(G692-SLE-2009;Clade IV)__AIT17146__GPCstabilized
augggccagaucgucaccuucuuccaggaggucccccacgucaucgaggaggucaugaacaucguccucaucgcccucuccauccucgccguccucaagggccucuacaaccucgccaccugcggccucgucggccucgucaccuuccuccuccucugcggccgcuccugcaccaccucccucuacaagggcgucuacgagcuccagacccucgagcucaacauggagacccucaacaugaccaugccccucuccugcaccaagaacaacucccaccacuacaucauggucggcaacgagaccggccucgagcucacccucaccaacaccuccaucaucaaccacaaguucugcaaccucuccgacgcccacaagaagaaccucuacgaccacgcccucauguccaucaucuccaccuuccaccucuccauccccaacuucaaccaguacgaggccauguccugcgacuucaacggcggcaagaucuccguccaguacaaccucucccacuccuacgccggcgacgccgccaaccacugcggcaccgucgccaacggcguccuccagaccuucaugcgcauggccuggggcggcuccuacaucgcccucgacuccggcugcggccgcugggacugcaucaugaccuccuaccaguaccucaucauccagaacaccaccugggaggaccacugcuccuucucccgccccucccccaucggcuaccucggccuccucucccagcgcacccgcgacaucuacaucucccgccgccgccggggcaccuucaccuggacccucuccgacuccgagggcaaggacacccccggcggcuacugccucacccgcuggaugcucaucgaggccgagcucaagugcuucggcaacaccgccgucgccaagugcaacgagaagcacgacgaggaguucugcgacaugcuccgccucuucgacuucaacaagcaggccauccagcgccucaaggcccccgcccagauguccauccagcucaucaacaaggccgucaacgcccucaucaacgaccagcucaucaugaagaaccaccuccgcgacaucaugugcauccccuacugcaacuacuccaaguacugguaccucaaccacaccaccaccggcaagaccucccuccccaagugcuggcucgucuccaacggcuccuaccucaacgagacccacuucuccgacgacaucgagcagcaggccgacaacaugaucaccgagaugcuccagaaggaguacauggagcgccagggcaagaccccccucggccucgucgaccucuucgucuucuccaccuccuucuaccucaucuccaucuuccuccaccucgucaagauccccacccaccgccacaucgucggcaaguccugccccaagccccaccgccucaaccacaugggcaucugcuccugcggcuucuacaagcagcccggcguccccgucaaguggaagcgcuga

SEQ ID NO: 4806 - RNA, 1476 nt, Artificial Sequence
  derived and/or modified protein sequence (opt2) from LASV(G733-SLE-2010;Clade IV)__AIT17154__GPCstabilized
augggccagaucgucaccuucuuccaggaggucccccacgucaucgaggaggucaugaacaucguccucaucgcccucuccauccucgccguccucaagggccucuacaacuucgccaccugcggcaucgucggccucgucuccuuccuccuccucugcggccgcuccugcaccaccucccucuacaagggcgucuacgagcuccagacccucgagcucaacauggagacccucaacaugaccaugccccucuccugcaccaagaacaacucccaccacuacaucauggucggcaacgagaccggccucgagcucacccucaccaacaccuccaucaucaaccacaaguucugcaaccucuccgacgcccacaagaagaaccucuacgaccacgcccucauguccaucaucuccaccuuccaccucuccauccccaacuucaaccaguacgaggccauguccugcgacuucaacggcggcaagaucuccguccaguacaaccucucccacuccuacgccggcgacgccgccaaccacugcggcaccaucgccaacggcguccuccagaccuucaugcgcauggccuggggcggcuccuacaucgcccucgacuccggcugcgaccgcugggacugcaucaugaccuccuaccaguaccucaucauccagaacaccaccugggaggaccacugccaguucucccgccccucccccaucggcuaccucggccuccucucccagcgcacccgcgacaucuacaucucccgccgccgccggggcaccuucaccuggacccucuccgacuccgagggcaaggacacccccggcggcuacugccucacccgcuggaugcucaucgaggccgagcucaagugcuucggcaacaccgccgucgccaagugcaacgagaagcacgacgaggaguucugcgacaugcuccgccucuucgacuucaacaagcaggccauccagcgccucaaggcccccgcccagauguccauccagcucaucaacaaggccgucaacgcccucaucaacgaccagcucaucaugaagaaccaccuccgcgacaucaugugcauccccuacugcaacuacuccaaguacugguaccucaaccacaccaccaccggcaagaccucccuccccaagugcuggcucgucuccaacggcuccuaccucaacgagacccacuucuccgacgacaucgagcagcaggccgacaacaugaucaccgagaugcuccagaaggaguacauggagcgccagggcaagaccccccucggccucgucgaccucuucgucuucuccaccuccuucuaccucaucuccaucuuccuccaccucgucaagauccccacccaccgccacgucgucggcaaguccugccccaagccccaccgccucaaccacaugggcaucugcuccugcggccucuacggccagcccggcguccccgucaaguggaagcgcuga

SEQ ID NO: 4807 - RNA, 1476 nt, Artificial Sequence
  derived and/or modified protein sequence (opt2) from LASV(G771-SLE-2010;Clade IV)__AIT17158__GPCstabilized
augggccagaucgucaccuucuuccaggaggucccccacgucaucgaggaggucaugaacaucguccucaucgcccucuccauccucgccguccucaagggccucuacaacuucgccaccugcggccucgucggccucgucaccuuccuccuccucugcggccgcuccugcaccaccucccucuacaagggcgucuacgagcuccagacccucgagcucaacauggagacccucaacaugaccaugccccucuccugcaccaagaacaacucccaccacuacaucauggucggcaacgagaccggccucgagcucacccucaccaacaccuccaucaucaaccacaaguucugcaaccucuccgacgcccacaagaagaaccucuacgaccacgcccucauguccaucaucuccaccuuccaccucuccauccccaacuucaaccaguacgaggccauguccugcgacuucaacggcggcaagaucuccguccaguacaaccucucccacuccuacgccggcgacgccgccaaccacugcggcaccgucgccaacggcguccuccagaccuucaugcgcauggccuggggcggcuccuacaucgcccucgacuccggcugcgaccgcugggacugcaucaugaccuccuaccaguaccucaucauccagaacaccaccugggaggaccacugccaguucucccgccccucccccaucggcuaccucggccuccucucccagcgcacccgcgacaucuacaucucccgccgccgccggggcaccuucaccuggacccucuccgacuccgagggcaaggacacccccggcggcuacugccucacccgcuggaugcucaucgaggccgagcucaagugcuucggcaacaccgccgucgccaagugcaacgagaagcacgacgaggaguucugcgacaugcuccgccucuucgacuucaacaagcaggccauccagcgccucaaggcccccgcccagauguccauccagcucaucaacaaggccgucaacgcccucaucaacgaccagcucaucaugaagaaccaccuccgcgacaucaugugcauccccuacugcaacuacuccaaguacugguaccucaaccacaccaccaccggcaagaccucccuccccaagugcuggcucgucuccaacggcuccuaccucaacgagacccacuucuccgacgacaucgagcagcaggccgacaacaugaucaccgagaugcuccagaaggaguacauggagcgccagggcaagaccccccucggccucgucgaccucuucgucuucuccaccuccuucuaccucaucuccaucuuccuccaccucgucaagauccccacccaccgccacaucgucggcaaguccugccccaagccccaccgccucaaccacaugggcaucugcuccugcggccucuacaagcagcccggcguccccgucaaguggaagcgcuga

SEQ ID NO: 4808 - RNA, 1476 nt, Artificial Sequence
  derived and/or modified protein sequence (opt2) from LASV(G808-SLE-2010;Clade IV)__AIT17164__GPCstabilized
augggccagaucgucaccuucuuccaggaggucccccacgucaucgaggaggucaugaacaucguccucaucgcccucuccauccucgccguccucaagggccucuacaacuucgccaccugcggccucgucggccucgucaccuuccuccuccucugcggccgcuccugcaccuccucccucuacaagggcgucuacgagcuccagacccucgagcucaacauggagacccucaacaugaccaugccccucuccugcaccaagaacaacucccaccacuacauccgcgucggcaacgagaccggccucgagcucacccucaccaacaccuccaucaucgaccacaaguucugcaaccucuccgacgcccacaagaagaaccucuacgaccacgcccucauguccaucaucuccaccuuccaccucuccauccccaacuucaaccaguacgaggccauguccugcgacuucaacggcggcaagaucuccguccaguacaaccucucccacuccuacgccggcgacgccgccaagcacugcggcaccgucgccaacggcguccuccagaccuucaugcgcauggccuggggcggcuccuacaucgcccucgacuccggcugcggcaacugggacugcaucaugaccuccuaccaguaccucaucauccagaacaccaccugggaggaccacugccaguucucccgccccucccccaucggcuaccucggccuccucucccagcgcacccgcgacaucuacaucucccgccgccgccggggcaccuucaccuggacccucuccgacuccgagggcaacgacgcccccggcggcuacugccucacccgcuggaugcucauccaggccgagcucaagugcuucggcaacaccgccgucgccaagugcaacgagaagcacgacgaggaguucugcgacaugcuccgccucuucgacuucaacaagcaggccauccagcgccucaaggcccccgcccagauguccauccagcucaucaacaaggccgucaacgcccucaucaacgaccagcucaucaugaagaaccaccuccgcgacaucaugugcauccccuacugcaacuacuccaaguacugguaccucaaccacaccaccaccggccgcaccucccucccccgcugcuggcucgucuccaacggcuccuaccucaacgagacccacuucuccgacgacaucgagcagcaggccgacaacaugaucaccgagaugcuccagaaggaguacauggagcgccagggcaagaccccccucggccucgucgaccucuucgucuucuccaccuccuucuaccucaucuccaucuuccuccaccucgucaagauccccacccaccgccacaucgucggcaaguccugccccaagccccaccgccucaaccacaugggcaucugcuccugcggccucuucaagcagcccggcguccccgucaaguggaagcgcuga

SEQ ID NO: 4809 - RNA, 1476 nt, Artificial Sequence
  derived and/or modified protein sequence (opt2) from LASV(Guinea Faranah;Clade IV)__AMZ00381__GPCstabilized
augggccagaucgucaccuucuuccaggaggucccccacgucaucgaggaggucaugaacaucguccucaucgcccucuccauccucgccguccucaagggccucuacaacgucgccaccugcggccucaucggccucaucgccuuccuccuccucugcggccgcuccugcaccuccacccucuacaagggcgucuacgagcuccaggcccucgagcucaacauggagacccucaacaugaccaugccccucuccugcaccaagaacaacucccaccacuacaucauggucggcaacgagaccggccucgagcucacccucaccaacaccuccaucaucaaccacaaguucugcaaccucuccgacgcccacaagaagaaccucuacaaccacgcccucauguccaucaucuccaccuuccaccucuccauccccaacuucaaccaguacgaggccauguccugcgacuucaacggcggcaagaucuccguccaguacaaccucucccacuccuacgccgucgacgccgccaaccacugcggcaccgucgccaacggcauccuccagaccuucaugcgcauggccuggggcggcuccuacaucgcccucgacuccggcugcggcggcugggacugcaucauguccuccuaccaguaccucgucauccagaacaccaccugggaggaccacugccaguucucccgccccucccccaucggcuaccucggccuccucucccagcgcacccgcgacaucuacaucucccgccgccgccggggcaccuucaccuggacccucuccgacuccgagggcaaggacacccccggcggcuacugccucacccgcuggaugcucaucgaggccgagcucaagugcuucggcaacaccgccgucgccaagugcaacgagaagcacgacgaggaguucugcgacaugcuccgccucuucgacuucaacaagcaggccauccagcgccucaaggcccccgcccagauguccauccagcucaucaacaaggccgucaacgcccucaucaacgaccagcucaucaugaagaaccaccuccgcgacaucaugugcauccccuacugcaacuacuccaaguacugguaccucaaccacaccaucaccggccgcaccucccuccccaagugcuggcucgucuccaacggcuccuaccucaacgagacccacuucuccgacgacaucgagcagcaggccgacaacaugaucaccgagaugcuccagaaggaguaccucgagcgccagggcaagaccccccucggccucgucgaccucuucgucuucuccaccuccuucuaccucaucuccaucuuccuccaccucaucaagauccccacccaccgccacaucgucggcaaguccugccccaagccccaccgccucaaccacaugggcgucugcuccugcggccucuacaagcagcccggcguccccguccgcuggaagcgcuga

SEQ ID NO: 4810 - RNA, 1476 nt, Artificial Sequence
  derived and/or modified protein sequence (opt2) from LASV(GUINEA Z-185a;Clade IV)__AMZ00377__GPCstabilized
augggccagaucgucaccuucuuccaggaggucccccacgucaucgaggaggucaugaacaucguccucaucgcccucuccauccucgccguccucaagggccucuacaacgucgccaccugcggccucaucggccucgucaccuuccucuuccucugcggccgcuccugcuccaccucccucuacaagggcgucuacgagcuccagacccucgagcucaacauggagacccucaacaugaccaugccccucuccugcaccaagaacaacucccaccacuacaucauggucggcaacgagaccggccucgagcucacccucaccaacaccuccaucaucaaccacaaguucugcaaccucuccgacgcccacaagaagaaccucuacgaccacacccucauguccaucaucuccaccuuccaccucuccauccccaacuucaaccaguacgaggccauguccugcgacuucaacggcggcaagaucuccguccaguacaaccucucccacuccuacgccgucgacgccgccaaccacugcggcaccgucgccaacggcguccuccagaccuucaugcgcauggccuggggcggcuccuacaucgcccucgacuccggcugcggcaacugggacugcaucaugaccuccuaccaguaccucgucauccagaacaccaccugggaggaccacugccaguucucccgccccucccccaucggcuaccucggccuccucucccagcgcacccgcgacaucuacaucucccgccgccgccggggcaccuucaccuggacccucuccgacuccgagggcaaggacacccccggcggcuacugccucacccgcuggaugcucaucgaggccgagcucaagugcuucggcaacaccgccgucgccaagugcaacgagaagcacgacgaggaguucugcgacaugcuccgccucuucgacuucaacaagcaggccauccagcgccucaaggcccccgcccagauguccauccagcucaucaacaaggccgucaacgcccucaucaacgaccagcucaucaugaagaaccaccuccgcgacaucaugugcauccccuacugcaacuacuccaaguacugguaccucaaccacaccgucaccggcaagaccucccuccccaagugcuggcucgucuccaacggcuccuaccucaacgagacccacuucuccgacgacaucgagcagcaggccgacaaccucaucaccgagaugcuccagaaggaguacauggagcgccagggcaagaccccccucggccucgucgaccucuucgucuucuccaccuccuucuaccucaucuccaucuuccuccaccucgucaagauccccacccaccgccacaucgucggcaagcccugccccaagccccaccgccucaaccacaugggcaucugcuccugcggcgucuacaagcagcccggcguccccguccgcuggaagcgcuga

SEQ ID NO: 4811 - RNA, 1476 nt, Artificial Sequence
  derived and/or modified protein sequence (opt2) from MOPV/LASV reassortant(IGS-1;Clade IV)__AFY05576__GPCstabilized
augggccagaucgucaccuucuuccaggaggucccccacgucaucgaggaggucaugaacaucguccucaucgcccucuccguccucgccguccucaagggccucuacaacuucgccaccugcggccucgucggccucgucaccuuccuccuccucugcggccgcuccugcaccaccucccucuacaagggcgucuacgagcuccagacccucgagcucaacauggagacccucaacaugaccaugccccucuccugcaccaagaacaacucccaccacuacaucauggucggcaacgagaccggccucgagcucacccucaccaacaccuccaucaucaaccacaaguucugcaaccucuccgacgcccacaagaagaaccucuacgaccacgcccucauguccaucaucuccaccuuccaccucuccauccccaacuucaaccaguacgaggccauguccugcgacuucaacggcggcaagaucuccguccaguacaaccucucccacuccuacgccggcgacgccgccaaccacugcggcaccgucgccaacggcguccuccagaccuucaugcgcauggccuggggcggcuccuacaucgcccucgacuccggcugcggcaacugggacugcaucaugaccuccuaccaguaccucaucauccagaacaccaccugggaggaccacugccaguucucccgccccucccccaucggcuaccucggccuccucucccagcgcacccgcgacaucuacaucucccgccgccgccggggcaccuucaccuggacccucuccgacuccgagggcgaggacacccccggcggcuacugccucacccgcuggaugcucaucgaggccgagcucaagugcuucggcaacaccgccgucgccaagugcaacgagaagcacgacgaggaguucugcgacaugcuccgccucuucgacuucaacaagcaggccauccagcgccucaaggcccccgcccagauguccauccagcucaucaacaaggccgucaacgcccucaucaacgaccagcucaucaugaagaaccaccuccgcgacaucaugugcauccccuacugcaacuacuccaaguacugguaccucaaccacaccaccaccggccgcaccucccuccccaagugcuggcucgucuccaacggcuccuaccucaacgagacccacuucuccgacgacaucgagcagcaggccgacaacaugaucaccgagaugcuccagaaggaguacauggagcgccagggcaagaccccccucggccucgucgaccucuucgucuucuccaccuccuucuaccucaucuccaucuuccuccaccucgucaagauccccacccaccgccacaucgucggcaaguccugccccaagccccaccgccucaaccacaugggcaucugcuccugcggccucuacaagcagcccggcguccccgucaaguggaagcgcuga

SEQ ID NO: 4812 - RNA, 1476 nt, Artificial Sequence
  derived and/or modified protein sequence (opt2) from MOPV/LASV reassortant(IGS-11;Clade IV)__AFY05588__GPCstabilized
augggccagaucgucaccuucuuccaggaggucccccacgucaucgaggaggucaugaacaucguccucaucgcccucuccguccucgccguccucaagggccucuacaacuucgccaccugcggccucgucggccucgucaccuuccuccuccucugcggccgcuccugcaccaccucccucuacaagggcgucuacgagcuccagacccucgagcucaacauggagacccucaacaugaccaugccccucuccugcaccaagaacaacucccaccacuacaucauggucggcaacgagaccggccucgagcucacccucaccaacaccuccaucaucaaccacaaguucugcaaccucuccgacgcccacaagaagaaccucuacgaccacgcccucauguccaucaucuccaccuuccaccucuccauccccaacuucaaccaguacgaggccauguccugcgacuucaacggcggcaagaucuccguccaguacaaccucucccacuccuacgccggcgacgccgccaaccacugcggcaccgucgccaacggcguccuccagaccuucaugcgcauggccuggggcggcuccuacaucgcccucgacuccggcugcggcaacugggacugcaucaugaccuccuaccaguaccucaucauccagaacaccaccugggaggaccacugccaguucucccgccccucccccaucggcuaccucggccuccucucccagcgcacccgcgaccucuacaucucccgccgccgccggggcaccuucaccuggacccucuccgacuccgagggcgaggacacccccggcggcuacugccucacccgcuggaugcucaucgaggccgagcucaagugcuucggcaacaccgccgucgccaagugcaacgagaagcacgacgaggaguucugcgacaugcuccgccucuucgacuucaacaagcaggccauccagcgccucaaggcccccgcccagauguccauccagcucaucaacaaggccgucaacgcccucaucaacgaccagcucaucaugaagaaccaccuccgcgacaucaugugcauccccuacugcaacuacuccaaguacugguaccucaaccacaccaccaccggccgcaccucccuccccaagugcuggcucgucuccaacggcuccuaccucaacgagacccacuucuccgacgacaucgagcagcaggccgacaacaugaucaccgagaugcuccagaaggaguacauggagcgccagggcaagaccccccucggccucgucgaccucuucgucuucuccaccuccuucuaccucaucuccaucuuccuccaccucgucaagauccccacccaccgccacaucgucggcaaguccugccccaagccccaccgccucaaccacaugggcaucugcuccugcggccucuacaagcagcccggcguccccgucaaguggaagcgcuga

SEQ ID NO: 4813 - RNA, 1476 nt, Artificial Sequence
  derived and/or modified protein sequence (opt2) from MOPV/LASV reassortant(IGS-12;Clade IV)__AFY05590__GPCstabilized
augggccagaucgucaccuucuuccaggaggucccccacgucaucgaggaggucaugaacaucguccucaucgcccucuccguccucgccguccucaagggccucuacaacuucgccaccugcggccucgucggccucgucaccuuccuccuccucugcggccgcuccugcaccaccucccucuacaagggcgucuacgagcuccagacccucgagcucaacauggagacccucaacaugaccaugccccucuccugcaccaagaacaacucccaccacuacaucauggucggcaacgagaccggccucgagcucacccucaccaacaccuccaucaucaaccacaaguucugcaaccucuccgacgcccacaagaagaaccucuacgaccacgcccucauguccaucaucuccaccuuccaccucuccauccccaacuucaaccaguacgaggccauguccugcgacuucaacggcggcaagaucuccguccaguacaaccucucccacuccuacgccggcgacgccgccaaccacugcggcaccgucgccaacggcguccuccagaccuucaugcgcauggccuggggcggcuccuacaucgcccucgacuccggcugcggcaacugggacugcaucaugaccuccuaccaguaccucaucauccagaacaccaccugggaggaccacugccaguucucccgccccucccccaucggcuaccucggccuccucucccagcgcacccgcgacauguacaucucccgccgccgccggggcaccuucaccuggacccucuccgacuccgagggcgaggacacccccggcggcuacugccucacccgcuggaugcucaucgaggccgagcucaagugcuucggcaacaccgccgucgccaagugcaacgagaagcacgacgaggaguucugcgacaugcuccgccucuucgacuucaacaagcaggccauccagcgccucaaggcccccgcccagauguccauccagcucaucaacaaggccgucaacgcccucaucaacgaccagcucaucaugaagaaccaccuccgcgacaucaugugcauccccuacugcaacuacuccaaguacugguaccucaaccacaccaccaccggccgcaccucccuccccaagugcuggcucgucuccaacggcuccuaccucaacgagacccacuucuccgacgacaucgagcagcaggccgacaacaugaucaccgagaugcuccagaaggaguacauggagcgccagggcaagaccccccucggccucgucgaccucuucgucuucuccaccuccuucuaccucaucuccaucuuccuccaccucgucaagauccccacccaccgccacaucgucggcaaguccugccccaagccccaccgccucaaccacaugggcaucugcuccugcggccucuacaagcagcccggcguccccgucaaguggaagcgcuga

SEQ ID NO: 4814 - RNA, 1476 nt, Artificial Sequence
  derived and/or modified protein sequence (opt2) from LASV(LM032-SLE-2010;Clade IV)__AIT17802__GPCstabilized
augggccagaucgucaccuucuuccaggaggucccccacgucaucgaggaggucaugaacaucguccucaucgcccucuccauccucgccguccucaagggccucuacaaccucgccaccugcggccucgucggccucgucaccuuccuccuccucugcggccgcuccugcaccaccucccucuacaagggcgucuacgagcuccagacccucgagcucaacauggagacccucaacaugaccaugccccucuccugcaccaagaacaacucccaccacuacaucauggucggcaacgagaccggccucgagcucacccucaccaacaccuccaucaucaaccacaaguucugcaaccucuccgacgcccacaagaagaaccucuacaaccacgcccucauguccaucaucuccaccuuccaccucuccauccccaacuucaaccaguacgaggccauguccugcgacuucaacggcggcaagaucuccguccaguacaaccucucccacuccuacgccggcgacgccgccaaccacugcggcaccgucgccaacggcguccuccagaccuucaugcgcauggccuggggcggcuccuacaucgcccucgacuccggcugcgaccgcugggacugcaucaugaccuccuaccaguaccucaucauccagaacaccaccugggaggaccacugccaguucucccgccccucccccaucggcuaccucggccuccucucccagcgcacccgcgacaucuacaucucccgccgccgccggggcaccuucaccuggacccucuccgacuccgagggcaaggacacccccggcggcuacugccucacccgcuggaugcucaucgaggccgagcucaagugcuucggcaacaccgccgucgccaagugcaacgagaagcacgacgaggaguucugcgacaugcuccgccucuucgacuucaacaagcaggccauccagcgccucaaggcccccgcccagauguccauccagcucaucaacaaggccgucaacgcccucaucaacgaccagcucaucaugaagaaccaccuccgcgacaucaugugcauccccuacugcaacuacuccaaguacugguaccucaaccacaccaccaccggcaagaccucccuccccaagugcuggcucgucuccaacggcuccuaccucaacgagacccacuucuccgacgacaucgagcagcaggccgacaacaugaucaccgagaugcuccagaaggaguacauggagcgccucggcaagaccccccucggccucgucgaccucuucgucuucuccaccuccuucuaccucaucuccaucuuccuccaccucgucaagauccccacccaccgccacaucgucggccgcuccugccccaagccccaccgccucaaccacaugggcaucugcuccugcggccucuacaagcagcccggcguccccgucaaguggaagcgcuga

SEQ ID NO: 4815 - RNA, 1476 nt, Artificial Sequence
  derived and/or modified protein sequence (opt2) from LASV(LM222-SLE-2010;Clade IV)__AIT17806__GPCstabilized
augggccagaucgucaccuucuuccaggaggucccccacgucaucgaggaggucaugaacaucguccucaucgcccucuccauccucgccguccucaagggccucuacaacuucgccaccugcggccucaucggccucgucaccuuccuccuccucugcggccgcuccugcaccaccucccucuacaagggcgucuacgagcuccagacccucgagcucaacauggagacccucaacaugaccaugccccucuccugcaccaagaacaacucccaccacuacaucauggucggcaacgagaccggccucgagcucacccucaccaacaccuccaucaucaaccacaaguucugcaaccucuccgacgcccacaagaagaaccucuacgaccacgcccucauguccaucaucuccaccuuccaccucuccauccccaacuucaaccaguacgaggccauguccugcgacuucaacggcggcaagaucuccguccaguacaaccucucccacuccuacgccggcgacgccgccaaccacugcggcaccgucgccaacggcguccuccagaccuucaugcgcauggccuggggcggcuccuacaucgcccucgacuccggcugcggcaagugggacugcaucaugaccuccuaccaguaccucaucauccagaacaccaccugggaggaccacugccaguucucccgccccucccccaucggcuaccucggccuccucucccagcgcacccgcgacaucuacaucucccgccgccgccggggcaccuucaccuggacccucuccgacuccgagggcaaggacacccccggcggcuacugccucacccgcuggaugcucaucgaggccgagcucaagugcuucggcaacaccgccgucgccaagugcaacgagaagcacgacgaggaguucugcgacaugcuccgccucuucgacuucaacaagcaggccauccagcgccucaaggcccccgcccagauguccauccagcucaucaacaaggccgucaacgcccucaucaacgaccagcucaucaugaagaaccaccuccgcgacaucaugugcauccccuacugcaacuacuccaaguacugguaccucaaccacaccaccaccggcaagaccucccuccccaagugcuggcucgucuccaacggcuccuaccucaacgagacccacuucuccgacgacaucgagcagcaggccgacaacaugaucaccgagaugcuccagaaggaguacauggagcgccagggcaagaccccccucggccucgucgaccucuucgucuucuccaccuccuucuaccucaucuccaucuuccuccaccucgucaagauccccacccaccgccacaucgucggcaaguccugccccaagccccaccgccucaaccacaugggcaucugcuccugcggccucuacaagcagcccggcguccccgucaaguggaagcgcuga

SEQ ID NO: 4816 - RNA, 1476 nt, Artificial Sequence
  derived and/or modified protein sequence (opt2) from LASV(LM395-SLE-2009;Clade IV)__AIT17810__GPCstabilized
augggccagaucgucaccuucuuccaggaggucccccacgucaucgaggaggucaugaacaucguccucaucgcccucuccauccucgccguccucaagggccucuacaaccucgccaccugcggccucgucggccucgucaccuuccuccuccucugcggccgcuccugcaccaccucccucuacaagggcgucuacgagcuccagacccucgagcucaacauggagacccucaacaugaccaugccccucuccugcaccaaggacaacucccaccacuacauccgcgucggcaacgagaccggccucgagcucacccucaccaacaccuccauccucaaccacaaguucugcaaccucuccgacgcccacaagaagaaccucuacgaccacgcccucauguccaucaucuccaccuuccaccucuccauccccaacuucaaccaguacgaggccauguccugcgacuucaacggcggccgcaucuccguccaguacaaccucucccacuccuacgccggcgacgccgccaaccacugcggcaccgucgccaacggcguccuccagaccuucaugcgcauggccuggggcggcuccuacaucgcccucgacuccggcugcggccgcugggacugcaucaugaccuccuaccaguaccucaucauccagaacaccaccugggaggaccacugccaguucucccgccccucccccaucggcuaccucggccuccucucccagcgcacccgcgacaucuacaucucccgccgccgccggggcaccuucaccuggacccucuccgacuccgagggcaaggacacccccggcggcuacugccucacccgcuggaugcucaucgaggccgagcucaagugcuucggcaacaccgccgucgccaagugcaacgagaagcacgacgaggaguucugcgacaugcuccgccucuucgacuucaacaagcaggccauccagcgccucaaggcccccgcccagauguccauccagcucaucaacaaggccgucaacgcccucaucaacgaccagcucaucaugaagaaccaccuccgcgacaucaugugcauccccuacugcaacuacuccaaguacugguaccucaaccacaccaccaccggcaagaccucccucccccgcugcuggcucgucuccaacggcuccuaccucaacgagacccacuucuccgacgacaucgagcagcaggccgacaacaugaucaccgagaugcuccagaaggaguacauggagcgccagggcaagaccccccucggccucgucgaccucuucgucuucuccaccuccuucuaccucaucuccaucuuccuccaccucgucaagauccccacccaccgccacgucgucggcaagcccugccccaagccccaccgccucaaccacaugggcaucugcuccugcggccucuacaagcagcccggcguccccgucaaguggaagcgcuga

SEQ ID NO: 4817 - RNA, 1476 nt, Artificial Sequence
  derived and/or modified protein sequence (opt2) from LASV(LM765-SLE-2012;Clade IV)__AIT17814__GPCstabilized
augggccagaucgucaccuucuuccaggaggucccccacgucaucgaggaggucaugaacaucguccucaucgcccucuccauccucgccguccucaagggccucuacaacuucgccaccugcggccucgucggccucgucaccuuccuccuccucugcggccgcuccugcaccaccucccucuacaagggcgucuacgagcuccagacccucgagcucaacauggagacccucaacaugaccaugccccucuccugcaccaagaacaacucccaccacuacaucauggucggcaacgagaccggccucgagcucacccucaccaacaccuccaucaucgaccacaaguucugcaaccucuccgacgcccaccgcaagaaccucuacgaccacgcccucauguccaucaucuccaccuuccaccucuccauccccaacuucaaccaguacgaggccauguccugcgacuucaacggcggcaagaucuccguccaguacaaccucucccacuccuacgccaaggacgccgccgaccacugcggcaccgucgccaacggcguccuccagaccuucaugcgcauggccuggggcggcuccuacaucgcccucgacuccggcugcggccgcugggacugcaucaugaccuccuaccaguaccucaucauccagaacaccaccugggaggaccacugccaguucucccgccccucccccaucggcuaccucggccuccucucccagcgcacccgcgacaucuacaucucccgccgccgccggggcaccuucaccuggacccucuccgacuccgagggcaaggacacccccggcggcuacugccucacccgcuggaugcucaucgaggccgagcucaagugcuucggcaacaccgccgucgccaagugcaacgagaagcacgacgaggaguucugcgacaugcuccgccucuucgacuucaacaagcaggccauccagcgccucaaggcccccgcccagauguccauccagcucaucaacaaggccgucaacgcccucaucaacgaccagcucaucaugaagaaccaccuccgcgacaucaugugcauccccuacugcaacuacuccaaguacugguaccucaaccacaccaccaccggcaagaccucccuccccaagugcuggcucgucuccaacggcuccuaccucaacgagacccacuucuccgacgacaucgagcagcaggccgacaacaugaucaccgagaugcuccagaaggaguacauggagcgccagggcaagaccccccucggccucgucgaccucuucgucuucuccaccuccuucuaccucaucuccaucuuccuccaccucgucaagauccccacccaccgccacaucgucggcaagcccugccccaagccccaccgccucaaccacaugggcaucugcuccugcggccucuacaagcagcccggcguccccgucaaguggaagcgcuga

SEQ ID NO: 4818 - RNA, 1476 nt, Artificial Sequence
  derived and/or modified protein sequence (opt2) from LASV(LM774-SLE-2012;Clade IV)__AIT17820__GPCstabilized
augggccagaucgucaccuucuuccaggaggucccccacgucaucgaggaggucaugaacaucguccucaucgcccucuccauccucgccguccucaagggccucuacaacuucgccaccugcggccucgucggccucgucaccuuccuccuccucugcggccgcuccugcaccaccucccucuacaagggcgucuacgagcuccagacccucgagcucaacauggagacccucaacaugaccaugccccucuccugcaccaagaacaacucccaccacuacaucauggucggcaacgagaccggccucgagcucacccucaccaacaccuccaucaucaaccacaaguucugcaaccucuccgacgcccacaagaagaaccucuacgaccacgcccucauguccaucaucuccaccuuccaccucuccauccccaacuucaaccaguacgaggccauguccugcgacuucaacggcggcaagaucuccguccaguacaaccucucccacuccuacgccgaggacgccgccaaccacugcggcaccgucgccaacggcguccuccagaccuucaugcgcauggccuggggcggcuccuacaucgcccucgacuccggcugcggcaacugggacugcaucaugaccuccuaccaguaccucaucauccagaacaccaccugggaggaccacugccaguucucccgccccucccccaucggcuaccucggccuccucucccagcgcacccgcgacaucuacaucucccgccgccgccggggcaccuucaccuggacccucuccgacuccgagggcaaggacacccccggcggcuacugccucacccgcuggaugcucaucgaggccgagcucaagugcuucggcaacaccgccgucgccaagugcaacgagaagcacgacgaggaguucugcgacaugcuccgccucuucgacuucaacaagcaggccauccagcgccucaaggcccccgcccagauguccauccagcucaucaacaaggccgucaacgcccucaucaacgaccagcucaucaugaagaaccaccuccgcgacaucaugugcauccccuacugcaacuacuccaaguacugguaccucaaccacaccaccaccggcaagaccucccuccccaagugcuggcucgucuccaacggcuccuaccucaacgagacccacuucuccgacgacaucgagcagcaggccgacaacaugaucaccgagaugcuccagaaggaguacauggagcgccagggcaagaccccccucggccucgucgaccucuucgucuucuccaccuccuucuaccucaucuccaucuuccuccaccucgucaagauccccacccaccgccacaucgucggcaaguccugccccaagccccaccgccucaaccacaugggcaucugcuccugcggccucuacaagcagcccggcguccccgucaaguggaagcgcuga

SEQ ID NO: 4819 - RNA, 1476 nt, Artificial Sequence
  derived and/or modified protein sequence (opt2) from LASV(LM776-SLE-2012;Clade IV)__AIT17824__GPCstabilized
augggccagaucgucaccuucuuccaggaggucccccacgucaucgaggaggucaugaacaucguccucaucgcccucuccauccucgccguccucaagggccucuacaacuucgccaccugcggccucgucggccucgucaccuuccuccuccucugcggccgcuccugcaccaccuccgucuacaagggcgucuacgagcuccagacccucgagcucaacauggagacccucaacaugaccaugccccucuccugcaccaagaacaacucccaccacuacaucauggucggcaacgagaccggccucgagcucacccucaccaacaccuccaucaucaaccacaaguucugcaaccucuccgacgcccacaagaagaaccucuacgaccacgcccucauguccaucaucuccaccuuccaccucuccauccccaacuucaaccaguacgaggccauguccugcgacuucaacggcggcaagaucuccguccaguacaaccucucccacuccuacgccggcgacgccgccaaccacugcggcaccgucgccaacggcguccuccagaccuucaugcgcauggccuggggcggcuccuacaucgcccucgacuccggcugcggcaagugggacugcaucaugaccuccuaccaguaccucaucauccagaacaccaccugggaggaccacugccaguucucccgccccucccccaucggcuaccucggccuccucucccagcgcacccgcgacaucuacaucucccgccgccgccggggcaccuucaccuggacccucuccgacuccgagggcaaggacacccccggcggcuacugccucacccgcuggaugcucaucgaggccgagcucaagugcuucggcaacaccgccgucgccaagugcaacgagaagcacgacgaggaguucugcgacaugcuccgccucuucgacuucaacaagcaggccauccagcgccucaaggcccccgcccagauguccauccagcucaucaacaaggccgucaacgcccucaucaacgaccagcucaucaugaagaaccaccuccgcgacaucaugugcauccccuacugcaacuacuccaaguacugguaccucaaccacaccaccaccggcaagaccucccuccccaagugcuggcucgucuccaacggcuccuaccucaacgagacccacuucuccgacgacaucgagcagcaggccgacaacaugaucaccgagaugcuccagaaggaguacauggagcgccagggcaagaccccccucggccucgucgaccucuucgucuucuccaccuccuucuaccucaucuccaucuuccuccaccucgucaagauccccacccaccgccacaucgucggcaaguccugccccaagccccaccgccucaaccacaugggcaucugcuccugcggccucuacaagcagcccggcguccccguccgcuggaagcgcuga

SEQ ID NO: 4820 - RNA, 1476 nt, Artificial Sequence
  derived and/or modified protein sequence (opt2) from LASV(LM778-SLE-2012;Clade IV)__AIT17828__GPCstabilized
augggccagaucgucaccuucuuccaggaggucccccacgucaucgaggaggucaugaacaucguccucaucgcccucuccauccucgccguccucaagggccucuacaacuucgccaccugcggccucgucggccucgucaccuuccuccuccucugcggccgcuccugcaccaccucccucuacaagggcgacuacgagcuccagacccucgagcucaacauggagacccucaacaugaccaugccccucuccugcaccaagaacaacucccaccacuacaucauggucggcaacgagaccggccucgagcucacccucaccaacaccuccaucaucaaccacaaguucugcaaccucuccgacgcccacaagaagaaccucuacgaccacgcccucauguccaucaucuccaccuuccaccucuccauccccaacuucaaccaguacgaggccauguccugcgacuucaacggcggcaagaucuccguccaguacaaccucucccacuccuacgccggcgacgccgccaaccacugcggcaccgucgccaacggcguccuccagaccuucaugcgcauggccuggggcggcuccuacaucgcccucgacuccggcugcggcaacugggacugcaucaugaccuccuaccaguaccucaucauccagaacaccaccugggaggaccacugccaguucucccgccccucccccaucggcuaccucggccuccucucccagcgcacccgcgacaucuacaucucccgccgccgccggggcaccuucaccuggacccucuccgacuccgagggcaaggacacccccggcggcuacugccucacccgcuggaugcucaucgaggccgagcucaagugcuucggcaacaccgccgucgccaagugcaacgagaagcacgacgaggaguucugcgacaugcuccgccucuucgacuucaacaagcaggccauccagcgccucaaggcccccgcccagauguccauccagcucaucaacaaggccgucaacgcccucaucaacgaccagcucaucaugaagaaccaccuccgcgacaucaugugcauccccuacugcaacuacuccaaguacugguaccucaaccacaccaccaccggcaagaccucccuccccaagugcuggcucgucuccaacggcuccuaccucaacgagacccacuucuccgacgacaucgagcagcaggccgacaacaugaucaccgagaugcuccagaaggaguacauggagcgccagggcaagaccccccucggccucgucgaccucuucgucuucuccaccuccuucuaccucaucuccaucuuccuccaccucgucaagauccccacccaccgccacaucgucggcaaguccugccccaagccccaccgccucaaccacaugggcaucugcuccugcggccucuacaagcagcccggcguccccgucaaguggaagcgcuga

SEQ ID NO: 4821 - RNA, 1476 nt, Artificial Sequence
  derived and/or modified protein sequence (opt2) from LASV(Mad39;Clade IV)__ANH09722__GPCstabilized
augggccagaucgucaccuucuuccaggaggucccccacgucaucgaggaggucaugaacaucguccucaucgcccucuccauccucgccguccucaagggccucuacaacgucgccaccugcggccucaucggccucgucaccuuccuccuccucugcggccgcuccugcaccaccacccucuacaagggcgucuacgagcuccaggcccucgagcucaacauggagacccucaacaugaccaugccccucuccugcaccaagaacaacucccaccacuacauccgcgucggcaacgagaccggccucgagcucacccucaccaacaccucccucaucaaccacaaguucugcaaccucuccgacgcccacaagaagaaccucuacgaccacgcccucauguccaucaucuccaccuuccaccucuccauccccaacuucaaccaguacgaggccauguccugcgacuucaacgacggcaagaucuccguccaguacaaccucucccacaccuacgccggcgacaccgccaaccacugcggcaccgucgccaacggcguccuccagaccuucaugcgcauggccuggggcggcuccuacaucgcccucgacuccggcugcggcggcugggacugcaucaugaccuccuaccaguaccucaucauccagaacaccaccugggaggaccacugccaguucucccgccccucccccaucggcuaccucggccuccucucccagcgcacccgcgacaucuacaucucccgccgccgccggggcaccuucaccuggacccucuccgacuccgagggcaaggacacccccggcggcuacugccucacccgcuggaugcucaucgaggccgagcucaagugcuucggcaacaccgccgucgccaagugcaacgagaagcacgacgaggaguucugcgacaugcuccgccucuucgacuucaacaagcaggccauccagcgccucaaggcccccgcccagauguccauccagcucaucaacaaggccgucaacgcccucaucaacgaccagcucaucaugaagaaccaccuccgcgacaucaugugcauccccuacugcaacuacuccaaguacugguaccucaaccacaccgucaccggcaagaccucccuccccaagugcuggcucgucuccaacggcuccuaccucaacgagacccacuucuccgacgacaucgagcagcaggccgacaacaugaucaccgagaugcuccagaaggaguacauggagcgccagggcaagaccccccucggccucgucgaccucuucgucuucuccaccuccuucuaccucaucuccaucuuccuccaccucgucaagauccccacccaccgccacgucgucggcaagcccugccccaagccccaccgccucaaccacaugggcaucugcuccugcggcuucuacaagcagcccggcguccccguccgcuggaagcgcuga

SEQ ID NO: 4822 - RNA, 1476 nt, Artificial Sequence
  derived and/or modified protein sequence (opt2) from LASV(Mad41;Clade IV)__ANH09724__GPCstabilized
augggccagaucgucaccuucuuccaggaggucccccacgucaucgaggaggucaugaacaucguccucaucgcccucuccauccucgccguccucaagggccucuacaacgucgccaccugcggccucaucggccucgucaccuuccuccuccucugcggccgcuccugcaccaccacccucuacaagggcgucuacgagcuccaggcccucgagcucaacauggagacccucaacaugaccaugccccucuccugcaccaagaacgacucccaccacuacaucauggucggcaacgagaccggccucgagcucacccucaccaacaccuccaucaucucccacaaguucugcaaccucuccgacgcccacaagcagaaccucuacgaccacgcccucauguccaucaucuccaccuuccaccucuccauccccaacuucaaccaguacgaggccauguccugcgacuucaacggcggcaagaucuccguccaguacaaccucucccacaccuacgccggcgacgccgccaaccacugcggcaccgucgccaacggcguccuccagaccuucaugcgcauggccuggggcggcuccuacaucgcccucgacuccggcugcggcggcugggacugcaucaugaccuccuaccaguaccucaucauccagaacaccaccugggaggaccacugccaguucucccgccccucccccaucggcuaccucggccuccucucccagcgcacccgcgacaucuacaucucccgccgccgccggggcaccuucaccuggacccucuccgacuccgagggcaaggacacccccggcggcuacugccucacccgcuggaugcucaucgaggccgagcucaagugcuucggcaacaccgccgucgccaagugcaacgagaagcacgacgaggaguucugcgacaugcuccgccucuucgacuucaacaagcaggccauccagcgccucaaggcccccgcccagauguccauccagcucaucaacaaggccgucaacgcccucaucaacgaccagcucaucaugaagaaccaccuccgcgacaucaugugcauccccuacugcaacuacuccaaguacugguaccucaaccacaccgucaccggcaagaccucccuccccaagugcuggcucgucuccaacggcuccuaccucaacgagacccacuucuccgacgacaucgagcagcaggccgacaacaugaucaccgagaugcuccagaaggaguacauggagcgccagggcaagaccccccucggccucgucgaccucuucgucuucuccaccuccuucuaccucaucuccaucuuccuccaccucgucaagauccccacccaccgccacgucgucggcaagcccugccccaagccccaccgccucaaccacaugggcaucugcuccugcggcuucuacggccagcccggcguccccguccgcuggaagcgcuga

SEQ ID NO: 4823 - RNA, 1476 nt, Artificial Sequence
  derived and/or modified protein sequence (opt2) from LASV(Mad63;Clade IV)__ANH09728__GPCstabilized
augggccagaucgucaccuucuuccaggaggucccccacgucaucgaggaggucaugaacaucguccucaucgcccucuccguccucgccguccucaagggccucuacaacgucgccaccugcggccucaucggccucgucaccuuccuccuccucugcggccgcuccugcaccaccacccucuacaagggcgucuacgagcuccaggcccucgagcucaacaugggcacccucaacaugaccaugccccucuccugcaccaagaacaacucccaccacuacaucauggucggcaacgagaccggccucgagcucacccucaccaacaccuccaucaucaaccacaaguucugcaaccucuccgacgcccacaagaaggaccucuacgaccacgcccucauguccaucaucuccaccuuccaccucuccguccccaacuucaaccaguacgaggccauguccugcgacuucaacggcggcaagaucuccguccaguacaaccucucccacgccuacgccggcgacaccgccaaccacugcggcaccgucgccaacggcguccuccagaccuucaugcgcauggccuggggcggcuccuacaucgcccucgacuccggcugcggcggcugggacugcaucaugaccuccuaccaguaccucaucauccagaacaccaccugggaggaccacugccaguucucccgccccucccccaucggcuaccucggccuccucucccagcgcacccgcgacaucuacaucucccgccgccgccggggcaccuucaccuggacccucuccgacuccgagggcgaguacacccccggcggcuacugccucacccgcuggaugcucaucgaggccgagcucaagugcuucggcaacaccgccgucgccaagugcaacgagaagcacgacgaggaguucugcgacaugcuccgccucuucgacuucaacaagcaggccauccagcgccucaaggcccccgcccagauguccauccagcucaucaacaaggccgucaacgcccucaucaacgaccagcucaucaugaagaaccaccuccgcgacaucaugugcauccccuacugcaacuacuccaaguacugguaccucaaccacaccgucaccggcaagaccucccuccccaagugcuggcucgucuccaacggcuccuaccucaacgagacccacuucuccgacgacaucgagcagcaggccgacaacaugaucaccgagaugcuccagaaggaguacauggagcgccagggcaagaccccccucggccucgucgaccucuucgucuucuccaccuccuucuaccucaucuccaucuuccuccaccucgucaagauccccacccaccgccacgucgucggcaagcccugccccaagccccaccgccucaaccacaugggcaucugcuccugcggcuucuacaagcagcccggcguccccguccgcuggaagcgcuga

SEQ ID NO: 4824 - RNA, 1476 nt, Artificial Sequence
  derived and/or modified protein sequence (opt2) from LASV(Mad69;Clade IV)__ANH09730__GPCstabilized
augggccagaucgucaccuucuuccaggaggucccccacgucaucgaggaggucaugaacaucguccucaucgcccucuccguccucgccguccucaagggccucuacaacgucgccaccugcggccucaucggccucgucaccuuccuccuccucugcggccgcuccugcaccaccacccucuacaagggcgucuacgagcuccaggcccucgagcucaacauggagacccucaacaugaccaugccccucuccugcaccaagaacaacucccaccacuacaucauggucggcaacgagaccggccucgagcucacccucaccaacaccuccaucaucaaccacaaguucugcaaccucuccgacgcccacaagaagaaccucuacgaccacgcccucauguccaucaucuccaccuuccaccucuccauccccaacuucaaccaguacgaggccauguccugcgacuucaaccagggcaagaucuccguccaguacaaccucucccacgccuacgccggcgacgccgccaaccacugcggcaccgucgccaacggcguccuccagaccuucaugcgcauggccuggggcggcuccuacaucgcccucgacuccggcugcggcggcugggacugcaucaugaccuccuaccaguaccucaucauccagaacaccaccugggagaaccacugccaguucucccgccccucccccaucggcuaccucggccuccucucccagcgcacccgcgacaucuacaucucccgccgccgccggggcaccuucaccuggacccucuccgacuccgagggcaagggcacccccggcggcuacugccucacccgcuggaugcucaucgaggccgagcucaagugcuucggcaacaccgccgucgccaagugcaacgagaagcacgacgaggaguucugcgacaugcuccgccucuucgacuucaacaagcaggccauccagcgcuucaaggcccccgcccagauguccauccagcucaucaacaaggccgucaacgcccucaucaacgaccagcucaucaugaagaaccaccuccgcgacaucaugugcauccccuacugcaacuacuccaaguacugguaccucaaccacaccgucaccggcaagaccucccuccccaagugcuggcucgucuccaacggcuccuaccucaacgagacccacuucuccgacgacaucgagcagcaggccgacaacaugaucaccgagaugcuccagaaggaguacauggagcgccagggccgcaccccccucggccucgucgaccucuucgucuucuccaccuccuucuaccucaucuccaucuuccuccaccucgucaagauccccacccaccgccacgucgucggcaagcccugccccaagccccaccgccucaaccacaugggcaucugcuccugcggcuucuacaagcagcccggcguccccguccgcuggaagcgcuga

SEQ ID NO: 4825 - RNA, 1476 nt, Artificial Sequence
  derived and/or modified protein sequence (opt2) from LASV(Mad83;Clade IV)__ANH09732__GPCstabilized
augggccagaucgucaccuucuuccaggaggucccccacgucaucgaggaggucaugaacaucguccucaucgcccucuccauccucgccguccucaagggcgucuacaacgucgccaccugcggccucaucggccucgucaccuuccuccuccucuccggccgcuccugcaccaccaccaucuacaagggcgucuacgagcuccaggcccucgagcucaacauggagacccucaacaugaccaugccccucuccugcaccaagaacaacucccaccacuacaucauggucggcaacgagaccggccucgagcucacccucaccaacaccuccaucaucaaccacaaguucugcaaccucuccgacgcccacaagaagaaccucuacgaccacgcccucauguccaucaucuccaccuuccaccucuccauccccaacuucaaccaguacgaggccauguccugcgacuucaacggcggcaagaucuccguccaguacaaccucucccacaccuacgccggcgacgccgccaaccacugcggcaccgucgccaacggcguccuccagaccuucaugcgcauggccuggggcggcuccuacaucgcccucgacuccggcugcggcggcugggacugcaucaugaccuccuaccaguaccucaucauccagaacaccaccugggagaaccacugccaguucucccgccccucccccaucggcuaccucggccuccucucccagcgcacccgcgacaucuacaucucccgccgccgccggggcaccuucaccuggacccucuccgacuccgagggcaaggacacccccggcggcuacugccucacccgcuggaugcucaucgaggccgagcucaagugcuucggcaacaccgccgucgccaagugcaacgagaagcacgacgaggaguucugcgacaugcuccgccucuucgacuucaacaagcaggccauccagcgccucaaggcccccgcccagauguccauccagcucaucaacaaggccgucaacgcccucaucaacgaccagcucaucaugaagaaccaccuccgcgacaucaugugcauccccuacugcaacuacuccaaguacugguaccucaaccacaccgucaccggcaagaccucccuccccaagugcuggcucgucuccaacggcuccuaccucaacgagacccacuucuccgacgacaucgagcagcaggccgacaacaugaucaccgagaugcuccagaaggaguacauggagcgccagggcaagaccccccucggccucgucgaccucuucgucuucuccaccuccuucuaccucaucuccaucuuccuccaccucgucaagauccccacccaccgccacaucgucggcaagcccugccccaagccccaccgccucaaccacaugggcaucugcuccugcggcuucuacaagcagcccggcguccccguccgcuggaagcgcuga

SEQ ID NO: 4826 - RNA, 1476 nt, Artificial Sequence
  derived and/or modified protein sequence (opt2) from LASV(NL;Clade IV)__AAO59512__GPCstabilized
augggccagaucgucaccuucuuccaggaggucccccacgucaucgaggaggucaugaacaucguccucaucgcccucuccauccucgccguccucaagggccucuacaacuucgccaccugcggccucgucggccucgucgccuuccuccuccucugcggccgcuccugcaccuccucccucuacaagggcgucuacgagcuccagacccucgagcucaacauggagacccucaacaugaccaugccccucuccugcaccaagaacaacucccaccacuacauccgcgucggcaacgagaccggccucgagcucacccucaccaacaccuccaucaucaaccacaaguucugcaaccucuccgacgcccacaagaagaaccucuacgaccacgcccucauguccaucaucuccaccuuccaccucuccauccccaacuucaaccaguacgaggccauguccugcgacuucaacggcggcaagaucuccguccaguacaaccucucccacuccuacgccgucgacgccgccaagcacugcggcaccgucgccaacggcguccuccagaccuucaugcgcauggccuggggcggcuccuacaucgcccucgacuccggcugcggccgcugggacugcaucaugaccuccuaccaguaccucaucauccagaacaccaccugggaggaccacugccaguucucccgccccucccccaucggcuaccucggccuccucucccagcgcacccgcgacaucuacaucucccgccgccgccggggcaccuucaccuggacccucuccgacuccgagggcaaggacacccccggcggcuacugccucacccgcuggaugcucaucgaggccgagcucaagugcuucggcaacaccgccgucgccaagugcaacgagaagcacgacgaggaguucugcgacaugcuccgccucuucgacuucaacaagcaggccauccagcgccucaagacccccgcccagauguccauccagcucaucaacaaggccgucaacgcccucaucaacgaccagcucaucaugaagaaccaccuccgcgacaucaugugcauccccuacugcaacuacucccgcuacugguaccucaaccacaccaccaccggcaagaccucccuccccaagugcuggcucgucuccaacggcuccuaccucaacgagacccgcuucuccgacgacaucgagcagcaggccgacaacaugaucaccgagaugcuccagaaggaguacauggagcgccagggcaagaccccccucggccucgucgaccucuucgucuucuccaccuccuucuaccucaucuccaucuuccuccaccucgucaagauccccacccaccgccacaucgucggcaaguccugccccaagccccaccgccucaaccacaugggcaucugcuccugcggccucuacaagcagcccggcguccccgucaaguggaagcgcuga

SEQ ID NO: 4827 - RNA, 1476 nt, Artificial Sequence
  derived and/or modified protein sequence (opt2) from LASV(Z0947-SLE-2011;Clade IV)__AIT17840__GPCstabilized
augggccagaucgucaccuucuuccaggaggucccccacgucaucgaggaggucaugaacaucguccucaucgcccucuccauccucgccguccucaagggccucuacaacuucgccaccugcggccucgucggccucgucaccuuccuccuccucugcggccgcuccugcaccaucucccucuacaagggcgucuacgagcuccagacccucgagcucaacauggagacccucaacaugaccaugccccucuccugcaccaagaacaacucccaccacuacaucauggucggcaacgagaccggccucgagcucacccucaccaacaccuccaucaucaaccacaaguucugcaaccucuccgacgcccacaagaagaaccucuacgaccacgcccucauguccaucaucuccaccuuccaccucuccauccccaacuucaaccaguacgaggccauguccugcgacuucaacggcggcaagaucuccguccaguacaaccucucccacuccuacgccggcgacgccgccaaccacugcggcaccgucgccaacggcguccuccagaccuucaugcgcauggccuggggcggcuccuacaucgcccucgacuccggcugcgaccgcugggacugcaucaugaccuccuaccaguaccucaucauccagaacaccaccugggaggaccacugccaguucucccgccccucccccaucggcuaccucggccuccucucccagcgcacccgcgacaucuacaucucccgccgccgccggggcaccuucaccuggacccucuccgacuccgagggcaaggacacccccggcggcuacugccucacccgcuggaugcucaucgaggccgagcucaagugcuucggcaacaccgccgucgccaagugcaacgagaagcacgacgaggaguucugcgacaugcuccgccucuucgacuucaacaagcaggccauccagcgccucaaggcccccgcccagauguccauccagcucaucaacaaggccgucaacgcccucaucaacgaccagcucaucaugaagaaccaccuccgcgacaucaugugcauccccuacugcaacuacuccaaguacugguaccucaaccacaccaccaccggcaagaccucccuccccaagugcuggcucgucuccaacggcuccuaccucaacgagacccacuucuccgacgacaucgagcagcaggccgacaacaugaucaccgagaugcuccagaaggaguacauggagcgccagggcaagaccccccucggccucgucgaccucuucgucuucuccaccuccuucuaccucaucuccaucuuccuccaccucgucaagauccccacccaccgccacaucgucggcaagcccugccccaagccccaccgccucaaccacaugggcaucugcuccugcggccucuacaagcagcccggcguccccgucaaguggaagcgcuga

SEQ ID NO: 4828 - RNA, 1476 nt, Artificial Sequence
  derived and/or modified protein sequence (opt2) from LASV(Z0948-SLE-2011;Clade IV)__AIT17844__GPCstabilized
augggccagaucgucaccuucuuccaggaggucccccacgucaucgaggaggucaugaacaucguccucaucgcccucuccauccucgccguccucaagggccucuacaacuucgccaccugcggccucgucggccucgucaccuuccuccuccucugcggccgcuccugcaccaucucccucuacaagggcgucuacgagcuccagacccucgagcucaacauggagacccucaacaugaccaugccccucuccugcaccaagaacaacucccaccacuacaucauggucggcaacgagaccggccucgagcucacccucaccaacaccuccaucaucaaccacaaguucugcaaccucuccgacgcccacaagaagaaccucuacgaccacgcccucauguccaucaucuccaccuuccaccucuccauccccaacuucaaccaguacgaggccauguccugcgacuucaacggcggcaagaucuccguccaguacaaccucucccacuccuacgccggcgacgccgccaaccacugcggcaccgucgccaacggcguccuccagaccuucaugcgcauggccuggggcggcuccuacaucgcccucgacuccggcugcgaccgcugggacugcaucaugaccuccuaccaguaccucaucauccagaacaccaccugggaggaccacugccaguucucccgccccucccccaucggcuaccucggccuccucucccagcgcacccgcgacaucuacaucucccgccgccgccggggcaccuucaccuggacccucuccgacuccgagggcaaggacacccccggcggcuacugccucacccgcuggaugcucaucgaggccgagcucaagugcuucggcaacaccgccgucgccaagugcaacgagaagcacgacgaggaguucugcgacaugcuccgccucuucgacuucaacaagcaggccauccagcgccucaaggcccccgcccagauguccauccagcucaucaaccgcgccgucaacgcccucaucaacgaccagcucaucaugaagaaccaccuccgcgacaucaugugcauccccuacugcaacuacuccaaguacugguaccucaaccacaccaccaccggcaagaccucccuccccaagugcuggcucgucuccaacggcuccuaccucaacgagacccacuucuccgacgacaucgagcagcaggccgacaacaugaucaccgagaugcuccagaaggaguacauggagcgccagggcaagaccccccucggccucgucgaccucuucgucuucuccaccuccuucuaccucaucuccaucuuccuccaccucgucaagauccccacccaccgccacaucgucggcaagcccugccccaagccccaccgccucaaccacaugggcaucugcuccugcggccucuacaagcagcccggcguccccgucaaguggaagcgcuga

SEQ ID NO: 4829 - RNA, 1476 nt, Artificial Sequence
  derived and/or modified protein sequence (opt2) from LASV(Z148;Clade IV)__AAT49008__GPCstabilized
augggccagaucgucaccuucuuccaggaggucccccacgucaucgaggaggucaugaacaucguccucaucgcccucuccauccucgccguccucaagggccucuacaacgucgccaccugcggccucaucggccucgucaccuuccucuuccucugcggccgcuccugcuccaccacccucuacaagggcgucuacgagcuccagacccucgagcucaacauggagacccucaacaugaccaugccccucuccugcaccaagaacaacucccaccacuacaucauggucggcaacgagaccggccucgagcucacccucaccaacaccuccaucaucaaccacaaguucugcaaccucuccgacgcccacaagaagaaccucuacgaccacacccucauguccaucaucuccaccuuccaccucuccauccccaacuucaaccaguacgaggccauguccugcgacuucaacggcggcaagaucuccguccaguacaaccucucccacuccuacgccgucgacgccgccaaccacugcggcaccgucgccaacggcguccuccagaccuucaugcgcauggccuggggcggcuccuacaucgcccucgacuccggcugcggcaacugggacugcaucaugaccuccuaccaguaccucaucauccagaacaccaccugggaggaccacugccaguucucccgccccucccccaucggcuaccucggccuccucucccagcgcacccgcgacaucuacaucucccgccgccgccggggcaccuucaccuggacccucuccgacuccgagggcaaggacacccccggcggcuacugccucacccgcuggaugcucaucgaggccgagcucaagugcuucggcaacaccgccgucgccaagugcaacgagaagcacgacgaggaguucugcgacaugcuccgccucuucgacuucaacaagcaggccauccagcgccucaaggcccccgcccagauguccauccagcucaucaacaaggccgucaacgcccucaucaacgaccagcucaucaugaagaaccaccuccgcgacaucaugugcauccccuacugcaacuacucccgcuacugguaccucaaccacaccgucaccggcaagaccucccuccccaagugcuggcucgucuccaacggcuccuaccucaacgagacccacuucuccgacgacaucgagcagcaggccgacaaccucaucaccgagaugcuccagaaggaguacauggagcgccagggcaagaccccccucggccucgucgaccucuucgucuucuccaccuccuucuaccucaucuccaucuuccuccaccucgucaagauccccacccaccgccacaucgucggcaagcccugccccaagccccaccgccucaaccacaugggcaucugcuccugcggcgucuacaagcagcccggcguccccguccgcuggaagcgcuga

SEQ ID NO: 4830 - RNA, 1476 nt, Artificial Sequence
  derived and/or modified protein sequence (opt2) from LASV(Bamba-R114;Clade V)__AHC95555__GPCstabilized
augggccagaucgucaccuucuuccaggaggucccccacgucaucgaggaggucaugaacaucguccucaucgcccucuccauccucgccguccucaagggccucuacaacaucgccaccugcggccucaucggccucgucaccuuccuccuccucugcggccgcuccugcuccuccaaccucuacaagggcgucuacgagcuccagucccucgaccucaacauggagacccucaacaugaccaugccccucuccugcaccaagaacaacucccaccacuacauccgcgccggcaacgagaccggccucgagcucacccucaccaacaccucccucaucaaccacaaguucugcaaccucuccgacgcccacaagaagaaccucuacgaccacacccucauguccaucaucuccaccuuccaccucuccauccccaacuucaaccaguacgaggccauguccugcgacuucaacggcggcaagaucuccguccaguacaaccucucccacgccuacgccaucgacgccgccgagcacugcggcaccgucgccaacggcguccuccagaccuucaugcgcauggccuggggcggcuccuacaucgcccucgacuccggcugcggcaacugggacugcaucaugaccuccuaccaguaccucaucauccagaacaccaccugggaggaccacugccaguucucccgccccucccccaucggcuaccucggccuccucucccagcgcacccgcgacaucuacaucucccgccgccgccggggcaccuucaccuggacccucuccgacuccgagggcaacgccacccccggcggcuacugccucacccgcuggaugcucaucgaggccgagcucaagugcuucggcaacaccgccgucgccaagugcaacgagaagcacgacgaggaguucugcgacaugcuccgccucuucgacuucaacaagcaggccaucucccgccucaagucccccgcccagauguccauccagcucaucaacaaggccgucaacgcccucaucaacgaccagcucaucaugaagaaccaccuccgcgacaucaugugcauccccuacugcaacuacuccaaguacugguaccucaaccacaccaucaccggccgcaccucccuccccaagugcuggcucgucuccaacggcuccuaccucaacgagacccacuucuccgacgacaucgagcagcaggccgacaacaugaucaccgagaugcuccagaaggaguacauggagcgccagggcaagaccccccucggccucgucgaccucuucgucuucuccaccuccuucuaccucaucuccaucuuccuccaccucgucaagauccccacccaccgccacaucgucggcaagcccugccccaagccccaccgccucaaccacaugggcaucugcuccugcggccucuacaagcagcccggcgucccccucaaguggaagcgcuga

SEQ ID NO: 4831 - RNA, 1476 nt, Artificial Sequence
  derived and/or modified protein sequence (opt2) from LASV(Komina-R16;Clade V)__AHC95557__GPCstabilized
augggccagaucgucaccuucuuccaggaggucccccacgucaucgaggaggucaugaacaucguccucaucgcccucuccauccucgccguccucaagggccucuacaacaucgccaccugcggccucaucggccucgucaccuucuuccuccucugcggccgcuccugcuccuccaaccucuacaagggcgucuacgagcuccagucccucgaccucaacauggagacccucaacaugaccaugccccucuccugcaccaagaacaacucccaccacuacauccgcgucggcaacgagaccggccucgagcucacccucaccaacaccucccuccucaaccacaaguucugcaaccucuccgacgcccacaagcgcaaccucuacgaccacgcccucauguccaucaucuccaccuuccaccucuccauccccaacuucaaccaguacgaggccauguccugcgacuucaacggcggcaagaucaccguccaguacaaccucucccacuccuacgccggcgacaccgccaagcacugcggcaccaucgccaacggcguccuccagaccuucaugcgcauggccuggggcggcuccuacaucgcccucgacuccggcugcggcaacugggacugcaucaugaccuccuaccaguaccucaucauccagaacaccaccugggaggaccacugccaguucucccgccccucccccaucggcuaccucggccuccucucccagcgcacccgcgacaucuacaucucccgccgccgccggggcaccuucaccuggacccucuccgacuccgagggcaacgccacccccggcggcuacugccucacccgcuggaugcucaucgaggccgagcucaagugcuucggcaacaccgccgucgccaagugcaacgagaagcacgacgaggaguucugcgacaugcuccgccucuucgacuucaacaagcaggccaucucccgccuccgcucccccgcccagauguccauccagcucaucaacaaggccgucaacgcccucaucaacgaccagcucaucaugaagaaccaccuccgcgacaucaugugcauccccuacugcaacuacuccaaguacugguaccucaaccacaccgucaccggccgcaccucccuccccaagugcuggcucgucuccaacggcuccuaccucaacgagacccacuucuccgacgacaucgagcagcaggccgacaacaugaucaccgagaugcuccagaaggaguacauggaccgccagggcaagaccccccucggccucgucgaccucuucgucuucuccaccuccuucuaccucaucuccaucuuccuccaccucgucaagauccccacccaccgccacaucgucggcaagcccugccccaagccccaccgccucaaccgcaugggcaucugcuccugcggccucuacaagcagcccggcguccccgucaaguggaagcgcuga

SEQ ID NO: 4832 - RNA, 1476 nt, Artificial Sequence
  derived and/or modified protein sequence (opt2) from LASV(Ouoma-R123;Clade V)__AHC95559__GPCstabilized
augggccagaucaucaccuucuuccaggaggucccccacgucaucgaggaggucaugaacaucguccucaucgcccucuccauccucgccguccucaagggccucuacaacaucgccaccugcggccucaucggccucgucaccuuccuccuccucugcggccgcuccugcuccuccucccucuacaagggcgucuacgagcuccagucccucgaccucaacauggagacccucaacaugaccaugccccucuccugcaccaagaacaacucccaccacuacauccgcgucggcaacgagaccggccucgagcucacccucaccaacaccucccucaucaaccacaaguucugcaaccucuccgacgcccacaagaagaaccucuacgaccacgcccucauguccaucaucuccaccuuccaccucuccauccccaacuucaaccaguacgaggccauguccugcgacuucaacggcggcaagaucuccguccaguacaaccucucccacgccuacgccaucgacgccgccucccacugcggcaccgucgccaacggcguccuccagaccuucaugcgcauggccuggggcggcuccuacaucgcccucgacuccggcugcggcaacugggacugcaucaugaccuccuaccaguaccucaucauccagaacaccaccugggaggaccacugccaguucucccgccccucccccaucggcuaccucggccuccucucccagcgcacccgcgacaucuacaucucccgccgccgccggggcaccuucaccuggacccucuccgacuccgagggcaacgccacccccggcggcuacugccucacccgcuggaugcucaucgaggccgagcucaagugcuucggcaacaccgccgucgccaagugcaacgagaagcacgacgaggaguucugcgacaugcuccgccucuucgacuucaacaagcaggccaucucccgccucaagucccccgcccagauguccauccagcucaucaacaaggccgucaacgcccucaucaacgaccagcucaucaugaagaaccaccuccgcgacaucaugugcauccccuacugcaacuacuccaaguacugguaccucaaccacaccgucaccggcaagaccucccuccccaagugcuggcucgucuccaacggcuccuaccucaacgagacccacuucuccgacgacaucgagcagcaggccgacaacaugaucaccgagaugcuccagaaggaguacauggagcgccagggcaagaccccccucggccucgucgaccucuucgucuucuccaccuccuucuaccucaucuccaucuuccuccaccucgucaagauccccacccaccgccacaucgucggcaagcccugccccaagccccaccgccucaaccacaugggcaucugcuccugcggccucuacaagcagcccggcguccccgucaaguggaagcgcuga

SEQ ID NO: 4833 - RNA, 1476 nt, Artificial Sequence
  derived and/or modified protein sequence (opt2) from LASV(Soromba-R;Clade V)__AHC95553__GPCstabilized
augggccagaucgucaccuucuuccaggaggucccccacgucaucgaggaggucaugaacaucguccucaucgcccucuccauccucgccguccucaagggccucuacaacaucgccaccugcggccucaucggccucgucaccuucuuccuccucugcggccgcuccugcuccuccaaccucuacaagggcgucuacgagcuccagucccucgaccucaacauggagacccucaacaugaccaugccccucuccugcaccaagaacaacucccaccacuacauccgcgucggcaacgagaccggccucgagcucacccucaccaacaccucccuccucgaccacaaguucugcaaccucuccgacgcccacaagaagaaccucuacgaccacgcccucauguccaucaucuccaccuuccaccucuccauccccaacuucaaccaguacgaggccauguccugcgacuucaacggcggcaagaucaccguccaguacaaccucucccacuccuacgccggcgacgccgcccgccacugcggcaccaucgccaacggcguccuccagaccuucaugcgcauggccuggggcggcuccuacaucgcccucgacuccggcugcggcaacugggacugcaucaugaccuccuaccaguaccucaucauccagaacaccaccugggaggaccacugccaguucucccgccccucccccaucggcuaccucucccuccucucccagcgcacccgcgacaucuacaucucccgccgccgccggggcaccuucaccuggacccucuccgacuccgagggcaacgccacccccggcggcuacugccucacccgcuggaugcucaucgaggccgagcucaagugcuucggcaacaccgccgucgccaagugcaacgagaagcacgacgaggaguucugcgacaugcuccgccucuucgacuucaacaagcaggccaucucccgccuccgcucccccgcccagauguccauccagcucaucaacaaggccgucaacgcccucaucaacgaccagcucaucaugaagaaccaccuccgcgacaucaugugcauccccuacugcaacuacuccaaguacugguaccucaaccacaccgucaccggccgcaccucccuccccaagugcuggcucgucuccaacggcuccuaccucaacgagacccacuucuccgacgacaucgagcagcaggccgacaacaugaucaccgagaugcuccagaaggaguacauggaccgccagggcaagaccccccucggccucgucgaccucuucgucuucuccaccuccuucuaccucaucuccaucuuccuccaccucgucaagauccccacccaccgccacaucgucggcaagcccugccccaagccccaccgccucaaccgcaugggcaucugcuccugcggccucuacaagcagcccggcguccccgucaaguggaagcgcuga

SEQ ID NO: 4834 - RNA, 1473 nt, Artificial Sequence; identical to SEQ ID NO: 4588
  derived and/or modified protein sequence (opt2) from LASV(Alzey;Clade VI)__SCA79105__GPCstabilized

SEQ ID NO: 4835 - RNA, 1473 nt, Artificial Sequence
  derived and/or modified protein sequence (opt2) from LASV(Lassa/H.sapiens-wt/TGO/2016/201600568;Clade VI)__AVN98153__GPCstabilized
augggccagaucaucaccuucuuccaggaggucccccacgucaucgaggaggucaugaacaucguccucaucgcccucucccuccucgccauccucaagggcgucuacaacgucgccaccugcggcaucaucggccucgucaccuuccucuuccucugcggccgcuccugcucccucaucuacaagggcuccuacgagcuccagacccucgagcucaacauggagacccucaacaugaccaugccccucuccugcaccaagaacuccucccaccacuacauccgcgucggcaacgagaccggccucgagcucacccucaccaacaccuccaucaucaaccacaaguucugcaaccucuccgacgcccacaagcgcaaccucuacgaccacgcccucauguccauccucuccaccuuccaccucuccauccccaacuucaaccaguacgaggccauguccugcgacuucaacggcggcaagaucuccguccaguacaaccucucccacgccuacgccgucgacgccgccgagcacugcggcaccgucgccaacggcguccuccagaccuucaugcgcauggccuggggcggcuccuacaucgcccucgacuccggcugcggcaacugggacugcaucaugaccuccuaccaguaccucaucauccagaacaccaccugggaggaccacugccaguucucccgccccucccccaucggcuaccucggccuccucucccagcgcacccgcgacaucuacaucucccgccgccgccggggcaccuucaccuggacccucuccgacuccgagggcaacgagacccccggcggcuacugccucacccgcuggaugcucaucgaggccgagcucaagugcuucggcaacaccgccgucgccaagugcaacgagaagcacgacgaggaguucugcgacaugcuccgccucuucgacuucaacaagcaggccauccagcgccucaagucccccgcccagauguccauccagcucaucaacaaggccgucaacgcccucaucaacgaccagcucaucaugaagaaccaccuccgcgacaugaugugcauccccuacugcaacuacuccaaguacugguaccucaaccacaccuccuccggccgcgccucccuccccaagugcuggcucgucuccaacggcuccuaccucaacgagacccacuucuccgacgacaucgagcagcaggccgacaacaugaucaccgagaugcuccagaaggaguacaucgaccgccagggcaagaccccccucggccucgucgaccucuucgucuucuccaccuccuucuaccucaucuccaucuuccuccaccucaucaagauccccacccaccgccacaucgucggcaagcccugccccaagccccaccgccucaaccacaugggcaucugcuccugcggccucuacaagcagcccggcguccccacccgcuggaagcgcuga

SEQ ID NO: 4836 - RNA, 1473 nt, Artificial Sequence
  derived and/or modified protein sequence (opt2) from LASV(NIGERIA IKEJI;Clade II)__AMZ00373__GPCstabilized
augggccagaucaucaccuucuuccaggaggucccccacgucaucgaggaggucaugaacaucguccucaucgcccucucccuccucgccauccucaagggcaucuacaacgucgccaccugcggccucuucggccucaucuccuuccucuuccucugcggccgcuccugcuccaccauguacaagggcgucuacgagcuccagacccucgagcucgacauggccaaccucaacaugaccaugccccucuccugcaccaagaacaacucccaccacuacaucauggucggcaacgagaccggccucgagcucacccucaccaaccaguccaucaucaaccacaaguucugcaaccucuccgacgcccacaagaagaaccucuacgaccacacccucauguccaucaucuccaccuuccaccucuccauccccaacuucaaccaguacgaggccauguccugcgacuucaacggcggcaagaucuccguccaguacaaccucucccacuccuacgccgucgacgccgccaaccacugcggcaccgucgccaacggcguccuccagaccuucaugcgcauggccuggggcggcuccuacaucgcccucgacuccggcugcggcaacugggacugcaucaugaccuccuaccaguaccucaucauccagaacaccaccugggaggaccacugccaguucucccgccccucccccaucggcuaccucggccuccucucccagcgcacccgcgacaucuacaucucccgccgccgccggggcaccuucaccuggacccucuccgacuccgagggcaacgacgcccccggcggcuacugccucacccgcuggaugcucaucgaggccgagcucaagugcuucggcaacaccgccaucgccaagugcaacgagaagcacgacgaggaguucugcgacaugcuccgccucuucgacuucaacaagcaggccaucaagcgccucaaggcccccgcccagauguccauccagcucaucaacaaggccgucaacgcccucaucaacgaccagcucaucaugaagaaccaccuccgcgacaucaugugcauccccuacugcaacuacuccaaguacugguaccucaacaacaccgucaccggcaaguccucccuccccaagugcuggcucgucuccaacggcuccuaccucaacgagacccacuucuccgacgacaucgagcagcaggccgacaacaugaucaccgagaugcuccagaaggaguacauggaccgccagggcaagaccccccucggccucgucgaccucuucgucuucuccaccuccuucuaccucaucuccaucuuccuccaccucgucaagauccccacccaccgccacaucaccggcaagcccugccccaagccccaccgccucaaccacaugggcaucugcuccugcggccucuacaagcagcccggcguccccgucaaguggaagcgcuga

SEQ ID NO: 4837 - RNA, 1476 nt, Artificial Sequence
  derived and/or modified protein sequence (opt3) from LASV(Josiah;Clade IV)__NP_694870__GPCstabilized
augggccagaucgugaccuucuuucaagaggucccccacguuauugaagaggugaugaacauaguacugaucgcccucagcgugcuugcuguccugaagggguuguacaauuucgcaacaugcggauuagugggucugguuacuuuucuacuccuguguggcagauccugcacgaccucucuuuauaaagggguguacgaacugcagacauuggagcucaacauggaaacucugaauaugaccaugccucugucauguacaaagaacaauagucaucacuauauuauggucggaaacgagaccggccucgaguuaacucugacaaauaccagcaucauuaaccauaaauucugcaaucuuuccgacgcccacaagaaaaacuuguacgaucaugcgcugaugucuaucauaucgacguuucaccuaucaaucccaaauuucaaccaguaugaagcuaugagcugugacuuuaauggugggaagauuagugugcaguacaaccucucccacucuuaugccggagaugcagccaaucauugcggcacuguagcuaacggcguucugcaaaccuucaugaggauggcauggggagggagcuacaucgcccuugacuccgguugcggcaacugggauuguauuaugacaucauaccaguaucugaucauacagaauacuaccugggaggaccacugccaguuuagucgcccgagccccauuggguacuugggacuccugucucaacgaacacgugauaucuauauuuccagaaggcgccggggcaccuucacguggacucucucagacagcgaagguaaggauacaccugggggauacugucuuacccgguggaugcugaucgaggcugaguugaaaugcuuuggcaacacugccguggcgaaguguaaugaaaaacaugacgaggaguucugcgauaugcuacgccuguuugacuucaacaagcaggcaauccagagacucaaagcccccgcucagaugaguauucaacugauaaauaaggccgucaacgcacuuaucaaugaucagcugauuaugaagaaccacuugagggacaucaugugcauaccauauugcaauuacucuaaauauugguaccucaaccacacaaccacggggcggaccucccugcccaaguguugguuagugagcaauggaucguaccugaacgaaacacauuucucugacgauauugagcagcaagcugacaauaugaucacugagaugcuacagaaagaauauauggagcgccaggguaagaccccucucggccugguggaucuuuuugucuucuccacaucauuuuacuugaucaguauuuuccugcaccucguuaaaaucccaacucaucgacacauugugggaaagagcugccccaaaccucauagacugaaccacauggggauauguuccugcggccuuuauaagcagccagguguaccggugaaguggaaaagguga

SEQ ID NO: 4838 - RNA, 1473 nt, Artificial Sequence
  derived and/or modified protein sequence (opt3) from LASV(LP;Clade I)__AAF86701__GPCstabilized
augggccagaucauuaccuucuuucaagaggugccccacgucauagaagagguuaugaacaucgugcugauugcccucagccuucuggcuaucuugaagggguuauacaauauugcaacaugcggaaucauaggucugguagccuuccuauuucucuguggcaaauccugcucucugacucuuaaagggggauaugaacugcagacguuggagcucaacauggaaacccugaauaugacaaugccucugucauguacuaagaacaguagccaucacuacaucagagugggcaaugagaccggucucgaguuaacacugaccaacacuuccauuaucaaucauaaguucugcaaccuuucugacgcgcacaaaaagaauuuguaugaucaugcucugaugucgauuaucucaacauuucaccuaagcauaccaaacuucaaucaguacgaagccaugaguugugacuuuaacgggggaaagauuuccguccaguauaaucucucucacagcuacgcaggcgaugccgcugagcauugcggcaccguggcaaacgggguucugcaaacguucaugaggauggccuggggaggucgguauaucgcucuugacuccggcugcgggaauugggauuguauuaugacuucauaccaguaccugaucauccagaacaccacaugggaagaccacugccaguuuagucgcccgagccccauuggauauuugggccuccugucucaacgaacucgugauauauacaucuccagaaggcgccgggguaccuucacauggacccucucagacagcgaggggaacgagacgccuggaggcuauugucuuacucgguggaugcugauugaagccgaguugaagugcuuuggcaauacagcgguggcaaaauguaacgaaaagcaugaugaggaguucugcgacaugcuacgccuguuugauuucaauaaacaggccaucagaaggcucaaggcucccgcccagaugaguauacagcugauuaacaaggcagucaaugcucuuaucaacgaccaacugaucaugaaaaaucacuugcgggauauuaugugcaucccauacugcaacuauucuaaguacugguaucucaaucacaccuccagcggacgcacuucgcugcccaaauguugguuaauuucuaacgguuccuaccugaaugagacacaguucucagacgacauagaacagcaagccgauaacaugaucaccgagaugcuacagaaggaauacauugagcgacagggcaaaacgccucucgggcugguggacaucuuuaucuucaguaccagcuuuuaucuuauuuccauauucuugcaucugaucaagauuccaacacacagacauaucguaggaaaacccugcccuaagccacacaggcucaaucauaugggcguuuguucuugcggucuguacaagcacccgggggugcccacuaaauggaagcgguga

SEQ ID NO: 4839 - RNA, 1473 nt, Artificial Sequence
  derived and/or modified protein sequence (opt3) from LASV(803213;Clade II)__AAF86703__GPCstabilized
augggccagaucauuaccuucuuucaagaggugccccacgucauagaagagguuaugaacaucgugcugauugcccucagccuucuggcuaucuugaaggggauuuacaauguagcaacaugcggauuauucggucugaucuccuuucuacuccuguguggcagaucuugcucagugacuuauaaaggggucuacgaacuucagacgcuggaguugaacauggccaaucucaacaugaccaugccucugaguuguacaaagaauaacagccaucacuauauaauggugggaaaugaaacuggccuggagcucaccuuaacaaacaccuccaucauuaaucauaaauucugcaaccugucugacgcgcacaagaaaaaucuuuacgaucaugcuuugaugucgaucauuucaacuuuucaccugagcaucccaaacuucaaucaguaugaggccaugaguugugacuuuaacggugggaagauauccguucaguacaaucuaucucacagcuucgcaguggaugccgcuaaccauugcggaacaauugcaaacggcguccuccaaaccuuuaugaggauggccuggggcggguccuauaucgcucuggacucaggaugcgguaauugggauuguauuaugacgaguuaccaguaccuuaucauccagaacacuaccugggaagaccacugccaguucagccggccgucucccauuggcuaucugggguugcucucccaacgcacacgagauauauacaucucacguagacgccggggaacuuuuaccuggacacugagcgacagugagggcaaugaagccccugguggguauugucucaccagguggaugcuuauugaggcggagcugaaaugcuucggaaacacggcaguggccaaguguaaugaaaaacaugaugaggaauuuugcgacauguugcggcuauucgauuucaacaagcaggcuaucaaacgccugaagacucccgcccagaugucuauacagcucauuaauaaggcaguaaacgcucugaucaaugaccaacuuaucaugaaaaaccaccugagagauauuaugugcaucccauacugcaauuauuccagguacugguauuugaaccacacaguuaccggcaagacuagccucccccgguguuggcuggugucgaaugggucuuacuuaaacgaaacacauuuuuccgacgacauugagcagcaggccgauaauaugauaaccgagaugcugcaaaaagaauacauggaccgccagggaaagacgccucuaggucucgucgaucuguucguguuuucaaccaguuucuaucuuaucagcaucuuuuugcaccuggugaaaauuccaacacaucgacacaucgucggcaagcccugcccuaaaccacauagacucaaccacauggggauuuguuccugcggacuguacaagcacccgggcguucccgugaaguggaaaagguga

SEQ ID NO: 4840 - RNA, 1473 nt, Artificial Sequence
  derived and/or modified protein sequence (opt3) from LASV(GA391;Clade III)__CAA36645__GPCstabilized
augggccagaucgugaccuucuuucaagaggucccccacguuauugaagaggugaugaacauaguacugaucgcccucagcauucuugcuauccugaagggguuguacaauguggcaacaugcggauuaauuggucuggucacuuuccuacuccuguccggcagaucuuguucacuuaucuauaaagggacguacgaacugcagaccuuggagcucaacauggaaacacugaauaugacuaugccucugaguugcaccaagaacaauagccaucacuauauaagggugggaaacgagacaggccucgaguuaacccugacuaauacauccauccuuaaccauaaauuuuguaauuugucugacgcccacaagcggaaccuguacgaucauucgcuaaugucaauuaucagcaccuuccaccucaguauuccaaauuuuaaccaguaugaagcgauguccugcgacuucaauggugggaaaaucacgguucaguacaaccugucucacagcuuugcuguggaugccgcaggacauuguggcacucuugccaauggcguccugcaaaccuucaugcgcauggcuuggggaggguccuauauagcauuggacucagguugcggcaacugggauugcauuaugacaaguuaccaguaccucaucauucagaacacuaccugggacgaucacugucaguuuagccguccgucucccaucggguaucugggauuacugucccaaagaacaagggacaucuacauuucacggcgccgccggggcaccuucacguggacucugagcgauagugaggguaaugaaacaccugggggauauugcuugaccagauggaugcuaauagaggccgagcugaaguguuuuggcaacacugcuguggccaagugcaaugaaaaacaugacgaggaguucugugauaugcucaggcuguuugacuucaacaagcaggcgauccggcgccuuaaaacacccgcacagaugucuauucagcugaucaauaaggccguaaacgcuuugauaaaugaucaacucauuaugaaaaaccaucugcgagacaucaugugcaucccauacugcaauuauuccagauacugguauuuaaaccacaccagcacggggaagaccucgcugcccaggugcuggcuaauuucuaauggauccuaccucaacgaaacaaaguucucagacgauaucgagcagcaggccgacaauaugauuacugagaugcugcaaaaagaauacauagaucggcaggguaagaccccucuuggcuugguugaccuguuuguguucaguacuagcuuuuaucucaucuccauuuuccugcaccuugucaaaaucccaacacaccgucauaucguggggaagcccuguccuaaaccacaccgccugaaccauaugggaauuugcucuuguggcuuguacaagcagccgggugugcccgucagauggaaaagguga

SEQ ID NO: 4841 - RNA, 1476 nt, Artificial Sequence
  derived and/or modified protein sequence (opt3) from LASV(AV;Clade V)__CCA30314__GPCstabilized
augggccagaucgugaccuucuuucaagaggucccccacguuauugaagaggugaugaacauaguacugaucgcccucagcauucuugcugugcugaagggguuguacaauaucgcaacaugcggauuaauuggucugaucacuuuccuacuccuguguggcagauccugcagcucaaaccuuuauaaaggggucuacgaacugcagaguuuggaccucaauauggagacgcugaacaugaccaugccucugagcuguacaaagaauaacucccaucacuauauaagggugggaaaugauacuggccucgaauuaacccugacaaacaccucuauccuuaaucauaaauuuugcaacuugucggacgcccacaagaaagaucuguacgaccaugcgcuaaugucaauuaucagcacuuuccaccucaguauuccaaauuuuaaccaguaugaggcuauguccugugauuucaauggugggaagaucucuguucaguacaaccugagccacuccuaugccauagacgcagccaaucauugcggaacaguggcuaacggcauucuucaaaccuuuaugcggauggcauggggcgggucauacaucgcccuggauaguggaugcgguaacugggacuguauuaugacgagcuaccaguauuugaucauccagaauacuaccugggagaaccacugccaguucucucgaccgucccccauuggcuaccucgggcuguuaucacaacguacaagagauauauauaucagcaggcggcgccggggaacuuuuaccuggacacuuagugacucugaaggcaaugcuaccccugguggguacugucugacgcgcuggauguugauugaggccgaacuaaagugcuucggaaacacugcggucgcaaaauguaaugagaagcaugaugaggaauuuugcgacaugcugagacucuucgauuuuaacaaacaggccaucuccaggcugaagucucccgcucagaugucgauacagcuuauuaauaaagccgugaacgcacugaucaaugaccaauugaucaugaagaaccaccuccgggacauuaugugcaucccauauugcaauuacucuaaguauugguaccugaaccacacaauuaccggcaaaacuuccuuacccaaguguuggcugguaucaaaugggaguuaccuaaacgaaacacauuucagcgaugacauagagcagcaggcugauaauaugaucaccgaaaugcuccaaaaagaguauauggagcgccagggaaagacgccucugggucuuguugacuuguucguguuuuccaccucuuucuaccugauuagcaucuuucuccgacuggucaaaaucccaacacacagacauauugugggcaagcccugcccuaaaccacacaggcuuaaccauauggggauauguucaugcggacuguauaagcagccgggcgugcccguccgguggaagcguuga

SEQ ID NO: 4842 - RNA, 1473 nt, Artificial Sequence
  derived and/or modified protein sequence (opt3) from LASV(Togo/2016/7082;Clade VI)__AMR44577__GPCstabilized
augggccagaucauuaccuucuuucaagaggugccccacgucauagaagagguuaugaacaucgugcugauugcccucagccuucuggcuaucuugaaggggguauacaauguggcaacaugcggaauuaucgguuuagucacuuuccuguuucuauguggcagauccugcucucucauauauaaagggucauacgaacugcagacgcuugagcugaacauggaaaccuugaauaugacaaugccucucaguuguacuaagaacagcucccaucacuauaucagggugggaaaugagaccggccuggagcugacacucaccaacacuucuauuaucaaucauaaauucugcaacuuaucggacgcccacaagcggaaucuguacgaucaugcgcuuaugucaauuuugagcacauuucaccugaguaucccaaacuucaaucaguaugaagcuauguccugugacuuuaacggugggaaaauaucuguucaguacaaucuaagccacgccuaugcaguggaugccgcugagcauugcggaaccgucgcaaacggcgugcuccaaacguucaugcgcauggccuggggcggguccuacauugcucuggacucaggaugcgguaauugggauuguaucaugaccaguuaccaguaucuuauuauccagaacacuacaugggaagaccacugccaguuuagccguccgucucccaucggcuaccugggguugcucucccaaagaacuagggauauuuauauaucacggcgccgccggggaaccuucacauggacccugagcgacagugagggcaacgagacgccugguggguacugucucacuagauggaugcuuaucgaagccgagcugaagugcuuuggaaauacagcgguagcaaaguguaacgaaaaacaugaugaggaguucugcgacauguugaggcuauuugauuucaauaagcaggccauucagcggcugaaaucucccgcucagauguccauccaacucauaaacaaggccguuaaugcacugauuaacgaccagcuuaucaugaaaaaucaucugcgcgauaugaugugcaucccauauugcaacuacagcaaguauugguacuugaaucacaccucgucuggccgaacuucccuccccaaguguuggcuggugucaaacgggaguuacuuaaaugagacacacuucagcgacgacauugaacagcaagcugauaacaugaucaccgagaugcugcagaaagaauauauugacagacagggaaagacgccucuaggucucgucgaucuguuuguguucuccaccucuuuuuaccuuauaagcaucuucuugcaccugauuaaaaucccaacacauaggcacaucgugggcaagcccugcccuaaaccacaucggcucaaucacauggggauuuguucaugcggacuguauaagcagccgggcguccccacucguuggaaacgcuga

SEQ ID NO: 4843 - RNA, 1473 nt, Artificial Sequence
  derived and/or modified protein sequence (opt3) from LASV(KAK-428;Clade n.d. (VII))__ANH09740__GPCstabilized
augggccagaucgugaccuucuuucaagaggucccccacguuauugaagaggugaugaacauaguacugaucgcccucagccuucuggcuauuuugaagggguuauacaauuucgcaacaugcggagugaucggucugauuacuuuucuacuccuguguggcagauccugcucugccacguauaaagggcaguacgaacuucagacccuggaguugaacauggaaucacucaauaugacaaugccucugaguuguacuaagaacaauagccaucacuauaucagggcgggaaacaauaccggccuggagcucacauuaaccaacacuuccauaaucucucauaaauucugcaaucugucggacgcucacaagaaaaaccuuuacgaucauacauugaugucaauuaucaccacguuucaccugagcauuccaaauuucaaccaguaugaggccaugaguugugacuuuaauggugggaagaucuccauacaauacaaccuaucucacagcuaugcaggagaugccgcucagcauugcggcacugucgcaaauggcgugcuccagaccuucaugcggauggccuggggaggguccuaccuggcucuugacucagguugccgaggcugggauuguauuaucaguagcuaccaguaucugauuauccaaaacacaacuugggacgaucacugccaguuuucucguccgucccccaucggguacuugggauucguuucacagaagaccagagacauuuauauaagcaggcggcgccggggcacauuuaccuggacguuaagugauucugaaggucaugacaugccugggggauacugucugacucgcuggaugcucaucgaggccgaucuuaaaugcuucggcaacacagcgguggcaaaguguaaugaaaaacacgacgaggaguuuugcgauauguggagacuguucgacuucaacaagcaggccauucaaagguugaaagcucccgcccagaugaauauccagcuaauaaacaaggcagucaaugcucugauuaacgaccaacucaugaugaagaaucaucugcgggauaucaugugcaucccauauugcaacuacuccaaauuuugguaucuuaauaacaccacuacagggcgcaccagccugccccgauguugguugauuucgaauggaucuuaccucaacgagacgcacuucuccgacgauaucgaacagcaggccgacaauaugauuaccgagaugcugcagaaggaauacauggauagacaagguaaaacaccuuuaggccugguggaccuauuuguauucucaaccaguuuuuaucucauaacuaucuuccugcaccuuguuaagauuccaacacauaggcacaucguggggaaacccugcccuaagccacaucgguugaaccacaugggaaucuguagcugcggccuguacaaacagccggguguccccgugcguuggaagcgcuga

SEQ ID NO: 4844 - RNA, 1473 nt, Artificial Sequence
  derived and/or modified protein sequence (opt3) from LASV(Acar 3080;Clade I)__AAT49014__GPCstabilized
augggccagaucauuaccuucuuucaagaggugccccacgucauagaagagguuaugaacaucgugcugauugcccucagccuucuggcuaucuugaagggguuauacaauauugcaacaugcggaaucauaggucugguagccuuccuauuucucuguggcaaauccugcucucugacucuuaaagggggauaugaacugcagacguuggagcucaacauggaaacccugaauaugacaaugccucugucauguacuaagaacaguagccaucacuacaucagagugggcaaugagaccggucucgaguuaacacugaccaacacuuccauuaucaaucauaaguucugcaaccuuucugacgcgcacaaaaagaauuuguaugaucaugcucugaugucgauuaucucaacauuucaccuaagcauaccaaacuucaaucaguacgaagccaugaguugugacuuuaacgggggaaagauuuccguccaguauaaucucucucacagcuacgcaggcgaugccgcugagcauugcggcaccguggcaaacgggguucugcaaacguucaugaggauggccuggggaggucgguauaucgcucuugacuccggcugcgggaauugggauuguauuaugacuucauaccaguaccugaucauccagaacaccacaugggaagaccacugccaguuuagucgcccgagccccauuggauauuugggccuccugucucaacgaacucgugauauauacaucuccagaaggcgccgggguaccuucacauggacccucucagacagcgaggggaacgagacgccuggaggcuauugucuuacucgguggaugcugauugaagccgaguugaagugcuuuggcaauacagcgguggcaaaauguaacgaaaagcaugaugaggaguucugcgacaugcuacgccuguuugauuucaauaaacaggccaucagaaggcucaaggcucccgcccagaugaguauacagcugauuaacaaggcagucaaugcucuuaucaacgaccaacugaucaugaaaaaucacuugcgggauauuaugugcaucccauacugcaacuauucuaaguacugguaucucaaucacaccuccagcggacgcacuucgcugcccaaauguugguuaauuucuaacgguuccuaccugaaugagacacaguucucagacgacauagaacagcaagccgaucauaugaucaccgagaugcuacagaaggaauacauugagcgacagggcaaaacgccucucgggcugguggacaucuuuaucuucaguaccagcuuuuaucuuauuuccauauucuugcaccugaucaagauuccaacacauagacacaucguaggaaaacccugcccuaagccacauaggcucaaccacaugggcguuuguucuugcggucuguacaagcacccgggggugcccacuaaauggaagcgguga

SEQ ID NO: 4845 - RNA, 1473 nt, Artificial Sequence; identical to SEQ ID NO: 4838
  derived and/or modified protein sequence (opt3) from LASV(Pinneo-NIG-1969;Clade I)__AIT17836__GPCstabilized

SEQ ID NO: 4846 - RNA, 1473 nt, Artificial Sequence
  derived and/or modified protein sequence (opt3) from LASV(ISTH0009-NIG-2011;Clade II)__AIT17404__GPCstabilized
augggccagaucauuaccuucuuucaagaggugccccacgucauagaagagguuaugaacaucgugcugauugcccucagccuucuggcuaucuugaaggggauuuacaauguagcaacaugcggauuauucggucugguguccuuucuacuccuguguggcagaucuugcucaacuacguauaaaggggucuacgaacuucagacccuggaguuggacauggccagucucaacaugacaaugccucugagcuguacuaagaauaacucccaucacuauaucauggugggaaaugaaaccggccuggagcucacauuaaccaacacuucuauaaucaaucauaaauucugcaaccugucggaugcgcacaagaaaaaucuuuacgaccaugcuuugaugucaauuaucagcacauuucaccugaguauuccaaacuucaaucaguaugaggccauguccugugauuuuaacggugggaagaucucuguucaguacaaucuaagccacgcauaugccguggacgcugcaaaccauugcggaaccauagccaauggcguccuccaaacguucaugaggauggcuuggggcggguccuacauugcccuggauucaggaugcgguaguugggacuguaucaugacuagcuaccaguaucuuauuauccagaacaccacaugggaagaucacugccaguuuucucggccgucccccaucggcuaccugggguugcucucacaacgcacucgagacauuuauauaagccguagacgccggggaaccuucacauggacccugagugauucugagggcaacgaaacgccugguggguacugucucacuagguggaugcuuaucgaggcggagcugaaaugcuuuggaaauacagcaguggccaaguguaacgaaaaacaugacgaggaguucugcgauauguugcggcuauuugacuucaauaagcaggcuauucgcagacugaaaacccccgcccagauguccauccagcucauaaacaaggcaguaaaugcucugauuaacgaucaacuuaucaugaagaaucaccugagggacaucaugugcauuccauauugcaacuacagcaaauauugguacuugaaucacacuguuacaggcaagaccucgcucccccgguguuggcuggugucuaacggguccuacuuaaaugaaacgcauuucucagacgauaucgagcagcaggccgacaacaugauuaccgagcugcuacaaaaagaauauauggaucgccagggaaagacaccucucggucuggucgaccuuuuuguguucaguacuagcuuuuacuugauauccaucuuccugcaccucauuaaaaucccaacccaucgacacaucacaggcaagcccugcccuaaaccacauagacugaaucacauggggauuuguucuugcggacuuuauaagcacccgggcgugcccgucaaguggaaaagguga

SEQ ID NO: 4847 - RNA, 1473 nt, Artificial Sequence
  derived and/or modified protein sequence (opt3) from LASV(ISTH0012-NIG-2011;Clade II)__AIT17408__GPCstabilized
augggccagaucauuaccuucuuucaagaggugccccacgucauagaagagguuaugaacaucgugcugauugcccucagccuucuggcuaucuugaaggggauuuacaauguagcaacaugcggauuauucggucugguguccuuucuacuccuguguggcagaucuugcucaacuacguauaaaggggucuacgaacuucagacccuggaguuggacauggccagucucaacaugacaaugccucugagcuguacuaagaauaacucccaucacuauaucauggugggaaaugaaaccggccuggagcucacauuaaccaacacuucuauaaucaaucauaaauucugcaaccugucggaugcgcacaagaaaaaucuuuacgaccaugcuuugaugucaauuaucagcacauuucaccugaguauuccaaacuucaaucaguaugaggccauguccugugauuuuaacggugggaagaucucuguucaguacaaucuaagccacaccuaugcaguggacgccgcuaaccauugcggaacggucgcaaauggcgugcuccaaacuuucaugaggauggccuggggcggguccuacauagcucuggauucaggaugcgguaguugggacuguauuaugaccagcuaccaguaucuuaucauucagaacacaacuugggaagaucacugccaguuuucucggccgucccccaucggcuaccugggguugcucucacaacgcacccgagacaucuauauuagccguagacgccggggaacauucaccuggacgcugagugauucugagggcaacgaaacuccugguggguacugucucacaagguggaugcuuauagaggccgagcugaaaugcuuuggaaauaccgcgguagcaaaguguaacgaaaaacaugacgaggaguucugcgauauguugcggcuauuugacuucaauaagcaggccauccgcagacugaaaacucccgcucagauguccauucagcucaucaacaaggccguuaaugcacugauaaacgaucaacuuauuaugaagaaucaccugagggacaucaugugcaucccauauugcaacuacagcaaauauugguacuugaaucacacagugaccggcaagacgucgcucccccgguguuggcuggucucuaacggguccuacuuaaaugaaacccauuucucagacgauauugagcagcaggcugacaacaugaucacagagcugcuacaaaaagaauauauggaucgccagggaaagacuccucucggucugguggaccuuuuuguguucaguaccagcuuuuacuugauuuccauauuccugcaccucgucaaaaucccaacacaucgacacguuauuggcaagcccugcccuaaaccacauagacugaaucacauggggaucuguucuugcggacuuuauaagcacccgggcgugcccguaaaguggaaaagguga

SEQ ID NO: 4848 - RNA, 1473 nt, Artificial Sequence
  derived and/or modified protein sequence (opt3) from LASV(ISTH0047-NIG-2011;Clade II)__AIT17412__GPCstabilized
augggccagaucauuaccuucuuucaagaggugccccacgucauagaagagguuaugaacaucgugcugauugcccucagccuucuggcuaucuugaaggggauuuacaauguagcaacaugcggauuauucggucugguguccuuucuacuccuguguggcagaucuugcucaacuacguauaaaggggucuacgaacuucagacccuggaguuggacauggccagucucaacaugacaaugccucugagcuguacuaagaauaacucccaucacuauaucauggugggaaaugaaaccggccuggagcucacauuaaccaacacuucuauaaucaaucauaaauucugcaaccugucggaugcgcacaagaaaaaucuuuacgaccaugcuuugaugucaauuaucagcacauuucaccugaguauuccaaacuucaaucaguaugaggccauguccugugauuuuaacggugggaagaucucuguucaguacaaucuaagccacgcauaugccguggacgcugcaaaccauugcggaaccauagccaauggcguccuccaaacguucaugaggauggcuuggggcggguccuacauugcccuggauucaggaugcgguaguugggacuguaucaugacuagcuaccaguaucuuauuauccagaacaccucuugggaagaucacugccaguuuucccggccgucacccaucggcuaccugggguugcucagccaacgcacacgagacauuuauauaagucguagacgccggggaacuuucaccuggacacugucugauuccgagggcaacgaaaccccugguggguacugucucacgagguggaugcuuaucgaggcggagcugaaaugcuuuggaaauacugcaguggccaaguguaacgaaaaacaugacgaggaguucugcgauauguugcggcuauuugacuucaauaagcaggcuauucgcagacugaaaacacccgcccagaugagcauccagcucauaaacaaggcaguaaaugcucugauuaacgaucaacuuaucaugaagaaucaccugagggacaucaugugcauuccauauugcaacuacucgaaauauugguacuugaaucacaccguuacuggcaagacaucucucccccgguguuggcugguguccaacgggucauacuuaaaugaaacccauuucagugacgauaucgagcagcaggccgacaacaugauuacggagcugcuacaaaaagaauauauagaucgccagggaaagaccccucucggucuggucgaccuuuuuguguucagcacauccuuuuacuugaucucuauuuuccugcaccucgugaaaaucccaacucaucgacacgucaucggcaagcccugcccuaaaccacauagacugaaucacauggggauuuguagcugcggacuuuauaagcacccgggcguucccgugaaguggaaaagguga

SEQ ID NO: 4849 - RNA, 1473 nt, Artificial Sequence
  derived and/or modified protein sequence (opt3) from LASV(ISTH0073-NIG-2011;Clade II)__AIT17416__GPCstabilized
augggccagaucauuaccuucuuucaagaggugccccacgucauagaagagguuaugaacaucgugcugauugcccucagccuucuggcuaucuugaaggggauuuacaauguagcaacaugcggauuauucggucugguguccuuucuacuccuguguggcagaucuugcucaacuacguauaaaggggucuacgaacuucagacccuggaguuggacauggccagucucaacaugacaaugccucugagcuguacuaagaauaacucccaucacuauaucauggugggaaaugaaaccggccuggagcucacauuaaccaacacuucuauaaucaaucauaaauucugcaaccugucggaugcgcacaggaagaaucuuuacgaccaugcuuugaugucaauuaucagcacauuucaccugaguauuccaaacuucaaucaguaugaggccauguccugugauuuuaacggugggaaaaucucuguucaguacaaucuaagccacgcauaugccguggacgcugcaaaccauugcggaaccauagccaauggcguccuccaaacguucaugcggauggcuuggggcggguccuacauugcccuggauucaggaugcgguaguugggacuguaucaugacuagcuaccaguaucuuauuauccagaacaccucuugggaagaucacugccaguuuucccgcccgucacccaucggcuaccugggguugcucagccaacgaacacgugacauuuauauaaguagaaggcgccggggaacuuucaccuggacacugucugauuccgagggcaacgaaaccccugguggguacugucucacgcgguggaugcuuaucgaggcggagcugaagugcuuuggaaauacugcaguggccaaauguaacgaaaagcaugacgaggaguucugcgauauguugcgccuauuugacuucaauaaacaggcuauuagaaggcugaagacacccgcccagaugagcauccagcucauaaacaaagcaguaaaugcucugauuaacgaucaacuuaucaugaagaaucaucugcgggacaucaugugcauuccauauugcaacuacucgaaguauugguacuugaaucacaccguuacuggcaaaacaucucucccccgcuguuggcugguguccaacgggucauacuuaaaugaaacccacuucagugacgauaucgagcagcaggccgacaacaugauuacggagcugcuacaaaaggaauauauagaucgacagggaaaaaccccucucggucuggucgaccuuuuuguguucagcacauccuuuuacuugaucucuauuuuccugcaccucgugaagaucccaacucauagacacgucaucggcaaacccugcccuaagccacauaggcugaaucacauggggauuuguagcugcggacuuuauaaacacccgggcguucccgugaaguggaagcgguga

SEQ ID NO: 4850 - RNA, 1473 nt, Artificial Sequence
  derived and/or modified protein sequence (opt3) from LASV(ISTH0230-NIG-2011;Clade II)__AIT17420__GPCstabilized
augggccagaucauuaccuucuuucaagaggugccccacgucauagaagagguuaugaacaucgugcugauugcccucagccuucuggcuaucuugaaggggauuuacaauguagcaacaugcggauuauucggucugguguccuuucuacuccuguguggcagaucuugcucaacuacguauaaaggggucuacgaacuucagacccuggaguuggacauggccagucucaacaugacaaugccucugagcuguacuaagaauaacucccaucacuauaucauggugggaaaugaaaccggccuggagcucacauuaaccaacacuucuauaaucaaucauaaauucugcaaccugucggaugcgcacaagaaaaaucuuuacgaccaugcuuugaugucaauuaucagcacauuucaccugaguauuccaaacuucaaucaguaugaggccauguccugugauuuuaacggugggaagaucucuguucaguacaaucuaagccacaccuaugcaguggacgccgcuaaccauugcggaacgauagcaaauggcguccuccaaacuuucaugaggauggccuggggcggguccuacauugcucuggauucaggaugcgguaguugggacuguaucaugaccagcuaccaguaucuuauuauccagaacacaacuugggaagaucacugccaguuuucucggccgucccccaucggcuaccugggguugcucucacaacgcacccgagacauuuauauaagccguagacgccggggaacauucaccuggacgcugagugauucugagggcaacgaaacuccugguggguacugucucacaagguggaugcuuaucgaggccgagcugaaaugcuuuggaaauaccgcgguggcaaaguguaacgaaaaacaugacgaggaguucugcgauauguugcggcuauuugacuucaauaagcaggccauucgcagacugaaaacucccgcucagauguccauccagcucauaaacaaggccguaaaugcacugauuaacgaucaacuuaucaugaagaaucaccugagggacaucaugugcauuccauauugcaacuacagcaaauauugguacuugaaucacacaguuaccggcaagacgucgcucccccgguguuggcuggugucuaacggguccuacuuaaaugaaacccauuucucagacgauaucgagcagcaggcugacaacaugauuacagagcugcuacaaaaagaauauauggaucgccagggaaagacuccucucggucuggucgaccuuuuuguguucaguaccagcuuuuacuugauauccaucuuccugcaccucauuaaaaucccaacacaucgacacaucacuggcaagcccugcccuaaaccacauagacugaaucacauggggauuuguucuugcggacuuuauaagcacccgggcgugcccgucaaguggaaaagguga

SEQ ID NO: 4851 - RNA, 1473 nt, Artificial Sequence
  derived and/or modified protein sequence (opt3) from LASV(ISTH0531-NIG-2011;Clade II)__AIT17424__GPCstabilized
augggccagaucauuaccuucuuucaagaggugccccacgucauagaagagguuaugaacaucgugcugauugcccucagccuucuggcuaucuugaaggggauuuacaauguagcaacaugcggauuauucggucugguguccuuucuacuccuguguggcagaucuugcucaacuacguauaaaggggucuacgaacuucagacccuggaguuggacaugacaaaccucaauaugacuaugccucugaguuguaccaagaacaauagccaucacuauaucauggugggaaacgaaacaggccuggagcucaccuuaacuaauacauccauaaucaaccauaaauucugcaaucugucugaugcccacaagaaaaaccuuuacaaucaugcguugaugucgauuaucucaaccuuucaccugagcauuccaaacuucaaucaguaugaggcuaugaguugugacuuuaacggugggaagaucuccguucaguacaaucuaucucacgccuaugcaguggaugccgcuaaccauugcggaacgauagcaaacggcguccuccaaacuuucaugaggauggccuggggcgggagcuacauugcucuggacuccggaugcgguucaugggauuguaucaugaccaguuaccaguaucuuauuauccagaauacaacuugggaagaccacugccaguuuagccggccgucucccaucggcuaccugggguugcucucccaacgcacccgagauauuuauauaucacguagacgccggggaacauucaccuggacgcugagcgacagugagggcaacgaaacuccugguggguacugucucacaagguggaugcuuaucgaggccgagcugaaaugcuuuggaaauaccgcgguggcaaaguguaacgaaaaacaugaugaggaguucugcgacauguugcggcuauuugauuucaauaagcaggccauucgcagacugaaaacucccgcucagacaaacauccagcucauaaauaaggccguaaacgcacugauuaaugaccaacuuaucaugaagaaccaccugagggauaucaugugcauuccauauugcaauuacucuaaauauugguacuugaaccacaccguuacgggcaagaccucccucccccgguguuggcuggugagcaaugggucguacuuaaacgaaacacauuucucugacgacaucgagcagcaggcugauaauaugauuacugagcugcuacaaaaagaauauauggaccgccagggaaagaccccucucggucuggucgaucuuuuuguguucuccacaucauuuuacuugauaaguaucuuccugcaccucgugaaaauuccaacucaucgacacaucaucggcaagcccugcccuaaaccacauagacugaaccacauggggauuuguagcugcggacuuuauaagcacccgggcguccccguuaaguggaaaagguga

SEQ ID NO: 4852 - RNA, 1473 nt, Artificial Sequence
  derived and/or modified protein sequence (opt3) from LASV(ISTH0595-NIG-2011;Clade II)__AIT17428__GPCstabilized
augggccagaucauuaccuucuuucaagaggugccccacgucauagaagagguuaugaacaucgugcugauugcccucagccuucuggcuaucuugaaggggauuuacaauguagcaacaugcggauuauucggucugguguccuuucuacuccuguguggcagaucuugcucaacuacguauaaaggggucuacgaacuucagacccuggaguuggacauggccagucucaacaugacaaugccucugagcuguacuaagaauaacucccaucacuauaucauggugggaaaugaaaccggccuggagcucacauuaaccaacacuucuauaaucaaucauaaauucugcaaccugucggaugcgcacaagaaaaaucuuuacgaccaugcuuugaugucaauuaucagcacauuucaccugaguauuccaaacuucaaucaguaugaggccauguccugugauuuuaacggugggaagaucucuguucaguacaaucuaagccacaccuaugcaguggacgccgcuaaccauugcggaacgauagcaaauggcguccuccaaacuuucaugaggauggccuggggcggguccuacauugcucuggauucaggaugcgguaguugggacuguaucaugaccagcuaccaguaucuuauuauccagaacacaacuugggaagaucacugccaguuuucucggccgucccccaucggcuaccugggguugcucucacaacgcacccgagacauuuauauaagccguagacgccggggaacauucaccuggacgcugagugauucugagggcaacgaaacuccugguggguacugucucacaagguggaugcuuaucgccgcggaccugaaaugcuuuggaaauaccgcaguggccaaguguaacgagaaacaugaugaggaguucugcgacauguugcggcuauuugauuucaauaagcaggcuauugaacgccugaaaacucccgcccagauguccauccagcucauaaacaaggcaguaaaugcucugauuaacgaccaacuuaucaugaagaaucaccugagagacaucaugugcauuccauauugcaacuacagcaaauauugguacuugaaucacacaguuaccggcaggacgucgcucccccgguguuggcuggugucuaacggguccuacuuaaaugagacccauuucucagaugacaucgaacagcaggccgauaacaugauuacagagcugcuacaaaaggaguauauggaccgccagggaaaaacuccucucggucuggucgaucuuuuuguguucaguaccagcuuuuacuugauauccaucuuccugcaccucgugcgaaucccaacacauagacacgucauuggcaagcccugcccuaaaccacauaggcugaaucacauggggaucuguucuugcggacuuuauaagcacccgggcguucccgugaaauggaagcgguga

SEQ ID NO: 4853 - RNA, 1473 nt, Artificial Sequence
  derived and/or modified protein sequence (opt3) from LASV(ISTH0964-NIG-2011;Clade II)__AIT17430__GPCstabilized
augggccagaucauuaccuucuuucaagaggugccccacgucauagaagagguuaugaacaucgugcugauugcccucagccuucuggcuaucuugaaggggauuuacaauguagcaacaugcggauuauucggucugguguccuuucuacuccuguguggcagaucuugcucaacuacguauaaaggggucuacgaacuucagacccuggaguuggacauggccagucucaacaugacaaugccucugagcuguacuaagaauaacucccaucacuauaucauggugggaaaugaaaccggccuggagcucacauuaaccaacacuucuauaaucaaucauaaauucugcaaccugucggaugcgcacaagaaaaaucuuuacgaccaugcuuugaugucaauuaucagcacauuucaccugaguauuccaaacuucaaucaguaugaggccauguccugugauuuuaacggugggaggaucucuguucaguacaaucuaagccacaccuaugcaguggacgccgcuaagcauugcggaacgauagcaaacggcguccuccaaacuuucaugcggauggccuggggcggguccuacauugcucuggauucaggaugcgguaguugggacuguaucaugaccagcuaccaguaucuuauuauccagaauacaacuugggaagaucacugccaguuuucucgcccgucccccaucggcuaccugggguugcucucacaacgaacccgugacauuuauauaagcagaaggcgccggggaacauucaccuggacgcugagugauucugagggcaacgaaacuccugguggguacugucucacacgguggaugcuuaucgaggccgagcugaaaugcuuuggaaacaccgcgguggcaaaguguaaugaaaaacaugacgaggaguucugcgauauguugcgccuauuugacuucaacaagcaggccauuagaaggcugaaaacucccgcucagauguccauccagcucauaaauaaggccguaaacgcacugauuaaugaucaacuuaucaugaagaaccaucugcgggacaucaugugcauuccauauugcaauuacagcaaauauugguacuugaaccacacaguuaccggcaagacgucgcucccccgcuguuggcuggugucuaauggguccuacuuaaacgaaacccacuucucagacgauaucgagcagcaggcugacaauaugauuacagagcugcuacaaaaagaauauauagaucgacagggaaagacuccucucggucuggucgaccuuuuuguguucaguaccagcuuuuacuugaucuccauuuuccugcaccucgugaaaaucccaacacauagacacgucaucggcaagcccugcccuaaaccacauaggcugaaccacauggggauuuguucuugcggacuuuauaagcacccgggcguucccgugaaguggaaacgguga

SEQ ID NO: 4854 - RNA, 1473 nt, Artificial Sequence
  derived and/or modified protein sequence (opt3) from LASV(ISTH1038-NIG-2011;Clade II)__AIT17438__GPCstabilized
augggccagaucauuaccuucuuucaagaggugccccacgucauagaagagguuaugaacaucgugcugauugcccucagccuucuggcuaucuugaaggggauuuacaauguagcaacaugcggauuauucggucugguguccuuucuacuccuguguggcagaucuugcucaacuacguauaaaggggucuacgaacuucagacccuggaguuggacauggccaaccucaauaugacaaugccucugaguuguacuaagaacaauagccaucacuauaucagggugggaaacgaaaccggccuggagcucacauuaaccaauacuuccauaaucucucauaaauucugcaaccugucggaugcgcacaagaaaaaucuuuacgaccaugcuuugaugucaauuaucagcacauuucaccugaguauuccaaacuucaaucaguaugaggccauguccugugauuuuaacggugggaagaucucuguucaguacaaucuaagccacaccuaugcaguggacgccgcuaaccauugcggaacgauagcaaauggcguccuccaaacuuucaugcggauggccuggggcggguccuacauugcucuggauucaggaugcgguaguugggacuguaucaugaccagcuaccaguaucuuauuauccagaacacaacuugggaagaucacugccaguuuucucgcccgucccccaucggcuaccugggguugcucucacaacgaacccgugacauuuauauaagcagaaggcgccggggaacauucaccuggacgcugagugauucugagggcaaagaaacuccugguggguacugucucacacgguggaugcuuaucgaggccgagcugaagugcuuuggaaacaccgcgguggcaaaauguaaugaaaagcaugacgaggaguucugcgauauguugcgccuauuugacuucaacaaacaggccauuagaaggcugaagacucccgcucagaugaauauccagcucauaaacaaggccguaaaugcacugauuaacgaucaacuuaucaugaaaaaucaucugcgggacaucaugugcauuccauauugcaacuacuccaaguauugguacuugaaucacacaguuaccggcaaaacgagccucccccgcuguuggcuggugucgaacgggucuuacuuaaaugaaacccacuucuccgacgauaucgagcagcaggcugacaacaugauuacagagcugcuacaaaaggaauauauagaucgacagggaaaaacuccucucggucuggucgaccuuuuuguguucucaaccaguuuuuacuugaucagcauuuuccugcaccucgugaagaucccaacacauagacacgucaucggcaaacccugcccuaagccacauaggcugaaucagauggggauuuguuccugcggacuuuauaagcagccgggcguucccgugaaauggaagcgguga

SEQ ID NO: 4855 - RNA, 1473 nt, Artificial Sequence
  derived and/or modified protein sequence (opt3) from LASV(ISTH1048-NIG-2011;Clade II)__AIT17442__GPCstabilized
augggccagaucauuaccuucuuucaagaggugccccacgucauagaagagguuaugaacaucgugcugauugcccucagccuucuggcuaucuugaaggggauuuacaauguagcaacaugcggauuauucggucugguguccuuucuacuccuguguggcagaucuugcucaacuacguauaaaggggucuacgaacuucagacccuggaguuggacauggccagucucaacaugacaaugccucugagcuguacuaagaauaacucccaucacuauaucauggugggaaaugaaaccggccuggagcucacauuaaccaacacuucuauaaucaaucauaaauucugcaaccugucggaugcgcacaggaagaaucuuuacgaccaugcuuugaugucaauuaucagcacauuucaccugaguauuccaaacuucaaucaguaugaggccauguccugugauuuuaacggugggaaaaucucuguucaguacaaucuaagccacgcauaugccguggacgcugcaaaccauugcggaaccauagccaauggcguccuccaaacguucaugcggauggcuuggggcggguccuacauugcccuggauucaggaugcgguaguugggacuguaucaugacuagcuaccaguaucuuauuauccagaacaccucuugggaagaucacugccaguuuucccgcccgucacccaucggcuaccugggguugcucagccaacgaacacgugacauuuauauaaguagaaggcgccggggaacuuucaccuggacacugucugauuccgagggcaacgaaaccccugguggguacugucucacgcgguggaugcuuaucgaggcggagcugaagugcuuuggaaauacugcaguggccaaauguaacgaaaagcaugacgaggaguucugcgauauguugcgccuauuugacuucaauaaacaggcuauuagaaggcugaagacacccgcccagaugagcauccagcucauaaacaaagcaguaaaugcucugauuaacgaucaacuuaucaugaagaaucaucugcgggacaucaugugcauuccauauugcaacuacucgaaguauugguacuugaaucacaccguuacuggcaaaacaucucucccccgcuguuggcugguguccaacgggucauacuuaaaugaaacccacuucagugacgauaucgagcagcaggccgacaacaugauuacggagcugcuacaaaaggaauauauagaucgacagggaaaaaccccucucggucuggucgaccuuuuuguguucagcacauccuuuuacuugaucucuauuuuccugcaccucgugaagaucccaacucauagacacgucaucggcaaacccugcccuaagccacauaggauuaaucacauggggauauguagcugcggacuguauaaacacccgggcguucccgugaaguggaagcgguga

SEQ ID NO: 4856 - RNA, 1473 nt, Artificial Sequence
  derived and/or modified protein sequence (opt3) from LASV(ISTH1058-NIG-2011;Clade II)__AIT17446__GPCstabilized
augggccagaucauuaccuucuuucaagaggugccccacgucauagaagagguuaugaacaucgugcugauugcccucagccuucuggcuaucuugaaggggauuuacaauguagcaacaugcggauuauucggucugguguccuuucuacuccuguguggcagaucuugcucaacuacguauaaaggggucuacgaacuucagacccuggaguuggacauggccagucucaacaugacaaugccucugagcuguacuaagaauaacucccaucacuauaucauggugggaaaugaaaccggccuggagcucacauuaaccaacacuucuauaaucaaucauaaauucugcaaccugucggaugcgcacaagaaaaaucuuuacgaccaugcuuugaugucaauuaucagcacauuucaccugaguauuccaaacuucaaucaguaugaggccauguccugugauuuuaacggugggaagaucucuguucaguacaaucuaagccacaccuaugcaguggacgccgcuucccauugcggaacggucgcaaacggcgugcuccaaacuuucaugaggauggccuggggcgggucauacauagcucuggauaguggaugcgguagcugggacuguauuaugaccucuuaccaguaucuuaucauucagaauacaacuugggaagaucacugccaguuuucccggccgucacccaucggcuaccugggguugcucagccaacgcacccgagacaucuauauuagucguagacgccggggaacauucaccuggacgcugucugauuccgagggcaacgaaacuccugguggguacugucucacaagguggaugcuuauagaggccgagcugaaaugcuuuggaaacaccgcgguagcaaaguguaaugaaaaacaugacgaggaguucugcgauauguugcggcuauuugacuucaacaagcaggccauccgcagacugaaaacucccgcucagaugagcauucagcucaucaauaaggccguuaacgcacugauaaaugaucaacuuauuaugaagaaccaccugagggacaucaugugcaucccauauugcaauuacucgaaauauugguacuugaaccacacagugaccggcaagacgucucucccccgguguuggcuggucuccaaugggucauacuuaaacgaaacccauuucagugacgauauugagcagcaggcugacaauaugaucacagagcugcuacaaaaagaauauauggaucgccagggaaagacuccucucggucugguggaccuuuuuguguucagcaccuccuuuuacuugauuucuauauuccugcaccucgucaaaaucccaacacaucgacacguuauuggcaagcccugcccuaaaccacauagacugaaccacauggggaucuguagcugcggacuuuauaagcacccgggcgugcccguaaaguggaaaagguga

SEQ ID NO: 4857 - RNA, 1473 nt, Artificial Sequence
  derived and/or modified protein sequence (opt3) from LASV(ISTH1064-NIG-2011;Clade II)__AIT17450__GPCstabilized
augggccagaucauuaccuucuuucaagaggugccccacgucauagaagagguuaugaacaucgugcugauugcccucagccuucuggcuaucuugaaggggauuuacaauguagcaacaugcggauuauucggucugguguccuuucuacuccuguguggcagaucuugcucaacuacguauaaaggggucuacgaacuucagacccuggaguuggacauggccagucucaacaugacaaugccucugagcuguacuaagaauaacucccaucacuauaucauggugggaaaugaaaccggccuggagcucacauuaaccaacacuucuauaaucaaucauaaauucugcaaccugucggaugcgcacaagaaaaaucuuuacgaccaugcuuugaugucaauuaucagcacauuucaccugaguauuccaaacuucaaucaguaugaggccauguccugugauuuuaacggugggaagaucucuguucaguacaaucuaagccacaccuaugcaguggacgccgcuaaccauugcggaacgauagcaaauggcguccuccaaacuuucaugaggauggccuggggcggguccuacauugcucuggauucaggaugcgguaguugggacuguaucaugaccagcuaccaguaucuuauuauccagaacacaacuugggaagaucacugccaguuuucucggccgucccccaucggcuaccugggguugcucucacaacgcacccgagacauuuauauaagccguagacgccggggaacauucaccuggacgcugagugauucugagggcaacgaaacuccugguggguacugucucacaagguggaugcuuaucgaggccgagcugaaaugcuuuggaaauaccgcgguggcaaaguguaacgaaaaacaugacgaggaguucugcgauauguugcggcuauuugacuucaauaagcaggccauucgcagacugaaaacucccgcucagauguccauccagcucauaaacaaggccguaaaugcacugauuaacgaucaacuuaucaugaagaaucaccugagggacaucaugugcauuccauauugcaacuacagcaaauauugguacuugaaucacacaguuaccggcaagacgucgcucccccgguguuggcuggugucuaacggguccuacuuaaaugaaacccauuucucagacgauaucgagcagcaggcugacaacaugauuacagagcugcuacaaaaagaauauauagaucgccagggaaagacuccucucggucuggucgaccuuuuuguguucaguaccagcuuuuacuugaucuccauuuuccugcaccucgugaaaaucccaacacaucgacacaucauuggcaagcccugcccuaaaccacauagacugaaucacauggggauauguucuugcggacuuuauaagcacccgggcguccccguuaaguggaaaagguga

SEQ ID NO: 4858 - RNA, 1473 nt, Artificial Sequence
  derived and/or modified protein sequence (opt3) from LASV(ISTH1069-NIG-2011;Clade II)__AIT17454__GPCstabilized
augggccagaucauuaccuucuuucaagaggugccccacgucauagaagagguuaugaacaucgugcugauugccuucagccuccuugcuauccugaaggggauuuacaauguagcaacaugcggauuguuugguuuaguguccuuccugcuacucuguggcagaucuugcucaacuacguauaaaggggucuacgaacugcagacccuugagcuggacauggccaguuugaacaugacaaugccucucagcuguacuaagaauaacucccaucacuauaucauggugggaaaugaaaccggccuggagcugacacucaccaacacuucuauaaucaaucauaaauuuugcaacuuaucggaugcgcacaagaggaaucuguacgaccaugcucuuaugucaauuaucagcacauuccacuugaguauuccaaacuuuaaucaguaugaggccauguccugugauuucaacggugggaaaaucucuguucaguacaaucugagccacaccuaugcaguggacgccgcuggacauugcggcacgauagcaaacggcguccuacaaacuuuuaugcggauggccuggggaggguccuacauugcucucgauucagguugcggcaguugggacuguaucaugaccagcuaccaguaucugauuauccagaauacaacuugggaagaucacugccaguucucucgcccgucccccaucggguaccuuggacuguugucacaacgaacccgugacauuuauauaagcagaaggcgccggggcacauuuaccuggacguuaagugauucugaggguaacgaaacuccugggggauacugucugacacgguggaugcucaucgaggccgagcuuaagugcuucggcaacaccgcgguggcaaaauguaaugaaaagcaugacgaggaauuuugcgauaugcugcgcuuguucgacuucaacaaacaggccauuagaaggcuaaagacucccgcucagauguccauccagcugauaaauaaagccguaaacgcacucauuaaugaucaacugaucaugaagaaccaccuucgggacaucaugugcauuccauauugcaauuacagcaaguauugguaccugaaccacacaaucaccgggaaaacgucguugccccgcuguuggcucguuucuaauggauccuaccugaacgaaacccauuuuucagacgauauugagcagcaggcugacaauaugauaacagaguuacugcaaaaggaauauauggaucgacaggguaaaacuccucuaggccucguggaccuguucgucuuuaguaccagcuucuaccuuaucuccaucuuuuugcaccuggugaagauuccaacacauagacacaucauugggaaacccugcccuaagccacauaggcucaaccacaugggaauauguucuugcggccuguauaaacacccgggugugcccguccgguggaagcguuga

SEQ ID NO: 4859 - RNA, 1473 nt, Artificial Sequence
  derived and/or modified protein sequence (opt3) from LASV(ISTH1096-NIG-2012;Clade II)__AIT17458__GPCstabilized
augggccagaucauuaccuucuuucaagaggugccccacgucauagaagagguuaugaacaucgugcugauugcccucagccuucuggcuaucuugaaggggauuuacaauguagcaacaugcggauuauucggucugguguccuuucuacuccuguguggcagaucuugcucaacuacguauaaaggggucuacgaacuucagacccuggaguuggacauggccagucucaacaugacaaugccucugagcuguacuaagaauaacucccaucacuauaucauggugggaaaugaaaccggccuggagcucacauuaaccaacacuucuauaaucaaucauaaauucugcaaccugucggaugcgcacaagaaaaaucuuuacgaccaugcuuugaugucaauuaucagcacauuucaccugaguauuccaaacuucaaucaguaugaggccauguccugugauuuuaacggugggaagaucucuguucaguacaaucuaagccacaccuaugcaauagacgccgcuaaccauugcggaacgauugcaaauggcgugcuccaaacuuucaugaggauggccuggggcggguccuacaucgcucuggauucaggaugcgguaguugggacuguauuaugaccacauaccaguaucuuaucauccagaacacuaccugggaagaucacugccaguuuagccggccgucucccauuggcuaccugggguugcucucccaacgcacacgagacauauauaucucacguagacgccggggaaccuucacguggacucugagcgauagugagggcaacgaaacaccugguggguacugucucaccagguggaugcuuauugaggccgagcugaaaugcuuuggaaauacugcggucgcaaaguguaacgaaaaacaugacgaggaguucugcgauauguugcggcuauuugacuucaauaagcaggccauccgcagacugaaaacacccgcucagaugucuauacagcucauuaacaaggccgugaaugcacugaucaacgaucaacuuaucaugaagaaucaccugagggacauuaugugcaucccauauugcaacuacuccaaauauugguacuugaaucacaccguaacgggcaagaccagccucccccgguguuggcugguuucgaacgggucuuacuuaaaugaaacacauuucuccgacgauauugagcagcaggcugacaacaugauaacugagcugcuacaaaaagaauauauggaucgccagggaaagaccccucucggucugguggaccuuuuugucuucucaacaaguuuuuacuugaucagcauuuuccugcaccucgugaaaaucccaacucaucgacacgugaucggcaagcccugcccuaaaccacauagacugaaucacauggggauuuguuccugcggacuuuauaagcacccgggcguccccguuaaguggaaaagguga

SEQ ID NO: 4860 - RNA, 1473 nt, Artificial Sequence
  derived and/or modified protein sequence (opt3) from LASV(ISTH1107-NIG-2012;Clade II)__AIT17462__GPCstabilized
augggccagaucauuaccuucuuucaagaggugccccacgucauagaagagguuaugaacaucgugcugauugcccucagccuucuggcuaucuugaaggggauuuacaauguagcaacaugcggauuauucggucugguguccuuucuacuccuguguggcagaucuugcucaacuacguauaaaggggucuacgaacuucagacccuggaguuggacauggccagucucaacaugacaaugccucugagcuguacuaagaauaacucccaucacuauaucauggugggaaaugaaaccggccuggagcucacauuaaccaacacuucuauaaucaaucauaaauucugcaaccugucggaugcgcacaagaaaaaucuuuacgaccaugcuuugaugucaauuaucagcacauuucaccugaguauuccaaacuucaaucaguaugaggccauguccugugauuuuaacggugggaagaucucuguucaguacaaucuaagccacgcauaugccguggacgcugcaaaccauugcggaaccauagccaauggcguccuccaaacguucaugaggauggcuuggggcggguccuacauugcccuggauucaggaugcgguaguugggacuguaucaugacuagcuaccaguaucuuauuauccagaacaccacaugggaagaucacugccaguuuucucggccgucccccaucggcuaccugggguugcucucacaacgcacucgagacauuuauauaagccguagacgccggggaaccuucacauggacccugagugauucugagggcaacgaaacgccugguggguacugucucacuagguggaugcuuaucgaggcggagcugaaaugcuuuggaaauacagcaguggccaaguguaacgaaaaacaugacgaggaguucugcgauauguugcggcuauuugacuucaauaagcaggcuauucgcagacugaaaacccccgcccagauguccauccagcucauaaacaaggcaguaaaugcucugauuaacgaucaacuuaucaugaagaaucaccugagggacaucaugugcauuccauauugcaacuacagcaaauauugguacuugaaucacacuguuacaggcaagaccucgcuccccaaauguuggcuggugucuaacggguccuacuuaaaugaaacgcauuucucagacgauaucgagcagcaggccgacaacaugauuaccgagcugcuacaaaaggaauauauagaucggcagggaaaaacaccucucggucuggucgaccuuuuuguguucaguacuagcuuuuacuugaucuccauuuuccugcaccucgugaagaucccaacccaucgccacgucaucggcaaacccugcccuaagccacaucgacugaaucacauggggauuuguucuugcggacuuuauaagcacccgggcguucccgugaaauggaagagauga

SEQ ID NO: 4861 - RNA, 1473 nt, Artificial Sequence
  derived and/or modified protein sequence (opt3) from LASV(ISTH1111-NIG-2011;Clade II)__AIT17466__GPCstabilized
augggccagaucauuaccuucuuucaagaggugccccaggucauagaagagguuaugaacaucgugcugauugcccucagccuucuggcuaucuugaaggggauuuacaauguagcaacaugcggauuauucggucugguguccuuucuacuccuguguggcagaucuugcucaacuacguauaaaggggucuacgaacuucagacccuggaguuggacauggccagucucaacaugacaaugccucugagcuguacuaagaauaacucccaccauuauaucauggugggaaaugaaaccggccuggagcucacauuaaccaaccagucuauaaucaaucacaaauucugcaaccugucggaugcgcauaagaaaaaucuuuacgaccacgcuuugaugucaauuaucagcacuuuucaucugaguauuccaaacuucaaucaauaugaggccauguccugugauuuuaacggugggaagaucucuguucaguacaaucuaagccacacauucgcaguggacgccgcuaaccacugcggaaccauagcaaauggcguccuccagacguuuaugaggauggccuggggcggguccuauauugcucuggauucaggaugcgguaguugggacuguaucaugacuagcuaccaguaccuuauuauccaaaacaccacaugggaagaucauugccaguucucucgcccgucccccaucggcuaucugggguugcucucacagcgaacucgugacauuuacauaagcagaaggcgccggggaaccuuuacauggacccugagugauucugagggcaacgaaacgccugguggguauugucucacucgguggaugcuuaucgaggccgagcugaagugcuucggaaauacagcgguggcaaaauguaacgaaaagcacgacgaggaauuuugcgauauguugcgccuauucgacuucaauaaacaggccauuagaaggcugaagacccccgcucaaauguccauccagcucauaaacaaagccguaaaugcacugauuaacgaucagcuuaucaugaagaaucaucugcgggacaucaugugcauuccauacugcaacuauagcaaguacugguauuugaaucacacuaucacaggcaaaaccucgcucccccgcuguuggcugguuucuaacggguccuacuuaaaugaaacgcacuuuucagacgauauugagcaacaggcugacaacaugauaaccgagcugcuacagaaggaauacauggaucgacagggaaaaacaccucucggucugguggaccuuuucgucuuuaguacuagcuucuauuugaucuccauuuuucugcaucucgugaagaucccaacccacagacaugugaucggcaaacccugcccuaagccacacaggcugaaucauauggggauuuguucuugcggacuuuacaaacacccgggcguccccguuaaguggaagcgguga

SEQ ID NO: 4862 - RNA, 1473 nt, Artificial Sequence
  derived and/or modified protein sequence (opt3) from LASV(ISTH1121-NIG-2012;Clade II)__AIT17470__GPCstabilized
augggccagaucauuaccuucuuucaagaggugccccacgucauagaagagguuaugaacaucgugcugauugcccucagccuucuggcuaucuugaaggggauuuacaauguagcaacaugcggauuauucggucugguguccuuucuacuccuguguggcagaucuugcucaacuacguauaaaggggucuacgaacuucagacccuggaguuggacauggccagucucaacaugacaaugccucugagcuguacuaagaauaacucccaucacuauaucauggugggaaaugaaaccggccuggagcucacauuaaccaacacuucuauaaucaaucauaaauucugcaaccugucggaugcgcacaggaagaaucuuuacgaccaugcuuugaugucaauuaucagcacauuucaccugaguauuccaaacuucaaucaguaugaggccauguccugugauuuuaacggugggaaaaucucuguucaguacaaucuaagccacaccuaugcaguggacgccgcuaaccauugcggaacgauagcaaauggcguccuccaaacuuucaugcggauggccuggggcggguccuacauugcucuggauucaggaugcgguaguugggacuguaucaugaccagcuaccaguaucuuauuauccagaacacaacuugggaagaucacugccaguuuucucgcccgucccccaucggcuaccugggguugcucucacaacgaacccgugacauuuauauaagcagaaggcgccggggaacauucaccuggacgcugagugauucugagggcaacgaaacuccugguggguacugucucacacgguggaugcuuaucgaggccgagcugaagugcuuuggaaauaccgcgguggcaaaauguaacgaaaagcaugacgaggaguucugcgauauguugcgccuauuugacuucaauaaacaggccauuagaaggcugaagacucccgcucagauguccauccagcucauaaacaaagccguaaaugcacugauuaacgaucaacuuaucaugaagaaucaucugcgggacaucaugugcauuccauauugcaacuacagcaaguauugguacuugaaucacacaguuaccggcaaaacgucgcucccccgcuguuggcuggugucuaacggguccuacuuaaaugaaacccacuucucagacgauaucgagcagcaggcugacaacaugauuacagagcugcuacaaaaggaauauauagaucgacagggaaaaacuccucucggucuggucgaccuuuuuguguucaguaccagcuuuuacuugaucuccauuuuccugcaccucgugaagaucccaacacauagacacgucaucggcaaacccugcccuaagccacauaggcugaaucacauggggauuuguucuugcggacuuuauaaacacccgggcguucccgugaaguggaagcgguga

SEQ ID NO: 4863 - RNA, 1473 nt, Artificial Sequence
  derived and/or modified protein sequence (opt3) from LASV(ISTH1129-NIG-2012;Clade II)__AIT17474__GPCstabilized
augggccagaucauuaccuucuuucaagaggugccccacgucauagaagagguuaugaacaucgugcugauugcccucagccuucuggcuaucuugaaggggauuuacaauguagcaacaugcggauuauucggucugguguccuuucuacuccuguguggcagaucuugcucaacuacguauaaaggggucuacgaacuucagacccuggaguuggacauggccagucucaacaugacaaugccucugagcuguacuaagaauaacucccaucacuauaucauggugggaaaugaaaccggccuggagcucacauuaaccaacacuucuauaaucaaucauaaauucugcaaccugucggaugcgcacaagaaaaaucuuuacgaccaugcuuugaugucaauuaucagcacauuucaccugaguauuccaaacuucaaucaguaugaggccauguccugugauuuuaacggugggaagaucucuauacaguacaaucuaagccacaccuaugcaguugacgccgcuaaccauugcggaacgauugcaaauggcgugcuccaaacuuucaugaggauggccuggggcggguccuacaucgcucuggauucaggaugcgguaguugggacuguauuaugaccagcuaccaguaucuuaucauccagaacacaacuugggaagaucacugccaguuuucucggccgucccccauuggcuaccugggguugcucucacaacgcacccgagacauauauaucagccguagacgccggggaacauucaccuggacgcugagugauucugagggcaacgaaacuccugguggguacugucucacaagguggaugcuuauugaggccgagcugaaaugcuuuggaaauaccgcggucgcaaaguguaacgaaaaacaugacgaggaguucugcgauauguugcggcuauuugacuucaauaagcaggccauccgcagacugaaaacucccgcucagauguccauacagcucauuaacaaggccgugaaugcacugaucaacgaucaacuuaucaugaagaaucaccugagggacauuaugugcaucccauauugcaacuacagcaaauauugguacuugaaucacacaauuaccggcaagacgucgcucccccgguguuggcugguaucuaacggguccuacuuaaaugaaacccauuucucagacgauauagagcagcaggcugacaacaugaucacagagcugcuacaaaaagaauauauugaucgccagggaaagacuccucucggucugguugaccuuuuuguguucaguaccagcuuuuacuugaucuccaucuuccugcaccucgucaaaauuccaacacaucgacacauaacuggcaagcccugcccuaaaccacauagacugaaucacauggggaucuguucuugcggacuuuauaagcacccgggcgugcccgugagguggaagcgguga

SEQ ID NO: 4864 - RNA, 1473 nt, Artificial Sequence
  derived and/or modified protein sequence (opt3) from LASV(ISTH1137-NIG-2011;Clade II)__AIT17478__GPCstabilized
augggccagaucauuaccuucuuucaagaggugccccacgucauagaagagguuaugaacaucgugcugauugcccucagccuucuggcuaucuugaaggggauuuacaauguagcaacaugcggauuauucggucugguguccuuucuacuccuguguggcagaucuugcucaacuacguauaaaggggucuacgaacuucagacccuggaguuggacauggccagucucaacaugacaaugccucugagcuguacuaagaauaacucccaucacuauaucauggugggaaaugaaaccggccuggagcucacauuaaccaacacuucuauaaucaaucauaaauucugcaaccugucggaugcgcacaagaaaaaucuuuacgaccaugcuuugaugucaauuaucagcacauuucaccugaguauuccaaacuucaaucaguaugaggccauguccugugauuuuaacggugggaagaucucuguucaguacaaucuaagccacaccuaugcaguggacgccgcugaucauugcggaacgauagcaaacggcguccuccaaacuuucaugaggauggccuggggcggguccuacauugcucuggacucaggaugcgguaguugggauuguaucaugaccagcuaccaguaucuuauuauccagaauacaacuugggaagaccacugccaguuuucucggccgucccccaucggcuaccugggguugcucucacaacgcacccgagauauuuauauaagccguagacgccggggaacauucaccuggacgcugagugacucugagggcaacgaaacuccugguggguacugucucacaagguggaugcuuaucgaggccgagcugaaaugcuuuggaaacaccgcgguggcaaaguguaaugaaaaacaugaugaggaguucugcgacauguugcggcuauuugauuucaacaagcaggccauuucccgccugaaaacucccgcucagaugagcauccagcucauaaauaaggccguaaacgcacugauuaaugaccaacuuaucaugaagaaccaccugagagacaucaugugcauuccauauugcaauuacucgaaauauugguacuugaaccacacaguuaccggcaagacgucucuccccagguguuggcugguguccaaugggucauacuuaaacgaaacccauuucagugaugacaucgagcagcaggcugauaauaugauuacagagaugcugcaaaaagaauauauagaccggcagggaaagacuccucuaggucucgucgaucuguuuguguucagcaccuccuuuuaccuuaucucuauuuucuugcaccuggugaaaaucccaacacaucgccacgucaucggcaagcccugcccuaaaccacaucgacucaaccacauggggauuuguagcugcggacuguauaagcacccgggcguucccgugaaguggaaaagauga

SEQ ID NO: 4865 - RNA, 1473 nt, Artificial Sequence
  derived and/or modified protein sequence (opt3) from LASV(ISTH2010-NIG-2012;Clade II)__AIT17482__GPCstabilized
augggccagaucauuaccuucuuucaagaggugccccacgucauagaagagguuaugaacaucgugcugauugcccucagccuucuggcuaucuugaaggggauuuacaauguagcaacaugcggauuauucggucugguguccuuucuacuccuguguggcagaucuugcucaacuacguauaaaggggucuacgaacuucagacccuggaguuggacauggccagucucaacaugacaaugccucugagcuguacuaagaauaacucccaucacuauaucauggugggaaaugaaaccggccuggagcucacauuaaccaacacuucuauaaucaaucauaaauucugcaaccugucggaugcgcacaagaaaaaucuuuacgaccaugcuuugaugucaauuaucagcacauuucaccugaguauuccaaacuucaaucaguaugaggccauguccugugauuuuaacggugggaagaucucuguucaguacaaucuaagccacgcauaugccguggacgcugcaaaccauugcggaaccauagccaauggcguccuccaaacguucaugaggauggcuuggggcggguccuacauugcccuggauucaggaugcgguaguugggacuguaucaugacuagcuaccaguaucuuauuauccagaacaucaccugggaagaucacugccaguuuucucggccgucccccauuggcuaccugggguugcucucacaacgcacacgagacauauauaucagccguagacgccggggaacuuucaccuggacacugagugauucugagggcaacgaaaccccugguggguacugucucacgagguggaugcuuauugaggcggagcugaaaugcuuuggaaauacugcaguggccaaguguaacgaaaaacaugacgaggaguucugcgauauguugcggcuauuugacuucaauaagcaggcuauccgcagacugaaaacacccgcccagauguccauacagcucauuaacaaggcaguaaaugcucugaucaacgaucaacuuaucaugaagaaucaccugagggacauuaugugcaucccauauugcaacuacagcaaauauugguacuugaaucacaccguuacuggcaagacaucgcucccccgguguuggcuggugucuaacggguccuacuuaaaugaaacccauuucucagacgauauugagcagcaggccgacaacaugauaacggagcugcuacaaaaagaauauaucgaucgccagggaaagaccccucucggucuggucgaccuuuuuguguucaguacuagcuuuuacuugauuuccaucuuccugcaccucgugaaaaucccaacacaucgacacgucguuggcaagcccugcccuaaaccacauagacugaaucacauggggauuuguucuugcggacuuuauaagcacccgggcgugcccguaaaguggaaaagguga

SEQ ID NO: 4866 - RNA, 1473 nt, Artificial Sequence
  derived and/or modified protein sequence (opt3) from LASV(ISTH2016-NIG-2012;Clade II)__AIT17486__GPCstabilized
augggccagaucauuaccuucuuucaagaggugccccacgucauagaagagguuaugaacaucgugcugauugcccucagccuucuggcuaucuugaaggggauuuacaauguagcaacaugcggauuauucggucugguguccuuucuacuccuguguggcagaucuugcucaacuacguauaaaggggucuacgaacuucagacccuggaguuggacauggccagucucaacaugacaaugccucugagcuguacuaagaauaacucccaucacuauaucauggugggaaaugaaaccggccuggagcucacauuaaccaacacuucuauaaucaaucauaaauucugcaaccugucggaugcgcacaagaaaaaucuuuacgaccaugcuuugaugucaauuaucagcacauuucaccugaguauuccaaacuucaaucaguaugaggccauguccugugauuuuaacggugggaagaucucuguucaguacaaucuaagccacaccuaugcaguggacgccgcuaaccauugcggaacgauagcaaauggcguccuccaaacuuucaugaggauggccuggggcggguccuacauugcucuggauucaggaugcgguaguugggacuguaucaugaccagcuaccaguaucuuauuauccagaacacaacuugggaagaucacugccaguuuucucggccgucccccgugggcuaccugggguugcucucacaacgcacccgagacaucuauauuagccguagacgccggggaacauucaccuggacgcugagugauucugagggcaacgaaacuccugguggguacugucucacaagguggaugcuuauagaggccgagcugaaaugcuuuggaaauaccgcgguagcaaaguguaacgaaaaacaugacgaggaguucugcgauauguugcggcuauuugacuucaauaagcaggccauccgcagacugaaaacucccgcucagauguccauucagcucaucaacaaggccguuaaugcacugauaaacgaucaacuuauuaugaagaaucaccugagggacaucaugugcaucccauauugcaacuacagcaaauauugguacuugaaucacacagugaccggcaagacgucgcucccccgguguuggcuggucucuaacggguccuacuuaaaugaaacccauuucucagacgauauugagcagcaggcugacaacaugaucacagagcugcuacaaaaagaauauauugaucgccagggaaagacuccucucggucugguggaccuuuuuguguucaguaccagcuuuuacuugauauccaucuuccugcaccucgucaaaauuccaacacaucgacacguuaucggcaagcccugcccuaaaccacauagacugaaucacauggggaucuguucuugcggacuuuauaagcacccgggcgugcccguaaaguggaaaagguga

SEQ ID NO: 4867 - RNA, 1473 nt, Artificial Sequence
  derived and/or modified protein sequence (opt3) from LASV(ISTH2020-NIG-2012;Clade II)__AIT17490__GPCstabilized
augggccagaucauuaccuucuuucaagaggugccccacgucauagaagagguuaugaacaucgugcugauuacacucagccuucuggccaucuugaaggggauuuacaauguagcuacuugcggauuauucggucugguguccuuucuacuccuguguggcagaucuugcucaacgaccuauaaaggggucuacgaacuucagacacuggaguuggacauggcaaaccucaauaugacuaugccucugaguuguaccaagaacaauagccaucacuauaucauggugggaaacgaaacaggccuggagcucaccuuaacuaauacauccauaaucaaccauaaauucugcaaucugucugaugcccacaagaaaaaccuuuacgaccaugcguugaugucgauuaucucaaccuuucaccugagcauuccaaauuucaaccaguaugaggcuaugaguugugauuuuaauggugggaagaucuccguucaguacaaccuaucucacacguucgccguggacgcagccaaucauugcggaacuauagcuaacggcguccuccaaaccuuuaugaggauggcauggggcgggagcuauauugcccuggauuccggaugcgguucaugggacuguaucaugacaaguuaccaguaccuuauuauccagaacacuaccugggaagaucacugccaguucagccggccgucucccaucggcuaucugggguugcucucccaacgcacacgagacauuuacauaucacguagacgccggggaaccuuuacguggacucugagcgauagugagggcaaugaaacaccugguggguauugucucaccagguggaugcuuaucgaggcugagcugaaaugcuucggaaacacugccguggcgaaguguaaugaaaaacaugacgaggaauuuugcgauauguugcggcuauucgacuucaacaagcaggcaauucgcagacugaaaacacccgcccagaugucuauccagcucauaaauaaggcuguaaacgcccugauuaaugaucaacuuaucaugaagaaccaccugagggacaucaugugcauuccauacugcaauuauuccaaauacugguauuugaaccacaccguuacgggcaagaccagccucccccgguguuggcuggugucgaaugggucuuacuuaaacgaaacacauuuuuccgacgauaucgagcagcaggcagacaauaugauuacugagcugcuacaaaaagaauacauggaucgccagggaaagaccccucucggucuggucgaccuuuucguguuuucaacaaguuucuauuugauaagcaucuuucugcaccucgugaaaauuccaacucaucgacacaucaucggcaagcccugcccuaaaccacauagacugaaccacauggggauuuguuccugcggacuuuacaagcacccgggcguccccguuaaguggaaaagguga

SEQ ID NO: 4868 - RNA, 1473 nt, Artificial Sequence
  derived and/or modified protein sequence (opt3) from LASV(ISTH2025-NIG-2012;Clade II)__AIT17494__GPCstabilized
augggccagaucauuaccuucuuucaagaggugccccacgucauagaagagguuaugaacaucgugcugauugcccucagccuucuggcuaucuugaaggggguauacaauguggcaacaugcggauuauucggucuggucuccuuucuacuccuguguggcagaucuugcucaacuauuuauaaagggguguacgaacuucagacgcuggaguuggacauggccagucucaacaugaccaugccucugagcuguacaaagaauaacucccaucacuauaucaugguuggaaaugaaacuggccuggagcucaccuuaacaaacaccucuauaaucaaucauaaauucugcaaccugucggaugcgcacaagaaaaaucuuuacgaccaugcuuugaugucaauuaucagcacuuuucaccugaguauuccaaacuucaaucaguaugaggccauguccugugauuuuaacggugggaagaucucugugcaguacaaucuaagccacacauaugcagucgacgccgcuaaccauugcggaaccauagcaaauggcgugcuccaaacguucaugaggauggccuggggcggguccuacauugcucuggauucaggaugcgguaguugggacuguaucaugacuagcuaccaguaucuuauuauccagaacaccucuugggaagaucacugccaguuuucccggccgucacccaucggcuaccugggguugcucagccaacgcacacgagacauuuauauaagucguagacgccggggaacuuucaccuggacacugucugauuccgagggcaacgaaaccccugguggguacugucucacgagguggaugcuuaucgaggccgagcugaaaugcuuuggaaauacugcgguagcaaaguguaacgaaaaacaugacgaggaguucugcgauauguugcggcuauuugacuucaauaagcaggccauucgcagacugaaaacacccgcucagaugagcauccagcucauaaacaaggccguuaaugcacugauuaacgaucaacuuaucaugaagaaucaccugagggacaucaugugcauuccauauugcaacuacucgaaauauugguacuugaaucacaccgugacuggcaagacaucucucccccgguguuggcuggucuccaacgggucauacuuaaaugaaacccauuucagugacgauaucgagcagcaggcugacaacaugauuacggagcugcuacaaaaagaauauauagaucgccagggaaagaccccucucggucugguggaccuuuuuguguucagcacauccuuuuacuugaucucuauuuuccugcaccucgucaaaaucccaacucaucgacacguuaucggcaagcccugcccuaaaccacauagacugaaucacauggggauuuguagcugcggacuuuauaagcacccgggcgugcccguaaaguggaaaagguga

SEQ ID NO: 4869 - RNA, 1473 nt, Artificial Sequence
  derived and/or modified protein sequence (opt3) from LASV(ISTH2031-NIG-2012;Clade II)__AIT17498__GPCstabilized
augggccagaucauuaccuucuuucaagaggugccccacgucauagaagagguuaugaacaucgugcugauugcccucagccuucuggcuaucuugaaggggauuuacaauguagcaacaugcggauuauucggucugguguccuuucuacuccuguguggcagaucuugcucaacuacguauaaaggggucuacgaacuucagacccuggaguuggacauggccagucucaacaugacaaugccucugagcuguacuaagaauaacucccaucacuauaucauggugggaaaugaaaccggccuggagcucacauuaaccaacacuucuauaaucaaucauaaauucugcaaccugucggaugcgcacaagaaaaaucuuuacgaccaugcuuugaugucaauuaucagcacauuucaccugaguauuccaaacuucaaucaguaugaggccauguccugugauuuuaacggugggaagaucucuguucaguacaaucuaagccacaccuaugcaguggacgccgcuaaccauugcggaacgauagcaaauggcguccuccaaacuuucaugaggauggccuggggcggguccuacauugcucuggauucaggaugcgguaacugggacuguaucaugaccaguuaccaguaucuuauuauccagaacacaacuugggaagaucacugccaguuuagccggccgucucccaucggcuaccugggguugcucucccaacgcacccgagacauuuauauaucacguagacgccggggaacauucaccuggacgcugagcgauagugagggcaaugaaacuccugguggguacugucucacaagguggaugcuuaucgagaccgagcugaaaugcuuuggaaacacugccguggcgaaguguaaugaaaaacaugacgaggaguucugcgauauguugcggcuauuugacuucaacaagcaggcaauuucucgccugagaucccccgcccagaugagcauccagcucauaaauaaagcuguaaacgcccugauuaaugaucaacuuaucaugaagaaccaccugagggacaucaugugcauuccauauugcaauuacucgaaguauugguacuugaaccacacaguuaccggcaaaacgucucuccccaaguguuggcugguguccaaugggucauacuuaaacgaaacccauuucagugacgauaucgagcagcaggcagacaauaugauuacagagaugcugcaaaaagaauauauagaucggcagggaaagacuccucuaggucucgucgaccuguuuguguucagcaccuccuuuuaccuuaucucuauuuucuugcaccuggugaaaaucccaacacaucgccacaucacuggcaagcccugcccuaaaccacaucgacucaaccacauggggauuuguagcugcggacuguauaagcacccgggcguccccguuaaguggaaaagauga

SEQ ID NO: 4870 - RNA, 1473 nt, Artificial Sequence
  derived and/or modified protein sequence (opt3) from LASV(ISTH2037-NIG-2012;Clade II)__AIT17502__GPCstabilized
augggccagaucauuaccuucuuucaagagauaccccacgugaucgaagaggucaugaacauuguucugaucacacucagccuucuggccauuuugaaggggaucuacaauguggcuacuugcggauuauucggucugguauccuuucuacuccuguguggcaaaucuugcucaacgaccuauaaggggguguacgaacuucagacacuggaguuggacauggcaagucucaacaugacuaugccucugagcuguaccaaaaauaacucccaucacuauauaauggucggaaaugaaacaggccuggagcucaccuuaacuaacacaucuaucauuaaucauaaguucugcaaccugucggaugcccaccggaaaaaucuuuacgaccauaccuugaugucaaucauuagcacguuucaccugaguaucccaaacuucaaucaguaugaggcgauguccugugauuuuaacggugggaagauaucugugcaguacaaucuaagccacgcuuaugccauugacgcagccacucauugcggaaccaucgcuaacggcguucuccaaacauucaugaggauggcauggggcggguccuacauugcccuggauucaggaugcgguggcugggacuguaucaugaccaguuaccaguaucuuaucauucagaauacuacaugggaagaucacugccaguuuagccggccgucucccauaggguaccugggauugcucucccaacgcacccgagacaucuauauuucacguagacgccggggcacguucacuuggacacugagcgauagugaggguaacgaaaccccugggggauacugucucacuagguggaugcuuaucgaggcugagcugaaaugcuuuggcaacacagccguggcgaaguguaaugaaaaacaugacgaggaguucugcgauauguugcggcuauuugacuucaacaagcaggcaauacgcagacugaaaacccccgcccagaugucuauucagcucaucaauaaggcugucaacgcccugaucaaugaucaacuuauuaugaggaaccaccugagagacaucaugugcauuccauauugcaauuacuccaaguauugguacuugaaccacacggugaccgggaaaacaagccuccccaaguguuggcugguaucgaauggaucuuacuuaaacgaaacucauuucuccgacgauauagagcagcaggcagacaauaugaucaccgagcugcuacaaaaagaauauauggaucgccaggguaagacaccucucggccugguugaccuuuuuguguucucaaccaguuuuuacuugauuagcaucuuccugcaccucgucaaaaucccaacucaucgacacgugauugggaagcccugcccuaaaccacauagacugaaccacaugggaguguguuccugcggccuuuauaagcacccggguguccccguuaaguggaaaagguga

SEQ ID NO: 4871 - RNA, 1473 nt, Artificial Sequence
  derived and/or modified protein sequence (opt3) from LASV(ISTH2042-NIG-2012;Clade II)__AIT17506__GPCstabilized
augggccagaucauuaccuucuuucaagaggugccccacgucauagaagagguuaugaacaucgugcugauugcccucagccuucuggcuaucuugaaggggauuuacaauguagcaacaugcggauuauucggucugguguccuuucuacuccuguguggcagaucuugcucaacuacguauaaaggggucuacgaacuucagacccuggaguuggacauggccagucucaacaugacaaugccucugagcuguacuaagaauaacucccaucacuauaucauggugggaaaugaaaccggccuggagcucacauuaaccaacacuucuauaaucaaucauaaauucugcaaccugucggaugcgcacaagaaaaaucuuuacgaccaugcuuugaugucaauuaucagcacauuucaccugaguauuccaaacuucaaucaguaugaggccauguccugugauuuuaacggugggaagaucucuguucaguacaaucuaagccacgcauaugccguggacgcugcagaacauugcggaaccauagccaacggcguccuccaaacguucaugaggauggcuuggggcggguccuacauugcccuggauucaggaugcgguaguugggacugugugaugacuagcuaccaguaucuuaucauucagaauaccacaugggaggaucacugccaguuuucucggccgucccccaucggcuaccugggguugcucucacaacgcacucgagacaucuauauuagccguagacgccggggaaccuucacauggacccugagugauucugaaggcaacgagacgccugguggguacugucucacuagguggaugcuuauagaggcggaacugaaaugcuuuggaaacacagcaguagccaaguguaaugagaaacaugacgaagaguucugcgauauguugcggcuauuugacuucaacaagcaggcuaucgaacgccugaaaacccccgcccagauguccauucagcucaucaauaaggcaguuaacgcucugauaaaugaucaacuuauuaugaagaaccaccugagagacaucaugugcaucccauauugcaauuacagcaaauauugguacuugaaccacacugugacaggcaagaccucgcuccccagguguuggcuggucucuaauggguccuacuuaaacgagacgcauuucucagacgauauugaacagcaggccgacaauaugaucaccgagaugcugcaaaaagaauauauugaucggcagggaaagacaccucuaggucucguggaccuguuuguguucaguacuagcuuuuaccuuauauccaucuucuugcaccuggucaaaauuccaacccaucgccacguuaucggcaagcccugcccuaaaccacaucgacucaaccacauggggaucuguucuugcggacuguauaagcacccgggcgugcccguaaaguggaaaagauga

SEQ ID NO: 4872 - RNA, 1473 nt, Artificial Sequence
  derived and/or modified protein sequence (opt3) from LASV(ISTH2046-NIG-2012;Clade II)__AIT17510__GPCstabilized
augggccagaucauuaccuucuuucaagaggugccccacgucauagaagagguuaugaacaucgugcugauugcccucagccuucuggcuaucuugaaggggauuuacaauguagcaacaugcggauuauucggucugguguccuuucuacuccuguguggcagaucuugcucaacuacguauaaaggggucuacgaacuucagacccuggaguuggacauggccagucucaacaugacaaugccucugagcuguacuaagaauaacucccaucacuauaucauggugggaaaugaaaccggccuggagcucacauuaaccaacacuucuauaaucaaucauaaauucugcaaccugucggaugcgcacaagaaaaaucuuuacgaccaugcuuugaugucaauuaucagcacauuucaccugaguauuccaaacuucaaucaguaugaggccauguccugugauuuuaacggugggaagaucucuguucaguacaaucuaagccacaccuaugcaguggacgccgcuaaccauugcggaacgauagcaaauggcguccuccaaacuuucaugaggauggccuggggcggguccuacauugcucuggauucaggaugcgguaguugggacuguaucaugaccagcuaccaguaucuuauuauccagaacacaacuugggaagaucacugccaguuuucucggccgucccccaucggcuaccugggguugcucucacaacgcaccaaagacauuuauauaagccgacgucgccggggaacauucaccuggacgcugagugauucugagggcaacgaaacuccugguggguacugucucacaagauggaugcuuaucgaggccgagcugaagugcuuuggaaauaccgcgguggcaaaauguaacgaaaagcaugacgaggaguucugcgauauguugaggcuauuugacuucaauaaacaggccauucggcgccugaagacucccgcucagauguccauccagcucauaaacaaggccguaaaugcacugauuaacgaucaacuuaucaugaaaaaucaccugagagacaucaugugcauuccauauugcaacuacagcaaguauugguacuugaaucacacaguuaccggcaaaacgucgcuccccagguguuggcuggugucuaacggguccuacuuaaaugaaacccauuucucagacgauaucgagcagcaggcugacaacaugauuacagagcugcuacaaaaggaauauauagaucggcagggaaaaacuccucucggucuggucgaccuuuuuguguucaguaccagcuuuuacuugaucuccauuuuccugcaccucgugaagaucccaacacaucgccacgucaucggcaaacccugcccuaagccacaucgacugaaucacauggggauuuguucuugcggacuuuauaagcacccgggcguucccgugaaauggaagagauga

SEQ ID NO: 4873 - RNA, 1473 nt, Artificial Sequence
  derived and/or modified protein sequence (opt3) from LASV(ISTH2050-NIG-2012;Clade II)__AIT17514__GPCstabilized
augggccagaucauuaccuucuuucaagaggugccccacgucauagaagagguuaugaacaucgugcugauugcccucagccuucuggcuguauugaaggggaucuacaauguggcaacaugcggauuauucggucuggucuccuuucuacuccuguguggcagaucuugcucaacuacguauaaagggguguacgaacuucagacccuggaguuggacauggccagucucaacaugacaaugccucugagcuguacuaagaauaacucccaucacuauauuaugguuggaaaugaaaccggccuggagcucacauuaaccaacacuucuaucauaaaucauaaauucugcaaccugucggaugcgcacaagaaaaaucuuuacgaccaugcuuugaugucaaucauuagcacauuucaccugaguaucccaaacuucaaucaguaugaggccauguccugugauuuuaacggugggaagauuucugugcaguacaaucuaagccacaccuaugcagucgacgccgcuaaccauugcggaacgaucgcaaauggcgugcuccaaacuuucaugaggauggccuggggcggguccuacauagcucuggauucaggaugcgguaguugggacuguauuaugaccagcuaccaguaucuuaucauucagaacacaacuugggaagaucacugccaguuuucucggccgucccccaucggcuaccugggguugcucucacaacgcacccgagacaucuauauuagccguagacgccggggaacauucaccuggacgcugagugauucugagggcaacgaaacuccugguggguacugucucacaagguggaugcuuauagaggccgagcugaaaugcuuuggaaauaccgcgguagcaaaguguaacgaaaaacaugacgaggaguucugcgauauguugcggcuauuugacuucaauaagcaggccauccgcagacugaaaacucccgcucagauguccauucagcucaucaacaaggccguuaaugcacugauaaacgaucaacuuauuaugaagaaucaccugagggacaucaugugcaucccauauugcaacuacagcaaauauugguacuugaaucacacagugaccggcaagacgucgcucccccgguguuggcuggucucuaacggguccuacuuaaaugaaacccauuucucagacgauauugagcagcaggcugacaacaugaucacagagcugcuacaaaaagaauauauugaucgccagggaaagacuccucucggucugguggaccuuuuuguguucaguaccagcuuuuacuugauauccaucuuccugcaccucgucaaaauuccaacacaucgacacguuaucggcaagcccugcccuaaaccacauagacugaaucacauggggaucuguucuugcggacuuuauaggcacccgggcgugcccguaaaguggaagcgguga

SEQ ID NO: 4874 - RNA, 1473 nt, Artificial Sequence
  derived and/or modified protein sequence (opt3) from LASV(ISTH2057-NIG-2012;Clade II)__AIT17518__GPCstabilized
augggccagaucauuaccuucuuucaagaggugccccacgucauagaagagguuaugaacaucgugcugauugcccucagccuucuggcuaucuugaaggggauuuacaauguagcaacaugcggauuauucggucugguguccuuucuacuccuguguggcagaucuugcucaacuacguauaaaggggucuacgaacuucagacccuggaguuggacauggccagucucaacaugacaaugccucugagcuguacuaagaauaacucccaucacuauaucauggugggaaaugaaaccggccuggagcucacauuaaccaacacuucuauaaucaaucauaaauucugcaaccugucggaugcgcacaagaaaaaucuuuacgaccaugcuuugaugucaauuaucagcacauuucaccugaguauuccaaacuucaaucaguaugaggccauguccugugauuuuaacggugggaagaucucuguucaguacaaucuaagccacgcauaugccguggacgcugcaaaccauugcggaaccauagccaauggcguccuccaaacguucaugaggauggcuuggggcggguccuacauugcccuggauucaggaugcgguaguugggacuguaucaugacuagcuaccaguaucuuauuauccagaacaccacaugggaagaucacugccaguuuucucggccgucccccaucggcuaccugggguugcucucacaacgcacucgagacauuuauauaagccguagacgccggggaaccuucacauggacccugagugauucugagggcaacgaaacgccugguggguacugucucacuagguggaugcuuaucgaggcggagcugaaaugcuuuggaaauacagcaguggccaaguguaacgaaaaacaugacgaggaguucugcgauauguugcggcuauuugacuucaauaagcaggcuauucgcagacugaaaacccccgcccagauguccauccagcucauaaacaaggcaguaaaugcucugauuaacgaucaacuuaucaugaagaaucaccugagggacaucaugugcauuccauauugcaacuacagcaaauauugguacuugaaucacacuguuacaggcaagaccucgcucccccgguguuggcuggugucuaacggguccuacuuaaaugaaacgcauuucucagacgauaucgagcagcaggccgacaacaugauuaccgagcugcuacaaaaagaauauauggaucgccagggaaagacaccucucggucuggucgaccuuuuuguguucaguacuagcuuuuacuugauauccaucuuccugcaccucgugaaaauuccaacccaucgacacgucaucggcaagcccugcccuaaaccacauagacugaaucacauggggaucuguucuugcggacuuuauaagcacccgggcguucccgugaaguggaaaagguga

SEQ ID NO: 4875 - RNA, 1473 nt, Artificial Sequence
  derived and/or modified protein sequence (opt3) from LASV(ISTH2064-NIG-2012;Clade II)__AIT17524__GPCstabilized
augggccagaucauuaccuucuuucaagaggugccccacgucauagaagagguuaugaacaucgugcugauugcccucagccuucuggcuaucuugaaggggauuuacaauguagcaacaugcggauuauucggucugguguccuuucuacuccuguguggcagaucuugcucaacuacguauaaaggggucuacgaacuucagacccuggaguuggacauggccagucucaacaugacaaugccucugagcuguacuaagaauaacucccaucacuauaucauggugggaaaugaaaccggccuggagcucacauuaaccaacacuucuauaaucaaucauaaauucugcaaccugucggaugcgcacaagaaaaaucuuuacgaccaugcuuugaugucaauuaucagcacauuucaccugaguauuccaaacuucaaucaguaugaggccauguccugugauuuuaacggugggaagaucucuguucaguacaaucuaagccacaccuaugcaauagacgccgcuaaccauugcggaacgauugcaaauggcgugcuccaaacuuucaugaggauggccuggggcggguccuacaucgcucuggauucaggaugcgguaguugggacuguauuaugaccagcuaccaguaucuuaucauccagaacacaacuugggaagaucacugccaguuuucucggccgucccccauuggcuaccugggguugcucucacaacgcacccgagacauauauaucagccguagacgccggggaacauucaccuggacgcugagugauucugagggcaacgaaacuccugguggguacugucucacaagguggaugcuuauugaggccgagcugaaaugcuuuggaaauaccgcggucgcaaaguguaacgaaaaacaugacgaggaguucugcgauauguugcggcuauuugacuucaauaagcaggccauccgcagacugaaaacucccgcucagauguccauacagcucauuaacaaggccgugaaugcacugaucaacgaucaacuuaucaugaagaaucaccugagggacauuaugugcaucccauauugcaacuacagcaaauauugguacuugaaucacacaguaaccggcaagacgucgcucccccgguguuggcugguuucuaacggguccuacuuaaaugaaacccauuucucagacgauauugagcagcaggcugacaacaugauaacagagaugcugcaaaaagaauauauggaucgccagggaaagacuccucuaggucucguggaccuguuugucuucaguaccagcuuuuaccuuaucuccauuuucuugcaccuggugaaaaucccaacacaucgacacgugaucggcaagcccugcccuaaaccacauagacucaaucacauggggauuuguucuugcggacuguauaagcacccgggcguccccguuaaguggaaaagguga

SEQ ID NO: 4876 - RNA, 1473 nt, Artificial Sequence
  derived and/or modified protein sequence (opt3) from LASV(ISTH2065-NIG-2012;Clade II)__AIT17528__GPCstabilized
augggccagaucauuaccuucuuucaagaggugccccacgucauagaagagguuaugaacaucgugcugauugcccucagccuucuggcuauguugaaggggaucuacaauauugcaacaugcggauuauucggucugaucuccuuucuacuccuguguggcagaucuugcucaacuacguauaaagggguauacgaacuucaggcccuggaguuggacauggcgaaccucaauaugaccaugccucugaguuguacaaagaacaauagccaucacuauauaauggugggaaacgaaacuggccuggagcucaccuuaacaaauaccuccaucauuaaccauaaauucugcaaucugucugaugcucacaagaaaaaccuuuacgaccaugccuugaugucgaucauuucaacuuuucaccugagcaucccaaauuucaaccaguaugaggcaaugaguugugauuuuaauggugggaagauauccguccaguacaaccuaucucacacauaugccggagacgcugcaaagcauugcggcaccauugccaauggcgugcuccaaacguucaugaggauggcuuggggagggagcuacaucgcccuggauuccgguugcggcaacugggacuguauuaugacuucauaccaguaucuuaucauccagaacaccacaugggaagaucacugccaguuuagucggccgagccccauuggguaccugggauugcucucucaacgcacucgagacauauauaucucccguagacgccggggcaccuucacauggacccugucagauagcgaggguaaugaaacgccugggggauacugucucacuagguggaugcuuauugaggcggagcugaagugcuuuggcaacacagcaguugccaaauguaaugaaaagcaugacgaggaguucugcgauauguugcggcuauuugacuucaacaaacaggcuauccgcagacugaagacccccgcccagaugaguauacagcucauuaauaaggcagugaacgcucugaucaaugaucaacuuaucaugaaaaaccaccugagggacauuaugugcaucccauauugcaauuacucuaaguauugguacuugaaccacuccgucacugggcggacaagccucccccgcuguuggcuggugucgaauggaucuuacuuaaacgaaacccaguucuccgacgauauugagcagcaagccgacaauaugauaacggagaugcugcagaaagaauauaucgaucgacaggguaagaccccucuaggccucguagaccuguuuguuuucucaacaaguuuuuaccuuauuagcaucuucuugcaucugaucaaaauuccaacucacagacauauaguggggaagcccugcccuaaaccacacaggcucaaccauaugggaaucuguuccugcggccuguauaagcacccggguauucccgucaaguggaaacgguga

SEQ ID NO: 4877 - RNA, 1473 nt, Artificial Sequence
  derived and/or modified protein sequence (opt3) from LASV(ISTH2094-NIG-2012;Clade II)__AIT17538__GPCstabilized
augggccagaucauuaccuucuuucaagaggugccccacgucauagaagagguuaugaacaucgugcugauugcccucagccuucuggcuaucuugaaggggauuuacaauaucgcaacaugcggauuauucggucugauauccuuucuacuccuguguggcagaucuugcucaacuacguauaaagggguauacgaacuucagacccuggaguuggacauggccaaccucaauaugacaaugccucugaguuguacuaagaacaauagccaucacuauaucauggugggaaacgaaaccggccuggagcucacauuaaccaauacuuccauuaucaaccauaaauucugcaaucugucugaugcgcacaagaaaaaccuuuacgaccaugcuuugaugucgauuaucucaacauuucaccugagcauaccaaauuucaaccaguaugaggccaugaguugugauuuuaaugaagguaagauuuccguccaguacaaccuaucucacagcuaugcaaucgacgccgcugggcauugcggaaccauugcaaauggcgugcuccaaacguucaugaggauggccuggggcggguccuacaucgcucuggauucaggaugcgguaacugggacuguaucaugaccaguuaccaguaucuuauuauacagaacacuacaugggaggaucacugccaguuuagccggccgucucccaucggcuaccugggguugcucucccaacgcacucgagacauuuauaucucacguagacgccggggaaccuucacauggacccugagcgauagugaaggcaaugaggccccugguggguacugucucacgagguggaugcuuauagaggcggaacugaaaugcuuuggaaacacugcaauugccaaguguaaugagaaacaugacgaagaguucugcgauauguugcggcuauuugacuucaacaagcaggcuaucaaacgccugaaggcccccgcacagaugucuauccaccucauuaauaaggcuguuaacgcccugaucaaugaucagcuuauuaugaaaaaccaccugagagacauaaugugcaucccauauugcaauuacuccaaguauugguacuugaaccauacagugaccggcaaaacuagccuccccaaguguuggcuggucucgaaugggucuuacuuaaacgagacacacuucuccgacgauauugagcaacaggcggacaauaugaucaccgaacugcuacagaaagaguauauggauaggcaaggaaagacgccucucggucugguggaccuuuuuguauucucaaccaguuuuuacuugaucagcauuuuccugcaucucguuaaaauaccaacacaccggcauaucgugggccgccccugcccuaagccacaccgacugaaccacauggggauuuguuccugcggacuuuauaagcauccgggcguccccgugaaauggaagagauga

SEQ ID NO: 4878 - RNA, 1473 nt, Artificial Sequence
  derived and/or modified protein sequence (opt3) from LASV(ISTH2129-NIG-2012;Clade II)__AIT17544__GPCstabilized
augggccagaucauuaccuucuuucaagaggugccccacgucauagaagagguuaugaacaucgugcugauugcccucagccuucuggcuaucuugaaggggauuuacaauguagcaacaugcggauuauucggucugguguccuuucuacuccuguguggcagaucuugcucaacuacguauaaaggggucuacgaacuucagacccuggaguuggacaugggaagucucaacaugacaaugccucugagcuguacuaagaauaacucccaucacuauaucauggugggcaaugaaaccggucuggagcucacauuaaccaacacuucuauaaucaaucauaaauucugcaaccugucggaugcccacaagaaaaaucuuuacgaccaugcguugaugucaauuaucagcacauuucaccugaguauuccaaacuucaaucaguaugaggcuauguccugugauuuuaacgggggaaagaucucuguucaguacaaucuaagccacuccuaugccguggacgcagccaaccauugcggcaccauagcuaauggcguccuccaaacguucaugaggauggcauggggagggucauacauugcccuggauagugguugcggcagcugggacuguaucaugacuucuuaccaguaucuuauuauccagaacaccacaugggaagaucacugccaguuuucccggccgucacccaucggguaccugggauugcucagccaacgcacucgagacauuuauauaagucguagacgccggggcaccuucacauggacccugucugauuccgaggguaacgaaacgccugggggauacugucucacuagguggaugcuuaucgaggcugagcugaaaugcuuuggcaauacagccguggcgaaguguaacgaaaaacaugacgaggaguucugcgauauguugcggcuauuugacuucaauaagcaggcaauucgcagacugaaaacccccgcccagaugagcauccagcucauaaacaaggcuguaaaugcccugauuaacgaucaacuuaucaugaagaaucaccugagggacaucaugugcauuccauauugcaacuacucgaaauauugguacuugaaucacacuguuacagggaagaccucucucccccgguguuggcugguguccaacggaucauacuuaaaugaaacgcauuucagugacgauaucgagcagcaggcagacaacaugauuaccgagcugcuacaaaaagaauauauggaucgccaggguaagacaccucucggccuggucgaccuuuuuguguucagcacuuccuuuuacuugauaucuaucuuccugcaccucgugaaaauuccaacccaucgacacaucaucgggaagcccugcccuaaaccacauagacugaaucacaugggaauuuguagcugcggccuuuauaagcacccggguguccccguuaaguggaaaagguga

SEQ ID NO: 4879 - RNA, 1473 nt, Artificial Sequence
  derived and/or modified protein sequence (opt3) from LASV(ISTH2217-NIG-2012;Clade II)__AIT17548__GPCstabilized
augggccagaucauuaccuucuuucaagaggugccccacgucauagaagagguuaugaacaucgugcugauugcccucagccuucuggcuaucuugaaggggauuuacaauguagcaacaugcggauuauucggucugguguccuuucuauuccucuguggcagaucuugcucaacuacguauaaaggggucuacgaacugcagacccuugagcuggacauggccaguuugaacaugacaaugccucucagcuguacuaagaauaacucccaucacuauaucauggugggaaaugaaaccggccuggagcugacacucaccaacacuucuauaaucaaucauaaauuuugcaacuuaucggaugcgcacaagaggaaucuguacgaccaugcucuuaugucaauuaucagcacauuccacuugaguauuccaaacuuuaaucaguaugaggccauguccugugauuucaacggugggaaaaucucuguucaguacaaucugagccacgcauaugccggagacgcugcaaagcauugcggcaccauagccaacggcgugcuacaaacguuuaugcggauggcuuggggaggguccuacauugcccucgauucagguugcggcaguugggacuguaucaugacuagcuaccaguaucugauuauccagaauaccacaugggaagaucacugccaguucucucgcccgucccccaucggguaccuuggacuguugucacaacgaacucgugacauuuauauaagcagaaggcgccggggcaccuuuacauggaccuuaagugauucugaggguaacgaaacgccugggggauacugucugacucgguggaugcucaucgaggcggagcuuaaaugcuucggcaacacagcagucgccaaguguaaugaaaaacaugacgaggaauuuugcgauaugcugcgcuuguucgacuucaacaagcaggcuauuagaaggcuacggacccccgcccagauguccauccagcugauaaauaaagcagugaacgcucucauuaaugaucaacugaucaugaagaaccaccuucgcgacaucaugugcauuccauauugcaauuacagcaaguauugguaccugaaccacacuguaacagggaaaaccucguugcccaaguguuggcucguuucuaauggauccuaccugaacgaaacgcauuuuucagacgauaucgagcagcaggccgacaauaugauuaccgagauguuacaaaaagaauauauagaucgacaggguaagacaccucugggccuaguggaccucuucgucuuuaguacuagcuucuaccugaucuccauuuuucuucacuuggugaaaaucccaacccauagacacgugaucgggaagcccugcccuaaaccacauaggcugaaccacaugggaauuuguucuugcggccucuauaagcacccggguguccccguuaaguggaaacgguga

SEQ ID NO: 4880 - RNA, 1473 nt, Artificial Sequence
  derived and/or modified protein sequence (opt3) from LASV(ISTH2271-NIG-2012;Clade II)__AIT17552__GPCstabilized
augggccagaucauuaccuucuuucaagaggugccccacgucauagaagagguuaugaacaucgugcugauugcccucagccuucuggcuaucuugaaggggauuuacaauguagcaacaugcggauuauucggucugguguccuuucuacuccuguguggcagaucuugcucaacuacguauaaaggggucuacgaacuucagacccuggaguuggacauggccagucucaacaugacaaugccucugagcuguacuaagaauaacucccaucacuauaucauggugggaaaugaaaccggccuggagcucacauuaaccaacacuucuauaaucaaucauaaauucugcaaccugucggaugcgcacaagaaaaaucuuuacgaccaugcuuugaugucaauuaucagcacauuucaccugaguauuccaaacuucaaucaguaugaggccauguccugugauuuuaacggugggaagaucucuguucaguacaaucuaagccacgcauaugccgugaacgcugcaaaucauugcggaaccauagccaacggcguccuccaaacguucaugaggauggcuuggggcggguccuacauugcccuggacucaggaugcgguaguugggauuguaucaugacuagcuaccaguaucuuauuauccagaacaccacaugggaagaccacugccaguuuucucggccgucccccaucggcuaccugggguugcucucacaacgcacucgagauauuuauauaagccguagacgccggggaaccuucacauggacccugagugacucugagggcaaugaaacgccugguggguacugucucacuagguggaugcuuaucgaggcggagcugaaaugcuuuggaaacacagcaguggccaaguguaaugaaaaacaugaugaggaguucugcgacauguugcggcuauuugauuucaacaagcaggcuauucgcagacugaaaacccccgcccagauguccauccagcucauaaauaaggcaguaaacgcucugauuaaugaccaacuuaucaugaagaaccaccugagggauaucaugugcauuccauauugcaauuacagcaaauauugguacuugaaccacacuguuacaggcaagaccucgcucccccgguguuggcuggugucuaauggguccuacuuaaacgaaacgcauuucucagacgacaucgagcagcaggccgauaauaugauuaccgagcugcuacaaaaagaauauauggaccgccagggaaagacaccucucggucuggucgaucuuuuuguguucaguacuagcuuuuacuugauauccaucuuccugcaccucgugaaaauuccaacccaucgacacgucaucggcaagcccugcccuaaaccacauagacugaaccacauggggaucuguucuugcggacuuuauaagcacccgggcguucccgugaaguggaaaaaguga

SEQ ID NO: 4881 - RNA, 1473 nt, Artificial Sequence
  derived and/or modified protein sequence (opt3) from LASV(ISTH2304-NIG-2012;Clade II)__AIT17556__GPCstabilized
augggccagaucauuaccuucuuucaagaggugccccacgucauagaagagguuaugaacaucgugcugauugcccucagccuucuggcuaucuugaaggggauuuacaauguagcaacaugcggauuauucggucugguguccuuucuacuccuguguggcagaucuugcucaacuacguauaaaggggucuacgaacuucagacccuggaguuggacauggccagucucaacaugacaaugccucugagcuguacuaagaauaacucccaucacuauaucauggugggaaaugaaaccggccuggagcucacauuaaccaacacuucuauaaucaaucauaaauucugcaaccugucggaugcgcacaagaaaaaucuuuacgaccaugcuuugaugucaauuaucagcacauuucaccugaguauuccaaacuucaaucaguaugaggccauguccugugauuuuaacggugggaagaucucuguucaguacaaucuaagccacaccuaugcaguggacgccgcuaaccauugcggaacgauagcaaauggcguccuccaaacuuucaugaggauggccuggggcggguccuacauugcucuggauucaggaugcgguaguugggacuguaucaugaccagcuaccaguaucuuauuauccagaacacaacuugggaagaucacugccaguuuucucgcccgucccccaucggcuaccugggguugcucucacaacgaacccgugacauuuauauaagcagaaggcgccggggaacauucaccuggacgcugagugauucugagggcaacgaaacuccugguggguacugucucacacgguggaugcuuaucgaggccgagcugaagugcuuuggaaauaccgcgguggcaaaauguaacgaaaagcaugacgaggaguucugcgauauguugcgccuauuugacuucaauaaacaggccauuagaaggcugaagacucccgcucagauguccauccagcucauaaacaaagccguaaaugcacugauuaacgaucaacuuaucaugaagaaucaucugcgggacaucaugugcauuccauauugcaacuacagcaaguauugguacuugaaucacacaaucaccggcaaaacgucgcucccccgcuguuggcugguuucuaacggguccuacuuaaaugaaacccacuucucagacgauauugagcagcaggcugacaacaugauaacagagcugcuacaaaaggaauauaucgaucgacagggaaaaacuccucucggucugguggaccuuuuugucuucaguaccagcuuuuacuugauuuccaucuuccugcaccucgugaagaucccaacacauagacacauuacuggcaaacccugcccuaagccacauaggcugaaucacauggggauauguucuugcggacuuuauaaacacccgggcgugcccguccgguggaagcguuga

SEQ ID NO: 4882 - RNA, 1473 nt, Artificial Sequence
  derived and/or modified protein sequence (opt3) from LASV(ISTH2312-NIG-2012;Clade II)__AIT17560__GPCstabilized
augggccagaucauuaccuucuuucaagaggugccccacgucauagaagagguuaugaacaucgugcugauugcccucagccuucuggcuguauugaaggggaucuacaauguggcaacaugcggauuauucggucuggucuccuuucuacuccuguguggcagaucuugcucaacuacguauaaagggguguacgaacuucagacccuggaguuggacauggccagucucaacaugacaaugccucugagcuguacuaccaauaacucccaucacuauauuaugguuggaaaugaaacaggccuggagcucaccuuaacuaacacaucuaucauaaaucauaaguucugcaaccugucggaugcgcacaaaaagaaucuuuacgaccaugcuuugaugucaaucauuagcaccuuucaccugaguaucccaaacuucaaucaguaugaggccauguccugugauuuuaacggugggaaaauuucugugcaguacaaucuaagccacgcauaugccggagaagcugcaaaccauugcggcacgaucgccaauggcguccuccaaacuuucaugaggauggcuuggggaggguccuacauagcccuggacucagguugcggcaguugggauuguauuaugaccagcuacaaguaucuuaucauucagaacacaacuuggggagaccacugccaguuuucucggccgucccccaucggguaccugggcuugcucucacagcgcacccgagauaucuauauuagccguagacgccgggguacauucaccuggacgcugagugacucugaggggaacgaaacuccuggaggcuacugucucacaagguggaugcuuauagaggcggagcugaaaugcuuuggcaauaccgcaguggccaaguguaacgaaaaacaugaugaggaguucugcgacauguugcggcuauuugauuucaauaagcaagcuauccgcaaacugaagacucccgcccagauguccauucagcucaucaacaaggcaguaaaugcucugauaaacgaccagcuuauuaugaaaaaucaccugagagauaucaugugcaucccauauugcaacuacagcagguauugguacuugaaucacacaguuaccggacggacgucgcucccccgcuguuggcuggugucuaacgguuccuacuuaaaugaaacccauuucucagacgacauugagcaacaggccgauaacaugaucacagagcugcuacagaaggaauauauugaccgacaaggcaaaacuccucucgggcuggucgaucuuuuuguguucaguaccagcuuuuacuugauauccaucuuccugcaccucgugaagauuccaacacauagacacaucaucggaaaacccugcccuaagccacauaggcugaaucacaugggcauuuguucuugcggucuuuauaaacacccggggguccccguuaaguggaagcgguga

SEQ ID NO: 4883 - RNA, 1473 nt, Artificial Sequence
  derived and/or modified protein sequence (opt3) from LASV(ISTH2316-NIG-2012;Clade II)__AIT17564__GPCstabilized
augggccagaucauuaccuucuuucaagaggugccccacgucauagaagagguuaugaacaucgugcugauugcccucagccuucuggcuaucuugaaggggauuuacaauguagcaacaugcggauuauucggucugcuauccuuucuccugcuuuguggcagaucuugcucaacuacguauaaagggguguacgaacugcagaccuuggagcucgacauggccagucugaacaugacaaugccucugagcuguacuaagaauaacucccaucacuauaucauggucggaaaugaaaccggccucgaguuaacacugaccaacacuucuauaaucaaucauaaauucugcaaccuuucggaugcgcacaagaaagacuuguacgaucaugcucugaugucaauuaucagcacauuucaccuaaguauuccaaauuucaaccaguaugaggccauguccugugacuuuaauggugggaagaucucugugcaguacaaccucagccacgcauaugccguugaugcugcaaagcauugcggaaccauagccaauggcgugcugcaaacguucaugaggauggcuuggggcggguccuacauugcccuugacucaggaugcgguaguugggauuguaucaugacuagcuaccaguaucugauuauccagaacaccucuugggaagaccacugccaguuuucccggccgucacccaucggcuacuuggggcuccugagccaacgcacacgagauauuuauauaagucguagacgccggggaacuuucaccuggacacucucugacuccgagggcaaugaaaccccugguggguacugucuuacgagguggaugcugaucgaggcggaguugaagugcuuuggaaacacugcagucgccaaauguaacgaaaagcaugaugaggaguucugcgacaugcuacggcuguuugauuucaauaaacaggcuauuaagcgccucaagacacccgcccagaugagcauccagcugauaaacaaagcagugaaugcucuuauuaacgaccaacugaucaugaagaaucacuugagagacaucaugugcauuccauauugcaacuacucgaaauauugguaccucaaucacaccguaacuggcaagacaucucugcccagguguugguuaguuuccaacgggucauaccugaaugaaacccauuucagugaugacaucgagcagcaggccgauaacaugauuacggagcuacuccaaaaagaauauauagaccggcagggaaagaccccucugggucuuguggauuuguuugucuucagcacauccuuuuaccugaucucuauuuuccuccaccuggugaaaaucccaacucaucgccacgugaucggcaagcccugcccuaagccacaucgacuuaaucacauggggauuuguagcugcggacuguauaaacacccgggcguccccguuaaguggaaaagauga

SEQ ID NO: 4884 - RNA, 1473 nt, Artificial Sequence
  derived and/or modified protein sequence (opt3) from LASV(ISTH2358-NIG-2012;Clade II)__AIT17572__GPCstabilized
augggccagaucauuaccuucuuucaagaggugccccacgucauagaagagguuaugaacaucgugcugauugcccucagccuucuggcuaucuugaaggggauuuacaauguagcaacaugcggauuauucggucugguguccuuucuacuccuguguggcagaucuugcucaacuacguauaaaggggucuacgaacuucagacccuggaguuggacauggccaaccucaauaugacaaugccucugaguuguacuaagaacaauagccaucacuauaucauggugggaaacgaaaccggccuggagcucacauuaaccaauacuuccauaaucaaccauaaauucugcaaucugucugaugcgcacaagaaaaaccuuuacgaccaugcuuugaugucgauuaucucaacauuucaccugagcauuccaaauuucaaccaguaugaggccaugaguugugauuuuaauggugggaagaucuccguucaguacaaccuaucucacaauuaugcaguggacgccgcuaaccauugcggaaccauagcaaacggcguccuccaaacguucaugaggauggccuggggcgggagcuacauugcucuggauuccggaugcgguaauugggacuguaucaugacuucauaccaguaucuuauuauccagaacaccacaugggaagaucacugccaguuuagucggccgagccccaucggcuaccugggguugcucucucaacgcacucgagacauuuauauaucccguagacgccggggaaccuucacauggacccugucagauagcgagggcaaugacaugccugguggguacugucucacgagguggaugcuuaucgaagccgagcugaaaugcuuuggaaacacugcgguggcaaaguguaaugagaaacaugaugaagaguucugcgacauguugcggcuauuugauuucaacaagcaggccauucgcagacugaaaacacccgcucagaugaauauccagcucauaaacaaggccguaaaugcacugauuaacgaccaacuuaucaugaagaaucaccugagggacaucaugugcauuccauauugcaacuacaguaaauauugguacuugaaucacaccguuacuggcaagacaucucucccccgguguuggcugguguccaacgggagcuacuuaaaugagacccauuucucggaugacaucgaacagcaggcugauaacaugauuacggagcugcuacaaaaagaguauauggaccgccagggaaagaccccucucggucuggucgaucuuuuuguguucucuacauccuuuuacuugauaucaaucuuccugcaccucgugaaaauuccaacucaucgacacaucaucggcaagcccugcccuaaaccacauagacugaaccacauggggauuuguaguugcggacuuuauaagcacccgggcguccccguuaaguggaaaagguga

SEQ ID NO: 4885 - RNA, 1473 nt, Artificial Sequence
  derived and/or modified protein sequence (opt3) from LASV(ISTH2376-NIG-2012;Clade II)__AIT17576__GPCstabilized
augggccagaucauuaccuucuuucaagaggugccccacgucauagaagagguuaugaacaucgugcugauugcccucagccuucuggcuaucuugaaggggauuuacaauguagcaacaugcggauuauucggucugguguccuuucuacuccuguguggcagaucuugcucaacuacguauaaaggggucuacgaacuucagacccuggaguuggacauggccagucucaacaugacaaugccucugagcuguacuaagaauaacucccaucacuauaucauggugggaaaugaaaccggccuggagcucacauuaaccaacacuucuauaaucaaucauaaauucugcaaccugucggaugcgcacaagaaaaaucuuuacgaccaugcuuugaugucaauuaucagcacauuucaccugaguauuccaaacuucaaucaguaugaggccauguccugugauuuuaacggugggaagaucucuguucaguacaaucuaagccacaccuaugcaguggacgccgcuaaccauugcggaacgauagcaaauggcguccuccaaacuuucaugaggauggccuggggcggguccuacauugcucuggauucaggaugcgguaacugggacuguaucaugaccaguuaccaguaucuuauuauccagaacacaacuugggaagaucacugccaguuuagccggccgucucccaucggcuaccugggguugcucucccaacgcacccgagacauuuauauaucacguagacgccggggaacauucaccuggacgcugagcgauagugagggcaaugaaacuccugguggguacugucucacaagguggaugcuuaucgaggccgagcugaaaugcuuuggaaacaccgcgguggcaaaguguaaugaaaaacaugacgaggaguucugcgauauguugcggcuauuugacuucaacaagcaggccauuucucgccugaaaacucccgcucagauguccauccagcucauaaauaaggccguaaacgcacugauuaaugaucaacuuaucaugaagaaccaccugagagacaucaugugcauuccauauugcaauuacagcaaauauugguacuugaaccacacaguuaccggcaagacgucgcuccccagguguuggcuggugucuaauggguccuacuuaaacgaaacccauuucucagacgauaucgagcagcaggcugacaauaugauuacagagaugcugcaaaaagaauauauagaucggcagggaaagacuccucuaggucucgucgaccuguuuguguucaguaccagcuuuuaccuuaucuccauuuucuugcaccuggugaaaaucccaacacaucgccacaucacuggcaagcccugcccuaaaccacaucgacucaaccacauggggauuuguucuugcggacuguauaagcacccgggcguccccguuaaguggaaaagauga

SEQ ID NO: 4886 - RNA, 1473 nt, Artificial Sequence
  derived and/or modified protein sequence (opt3) from LASV(Lassa virus/H.sapiens-wt/NGA/2015/ISTH_0543;Clade II)__AVO03639__GPCstabilized
augggccagaucauuaccuucuuucaagaggugccccacgucauagaagagguuaugaacaucgugcugauugcccucagccuucuggcuaucuugaaggggauuuacaauguagcaacaugcggauuauucggucugguguccuuucuacuccuguguggcagaucuugcucaacuacguauaaaggggucuacgaacuucagacccuggaguuggacauggccaaccucaauaugacaaugccucugaguuguacuaagaacaauagccaucacuauaucauggugggaaacgaaaccggccuggagcucacauuaaccaauacuuccauaaucaaccauaaauucugcaaucugucugaugcgcacaagaaaaaccuuuacgaccaugcuuugaugucgauuaucucaacauuucaccugagcauuccaaauuucaaccaguaugaggccaugaguugugauuuuaauggugggaagaucuccguucaguacaaccuaucucacaccuaugcaguggacgccgcuaaucauugcggaacgauagcaaacggcguccuccaaacuuucaugaggauggccuggggcgggagcuacauugcucuggauuccggaugcgguucaugggacuguaucaugaccaguuaccaguaucuugugauucagaacacaacuugggaagaucacugccaguuuagccggccgucucccaucggcuaccugggguugcucucccaacgcacccgagacaucuauauuucacguagacgccggggaacauucaccuggacgcugagcgauagugagggcaaugaaacuccugguggguacugucucacaagguggaugcuuauagaggccgagcugaaaugcuuuggaaacaccgcgguagcaaaguguaaugaaaaacaugacgaggaguucugcgauauguugcggcuauuugacuucaacaagcaggccauccgcagacugaaaacucccgcucagaugucuauucagcucaucaauaaggccguuaacgcacugauaaaugaucaacuuauuaugaagaaccaccugagggacaucaugugcaucccauauugcaauuacuccaaauauugguacuugaaccacacagugaccggcaagacgagccucccccgguguuggcuggucucgaaugggucuuacuuaaacgaaacccauuucuccgacgauauugagcagcaggcugacaauaugaucacagagcugcuacaaaaagaauauauugaucgccagggaaagacuccucucggucugguggaccuuuuuguguucucaaccaguuuuuacuugauaagcaucuuccugcaccucgucaaaauuccaacacaucgacacaucacuggcaagcccugcccuaaaccacauagacugaaccacauggggaucuguuccugcggacuuuauaagcacccgggcguucccgugaaguggaaaagguga

SEQ ID NO: 4887 - RNA, 1473 nt, Artificial Sequence
  derived and/or modified protein sequence (opt3) from LASV(Lassa virus/H.sapiens-wt/NGA/2015/ISTH_0547;Clade II)__AVO03583__GPCstabilized
augggccagaucauuaccuucuuucaagaggugccccacgucauagaagagguuaugaacaucgugcugauugcccucagccuucuggcuaucuugaaggggauuuacaauguagcaacaugcggauuauucggucugguguccuuucuacuccuguguggcagaucuugcucaacuacguauaaaggggucuacgaacuucagacccuggaguuggacauggccagucucaacaugacaaugccucugagcuguacuaagaauaacucccaucacuauaucauggugggaaaugaaaccggccuggagcucacauuaaccaacacuucuauaaucaaucauaaauucugcaaccugucggaugcgcacaagaaaaaucuuuacgaccaugcuuugaugucaauuaucagcacauuucaccugaguauuccaaacuucaaucaguaugaggccauguccugugauuuuaacggugggaagaucucuguucaguacaaucuaagccacaccuaugcaguggacgccgcuaaccauugcggaacgauagcaaauggcguccuccaaacuuucaugaggauggccuggggcggguccuacauugcucuggauucaggaugcgguaguugggacuguaucaugaccagcuaccaguaucuuauuauccagaacacaacuugggaagaucacugccaguuuucucggccgucccccaucggcuaccugggguugcucucacaacgcacccgagacauuuauauaagccguagacgccggggaacauucaccuggacgcugagugauucugagggcaacgaaacuccugguggguacugucucacaagguggaugcuuaucgaggccgagcugaaaugcuuuggaaauaccgcgguggcaaaguguaacgaaaaacaugacgaggaguucugcgauauguugcggcuauuugacuucaauaagcaggccauucgcagacugaaaacucccgcucagauguccauccagcucauaaacaaggccguaaaugcacugauuaacgaucaacuuaucaugaagaaucaccugagggacaucaugugcauuccauauugcaacuacagcaaauauugguacuugaaucacacaguuaccggcaagacgucgcucccccgguguuggcuggugucuaacggguccuacuuaaaugaaacccauuucucagacgauaucgagcagcaggcugacaacaugauuacagagcugcuacaaaaagaauauauagagcgccagggaaagacuccucucggucuggucgaucuuuuuguguucaguaccagcuuuuacuugaucuccauuuuccugcaccucgugaaaaucccaacacaucgacacaucacuggcaagcccugcccuaaaccacauagacugaaucacauggggauuuguucuugcggacuuuauaagcacccgggcguccccguuaaguggaaaagguga

SEQ ID NO: 4888 - RNA, 1473 nt, Artificial Sequence
  derived and/or modified protein sequence (opt3) from LASV(Lassa virus/H.sapiens-wt/NGA/2015/ISTH_0574;Clade II)__AVO03657__GPCstabilized
augggccagaucauuaccuucuuucaagaggugccccacgucauagaagagguuaugaacaucgugcugauugcccucagccuucuggcuaucuugaaggggauuuacaauguagcaacaugcggauuauucggucugguggccuuucuacuccuguguggcagauccugcucuacuacguauaaaggggucuacgaacuucagacccuggaguuggacauggcgucacucaacaugacaaugccucugaguuguacuaagaauaacagccaucacuauaucauggugggaaaugaaaccggccuggagcucacauuaaccaacacuuccauaaucaaucauaaauucugcaaccugucugaugcucacaagaaaaaucuuuacgaccaugccuugaugucgauuaucucaacauuucaccugagcauuccaaacuucaaucaguaugaggcaaugaguugugauuuuaacggugggaagaucuccguucaguacaaucuaucucacaccuaugccguggacgcugcaaaccauugcggaacgauaacuaauggcguccuccaaaccuucaugaggauggccuggggcgggagcuacauugcucuggauuccggaugcgguucaugggacuguaucaugacaaguuaccaguaucuuauuauccagaacacuaccugggaagaucacugccaguuuagccggccgucucccaucggcuaccugggguugcucucccaacgcacacgagacauuuauauaucacguagacgccggggaaccuucacguggacucugagcgauagugagggcaacgaaacaccugguggguacugucucaccagguggaugcuuaucgaggccgagcugaaaugcuuuggaaauacugcgguggcaaaguguaacgaaaaacaugacgaggaguucugcgauauguugcggcuauuugacuucaauaagcaggccauucgcagacugaaaacacccgcucagaugucuauccagcucauaaacaaggccguaaaugcacugauuaacgaucaacuuaucaugaagaaucaccugagggacaucaugugcauuccauauugcaacuacuccaaauauugguacuugaaucacaccguuacgggccggaccagccucccccgcuguuggcuggugucgaacgggucuuacuuaaaugaaacacauuucuccgacgauaucgagcagcaggcugacaacaugauuacugagcugcuacaaaaggaauauauggaucgacagggaaaaaccccucucggucuggucgaccuuuuuguguucucaacaaguuuuuacuugauaagcaucuuccugcaccucauuaagaucccaacucauagacacgugaucggcaaacccugcccuaagccacauaggcugaaucacauggggauuuguuccugcggacuuuauaaacacccgggcguccccguuaaguggaagcgguga

SEQ ID NO: 4889 - RNA, 1473 nt, Artificial Sequence
  derived and/or modified protein sequence (opt3) from LASV(Lassa virus/H.sapiens-wt/NGA/2015/ISTH_0681;Clade II)__AVO03617__GPCstabilized
augggccagaucauuaccuucuuucaagaggugccccacgucauagaagagguuaugaacaucgugcugauugcccucagccuucuggcuaucuugaaggggauuuacaauguagcaacaugcggauuauucggucugguguccuuucuacuccuguguggcagaucuugcucaacuacguauaaaggggucuacgaacuucagacccuggaguuggacauggccagucucaacaugacaaugccucugagcuguacuaagaauaacucccaucacuauaucauggugggaaaugaaaccggccuggagcucacauuaaccaacacuucuauaaucaaucauaaauucugcaaccugucggaugcgcacaagaaaaaucuuuacgaccaugcuuugaugucaauuaucagcacauuucaccugaguauuccaaacuucaaucaguaugaggccauguccugugauuuuaacggugggaagaucucuguucaguacaaucuaagccacaccuaugcagaaggagccgcuaaccauugcggcacgauagcaaauggcgugcuccaaacuuucaugaggauggccuggggaggguccuacauugcucuggacucagguugcggcaguugggauuguaucaugaccagcuaccaguaucuuauuauccagaacacaacuugggaggaccacugccaguuuucucggccgucccccaucggguaccugggauugcucucacaacgcacccgagauauuuauauaagccguagacgccggggcacauucaccuggacgcugagugacucugaagguaacgagacuccugggggauacugucucacaagguggaugcuuaucgaggccgaacugaaaugcuuuggcaauaccgcggucgcaaaguguaacgagaaacaugaugaagaguucugcgacauguugcggcuauuugauuucaauaagcaggccauuaugcgccugaaaacucccgcucagauguccauccagcucauaaacaaggccgugaaugcacugauuaacgaccaacuuaucaugaagaaucaccugagagauaucaugugcauuccauauugcaacuacagcaaauauugguacuugaaucacacaguaaccgggaagacgucgcuccccagguguuggcugguuucuaacggauccuacuuaaaugagacccauuucucagacgacaucgagcagcaggcugauaacaugauuacagaaaugcugcaaaaagaguauauggaccggcaggguaagacuccucuaggccucguggaucuguuugucuucaguaccagcuuuuaccuuauauccaucuucuugcaccuggugaaaauuccaacacaucgccacgugaucgggaagcccugcccuaaaccacaucgacucaaucacaugggaaucuguucuugcggccuguauaagcacccggguguccccguuaaguggaaaagauga

SEQ ID NO: 4890 - RNA, 1473 nt, Artificial Sequence
  derived and/or modified protein sequence (opt3) from LASV(Lassa virus/H.sapiens-wt/NGA/2015/ISTH_0682;Clade II)__AVO03625__GPCstabilized
augggccagaucauuaccuucuuucaagaggugccccacgucauagaagagguuaugaacaucgugcugauugcccucagccuucuggcuaucuugaaggggauuuacaauguagcaacaugcggauuauucggucugguguccuuucuacuccuguguggcagaucuugcucaacuacguauaaaggggucuacgaacuucagacccuggaguuggacauggccagucucaacaugacaaugccucugagcuguacuaagaauaacucccaucacuauaucauggugggaaaugaaaccggccuggagcucacauuaaccaacacuucuauaaucaaucauaaauucugcaaccugucggaugcgcacaagaaaaaucuuuacgaccaugcuuugaugucaauuaucagcacauuucaccugaguauuccaaacuucaaucaguaugaggccauguccugugauuuuaacggugggaagaucucuguucaguacaaucuaagccacgcauaugccguggacgcugcaaaccauugcggaaccauagccaauggcguccuccaaacguucaugaggauggcuuggggcggguccuacauugcccuggauucaggaugcgguaguugggacuguaucaugacuagcuaccacuaucuuauuauccagaacaccacaugggaagaucauugccaguuuucucggccgucccccaucggcuaccugggguugcucucacagcgcacucgagacauuuauauaagccguagacgccggggaaccuucacauggacccugagugauucugagggcaacgaaacgccugguggguacugucucacuagguggaugcuuaucgaggcggagcugaaaugcuuuggaaauacagcaguggccaaguguaacgaaaaacacgacgaggaguucugcgauauguugcggcuauuugacuucaauaagcaagcuauucgcagacugaaaacccccgcccagauguccauccagcucauaaacaaggcaguaaaugcucugauuaacgaucagcuuaucaugaagaaucaccugagggacaucaugugcauuccauauugcaacuacagcaaauauugguacuugaaucauacuguuacaggcaagaccucgcucccccgguguuggcuggugucuaacggguccuacuuaaaugaaacgcacuucucagacgauaucgagcaacaggccgacaacaugauuaccgagcugcuacagaaagaauauauagaucgccaaggaaagacaccucucggucuggucgaccuuuuuguguucaguacuagcuuuuacuugaucuccauuuuccugcaucucgugaaaaucccaacccaccgacaugucaucggcaagcccugcccuaaaccacacagacugaaucacauggggauuuguucuugcggacuuuauaagcauccgggcguucccgugaaguggaaaagguga

SEQ ID NO: 4891 - RNA, 1473 nt, Artificial Sequence
  derived and/or modified protein sequence (opt3) from LASV(Lassa virus/H.sapiens-wt/NGA/2015/ISTH_0687;Clade II)__AVO03581__GPCstabilized
augggccagaucauuaccuucuuucaagaggugccccacgucauagaagagguuaugaacaucgugcugauugcccucagccuucuggcuaucuugaaggggauuuacaauguagcaacaugcggauuauucggucugguguccuuucuacuccuguguggcagaucuugcucaacuacguauaaaggggucuacgaacuucagacccuggaguuggacaugacaaaccucaauaugacuaugccucugaguuguaccaagaacaauagccaucacuauaucauggugggaaacgaaacaggccuggagcucaccuuaacuaauacauccauaaucaaccauaaauucugcaaucugucugaugcccacaagaaaaaccuuuacaaucaugcguugaugucgauuaucucaaccuuucaccugagcauuccaaacuucaaucaguaugaggcuaugaguugugacuuuaacggugggaagaucuccguucaguacaaucuaucucacacguaugccguggaugcagccaaccauugcggaacugucgcuaacggcgugcuccaaaccuucaugaggauggcauggggcgggagcuacauagcccuggacuccggaugcgguggcugggauuguauuaugacaucauaccaguaucuuaucauucagaauacuaccugggaagaccacugccaguuuagucggccgagccccaucggguaccugggauugcucucucaacgcacacgagauaucuauauuucccguagacgccggggcaccuucacguggacucugucagacagcgaggguaacgaaacaccugggggauacugucucaccagguggaugcuuauagaggcugagcugaaaugcuuuggcaauacugccguagcgaaguguaacgaaaaacaugaugaggaguucugcgacauguugcggcuauuugauuucaauaagcaggcaauccgcaaacugaaggcccccgcucagaugaguauucagcucaucaacaaggccguuaaugcacugauaaacgaccaacuuauuaugaaaaaucaccugagagauaucaugugcaucccauauugcaacuacucuaaguauugguacuugaaucacacagugaccgggaaaacgucccuccccaaguguuggcuggucagcaacggaucguacuuaaaugaaacccauuucucugacgacauugagcagcaggcugauaacaugaucacagagcugcuacaaaaagaauauauggacaggcaggguaagacuccucucggccugguggaucuuuuuguguucuccaccucauuuuacuugauuaguauauuccugcaccucgucaaaaucccaacacaucggcacauuaucgggaagcccugcccuaagccacaucgccugaaucacaugggaaucuguagcugcggccuuuauaaacacccggguguucccgugaaguggaaacgauga

SEQ ID NO: 4892 - RNA, 1473 nt, Artificial Sequence
  derived and/or modified protein sequence (opt3) from LASV(Lassa virus/H.sapiens-wt/NGA/2015/ISTH_0736;Clade II)__AVO03573__GPCstabilized
augggccagaucauuaccuucuuucaagaggugccccacgucauagaagagguuaugaacaucgugcugauugcccucagccuucuggcuguauugaaggggaucuacaauguggcaacaugcggauuauucggucuggucuccuuucuacuccuguguggcagaucuugcucaacuacguauaaagggguguacgaacuucagacccuggaguuggacauggccagucucaacaugacaaugccucugagcuguacuaagaauaacucccaucacuauauuaugguuggaaaugaaaccggccuggagcucacauuaaccaacacuucuaucauaaaucauaaauucugcaaccugucggaugcgcacaagaaaaaucuuuacgaccaugcuuugaugucaaucauuagcacauuucaccugaguaucccaaacuucaaucaguaugaggccauguccugugauuuuaacggugggaagauuucugugcaguacaaucuaagccacacccaugcagucgacgccgcuaaccacugcggaacgaucgcaaauggcgugcuccaaacuuucaugaggauggccuggggcggguccuauauagcucuggauucaggaugcgguaguugggacuguauuaugaccagcuaccaguaccuuaucauucagaacacaacuugggaagaucauugccaguuuucucggccgucccccaucggcuaucugggguugcucucacaacgcacccgagacaucuacauuagccguagacgccggggaacauucaccuggacgcugagugauucugagggcaacgaaacuccugguggguauugucucacaagguggaugcuuauagaggccgagcugaaaugcuuuggaaauaccgcgguagcaaaguguaacgaaaaacacgacgaggaguucugcgauauguugcggcuauuugacuucaauaagcaggccauccgcagacugaaaacucccgcucagauguccauucagcucaucaacaaggccguuaaugcacugauaaacgaucaacuuauuaugaagaaucaccugagggacaucaugugcaucccauacugcaacuauagccgguacugguauuugaaucauacagugaccggcaaaacgucgcucccccgcuguuggcuggucucuaacggguccuacuuaaaugaaacccacuucucagacgauauugagcagcaggcugacaacaugaucacagagcugcuacaaaaggaauacauugaucgacagggaagaacuccucucggucugguggaccuuuuuguguucaguaccagcuuuuauuugauauccaucuuccugcaucucgucaaaauuccaacacacaggcauguuaucggcaagcccugcccuaaaccacaccggcugaaucacauggggaucuguucuugcggacuuuacaagcauccgggcgugcccguaaaauggaagcguuga

SEQ ID NO: 4893 - RNA, 1473 nt, Artificial Sequence
  derived and/or modified protein sequence (opt3) from LASV(Lassa virus/H.sapiens-wt/NGA/2015/ISTH_0789;Clade II)__AVO03551__GPCstabilized
augggccagaucgugaccuucuuucaagaggucccccacguuauugaagagauaaugaacaucgugcugauuacacucagccuucuggccaucuugaaggggguauacaauuuagcuacuugcggacugauuggucuaaucacguuccucuuucuguguggcagauccugcucuaccauauauaaagggucauaccaguuccagacacuugaacugaacauggagacuuugaauaugaccaugccucucaguuguacaaagaacagcucccaucacuauaucagggugucuaaugaaaccggacuggagcugacucucacaaacaccucgauuaucaaucauaaauuuugcaacuuaucagacgcacacaagaaaaaucuguacgaucauacgcuuaugagcauuaucaguacuuuccacuuguccauaccaaacuuuaaucaguaugaggccaugucuugugacuucaacggcgguaagauuagcguccaauacaaucugucccacucauaugcgguggaugcugccaaccauugcgggaccguugcaaauggagugcuacagacauuuaugcggauggccuggggcggcaguuacaucgcucucgacagcgggugcggaaacugggauuguauuaugacuucuuaccaguaucugaucauccagaacaccacaugggaagaccacugccaauucucccgaccgucacccauugguuaccuuggccuguugagccagcguaccagagauauauauaucaguaggcggcgccgggggacguuuacuuggacauuaucugacuccgagggaaaggaaaccccuggcgguuacugucugacucgcuggaugcucauugaggcagagcuuaaaugcuucgggaauacagccgucgcuaaguguaacgaaaaacaugaugaggaauuuugcgacaugcugagauuguucgauuucaauaagcaggccauccagaggcuaaaagcgcccgcacaaaugagcauacagcugauuaacaaggccgugaaugcucucaucaacgaccagcugaucaugaagaaucaccuucgggauauuaugugcaucccauauugcaacuacucgaaauauugguaccugaaucacaccucuacgggccgcaccuccuugcccaaguguuggcucguaucaaacggcaguuaccugaaugaaacacauuuuagcgacgacauugagcaacaggccgauaacaugauaacugagauguuacagaaagaauauaucgaccgacaggggaagaccccucugggucuaguugaucucuucguguuuuccacaucuuucuaccugauuagcaucuuucuucacuuggucaaaaucccaacucauagacacauugugggaaagucaugccccaaaccucauaggcugaaucacaugggcauauguaguugcgggcucuauaagcggccaggagugccggucaaguggaaacguuga

SEQ ID NO: 4894 - RNA, 1473 nt, Artificial Sequence
  derived and/or modified protein sequence (opt3) from LASV(Lassa virus/H.sapiens-wt/NGA/2015/ISTH_0821;Clade II)__AVO03641__GPCstabilized
augggccagaucauuaccuucuuucaagaggugccccacgucauagaagagguuaugaacaucgugcugauugcccucagccuucuggcuaucuugaaggggauuuacaauguagcaacaugcggauuauucggucugguguccuuucuacuccuguguggcagaucuugcucaacuacguauaaaggggucuacgaacuucagacccuggaguuggacauggccagucucaacaugacaaugccucugagcuguacuaagaauaacucccaucacuauaucauggugggaaaugaaaccggccuggagcucacauuaaccaacacuucuauaaucaaucauaaauucugcaaccugucggaugcgcacaagaaaaaucuuuacgaccauacauugaugucaauuaucagcaccuuucaccugaguauuccaaacuucaaucaguaugaggcuauguccugugauuuuaacggugggaagaucucuguucaguacaaucuaagccacacguaugccguggacgcagccaaccauugcggaacuauagcuaauggcguccuccaaaccuucaugaggauggcauggggcggguccuacauugcccuggauucaggaugcgguaacugggacuguaucaugacaaguuaccaguaucuuauuauccagaacacuaccugggaagaucacugccaguuuagccggccgucucccaucggcuaccugggguugcucucccaacgcacacgagacauuuauauaucacguagacgccggggaaccuucacguggacucugagcgauagugagggcaaugaaacaccugguggguacugucucaccagguggaugcuuaucgaggcugagcugaaaugcuuuggaaacacugccguggcgaaguguaaugaaaaacaugacgaggaguucugcgauauguugcggcuauuugacuucaacaagcaggcaauuucucgccugaaaacacccgcccagauguccauccagcucauaaauaaggcuguaaacgcccugauuaaugaucaacuuaucaugaagaaccaccugagagacaucaugugcauuccauauugcaauuacagcaaauauugguacuugaaccacaccguuacgggcaagaccucgcuccccagguguuggcuggugucuaauggguccuacuuaaacgaaacacauuucucagacgauaucgagcagcaggcagacaauaugauuacugagaugcugcaaaaagaauauauagaucggcagggaaagaccccucuaggucucgucgaccuguuuguguucaguacuagcuuuuaccuuaucuccauuuucuugcaccuggugaaaaucccaacacaucgccacgucaucggcaagcccugcccuaaaccacaucgacucaaccacauggggauuuguucuugcggacuguauaagcacccgggcguucccgugaaguggaaaagauga

SEQ ID NO: 4895 - RNA, 1473 nt, Artificial Sequence
  derived and/or modified protein sequence (opt3) from LASV(Lassa virus/H.sapiens-wt/NGA/2015/ISTH_0831;Clade II)__AVO03545__GPCstabilized
augggccagaucgugaccuucuuucaagaggucccccacguuauugaagagauaaugaacaucgugcugauuacacucagccuucuggccaucuugaaggggguauacaauuuagcuacuugcggacugauuggucuaaucacguuccucuuucuguguggcagauccugcucuaugaccuauaaagggucauaccagcuugaaacacuggaguugaacauggaaacucucaauaugaccaugccucugaguuguacaaagaacaccagccaucacuauauaagggugggaaaugagacuggccuggagcucacauuaaccaacacguccaucauuaaucauaaauucugcaaccugucugacgcacacaagaaaaaucuuuacgaucauucguugaugucaaucgucagcacuuuucaccugaguauuccaaacuucaaucaguaugaagccauguccugugacuuuaacggugggaagaucucuauacaguacaaucuaagccacgcguaugcuggagaugccgcaaagcauugcggcacccucgccaacggcgugcugcaaacauucaugcggauggcuuggggaggguccuacauugcacuugacucagguugcggcaauugggauuguaucaugaccaguuaccaguaucugauuauccagaacacuacaugggacgaucacugccaguuuagccgaccgucucccaucggguacuugggacuccugucccaacguaccagagagauuuauauaucaaggcggcgccggggcacguucacuuggacacucagcgacagugaagguaacgaggccccugggggauacugucuuacccgcuggaugcugaucgaggcugaauugaaaugcuuuggcaauacugccguugcgaaguguaacgagaaacaugaugaagaguucugcgacaugcuaagacuguuugauuucaauaagcaggcaauucagaggcucaaaacacccgcccagaugucuauccaacugauaaacaaggcugugaaugcccuuauuaacgaccagcugaucaugaagaaucacuugcgggauaucaugugcauuccauauugcaacuacuccaaauauugguaccucaaucacaccacgaccgggcgcacaagccugccccgauguugguuagucucgaacggaucuuaccugaaugagacucauuucuccgacgacaucgagcagcaagcagauaacaugauuaccgaaaugcuacagaaggaguauauagacagacaggguaaaacaccucucggccugguggaucuuuuuguauucucaaccaguuuuuacuugaucagcauuuuccugcaccucguuaagaucccaacucauaggcacaucguggggaaauccugccccaagccucaucggcugaaucacaugggaauuuguucuugcggccuuuauaaacagccaggugucccggugcguuggaagcgcuga

SEQ ID NO: 4896 - RNA, 1473 nt, Artificial Sequence
  derived and/or modified protein sequence (opt3) from LASV(Lassa virus/H.sapiens-wt/NGA/2016/ISTH_0009;Clade II)__AVO03571__GPCstabilized
augggccagaucauuaccuucuuucaagaggugccccacgucauagaagagguuaugaacaucgugcugauugcccucagccuucuggcuaucuugaaggggauuuacaauguagcaacaugcggauuacugggucuaguguccuuccuccugcuuuguggcagaucuugcucaacuacguauaaaggggucuacgaacugcagaccuuggagcucgacauggccagucugaacaugacaaugccucugagcuguacuaagaauaacucccaucacuauaucauggugggaaaugaaaccggccucgaguuaacacugaccaacacuucuauaaucaaucauaaauuuugcaaccuuucggaugcgcacaagaaaaauuuguacgaccaugcucugaugucaauuaucagcacauuccaccuaaguauuccaaacuuuaaucaguaugaggccauguccugugauuucaacggugggaggaucucuguucaguacaaucucagccacuccuaugcaguggacgccgcuaaccauugcggaaccauagcaaauggcguccugcaaacguuuaugcggauggccuggggcgggucauacauugcucuugauaguggaugcgguagcugggacuguaucaugacuucuuaccaguaucugauuauccagaacaccacaugggaagaucacugccaguucucccgcccgucacccaucggcuacuuggggcuccugagccaacgaacucgugacauuuauauaaguagaaggcgccggggaaccuuuacauggacccucucugauuccgagggcaacgaaacgccugguggguacugucuuacucgguggaugcugaucgaggccgaguugaagugcuucggaaauacagcgguggcaaaauguaacgaaaagcaugacgaggaauuuugcgauaugcuacgccuguucgacuuuaauaaacaggccauuagaaggcucaagacccccgcucagaugagcauccagcugauaaacaaagccguaaaugcacuuauuaacgaucaacugaucaugaagaaucacuugcgggacaucaugugcauuccauauugcaacuacucgaaguauugguaccucaaucacacuguuacaggcaaaaccucucugccccgcuguugguuaguguccaacgggucauaccugaaugaaacgcauuucagugacgauaucgagcagcaggcugacaacaugauuaccgagcuacuccaaaaggaauauauagaucgacagggaaaaacaccucugggucuugucgacuuguucguguuuagcacuuccuucuaccugaucucuauuuuucuccaccuggugaagaucccaacccauagacacaucacaggcaaacccugcccuaagccacauaggcuuaaucacauggggauuuguagcugcggacuguauaaccacccgggcguccccguuaaauggaagcgguga

SEQ ID NO: 4897 - RNA, 1473 nt, Artificial Sequence
  derived and/or modified protein sequence (opt3) from LASV(Lassa virus/H.sapiens-wt/NGA/2016/ISTH_0017;Clade II)__AVO03567__GPCstabilized
augggccagaucauuaccuucuuucaagaggugccccacgucauagaagagguuaugaacaucgugcugauugcccucagccuucuggcuaucuugaaggggauuuacaauguagcaacaugcggauuauucggucugguguccuuucuacuccuguguggcagaucuugcucaacuacguauaaaggggucuacgaacuucagacccuggaguuggacauggccagucucaacaugacaaugccucugagcuguacuaagaauaacucccaucacuauaucauggugggaaaugaaaccggccuggagcucacauuaaccaacacuucuauaaucaaucauaaauucugcaaccugucggaugcgcacaagaaaaaucuuuacgaccaugcuuugaugucaauuaucagcacauuucaccugaguauuccaaacuucaaucaguaugaggccauguccugugauuuuaacggugggaagaucucuguucaguacaaucuaagccacaccuaugcaauagacgccgcuaaccauugcggaacgauugcaaauggcgugcuccaaacuuucaugaggauggccuggggcggguccuacaucgcucuggauucaggaugcgguaguugggacuguauuaugaccagcuaccaguaucuuaucauccagaacacaacuugggaagaucacugccaguuuucucggccgucccccauuggcuaccugggguugcucucacaacgcacccgagacauauauaucagccguagacgccggggaacauucaccuggacgcugagugauucugagggcaacgaaacuccugguggguacugucucacaagguggaugcuuauugaggccgagcugaaaugcuuuggaaauaccgcggucgcaaaguguaacgaaaaacaugacgaggaguucugcgauauguugcggcuauuugacuucaauaagcaggccauccgcagacugaaaacucccgcucagauguccauacagcucauuaacaaggccgugaaugcacugaucaacgaucaacuuaucaugaagaaucaccugagggacauuaugugcaucccauauugcaacuacagcaaauauugguacuugaaucacacaguaaccggcaagacgucgcucccccgguguuggcugguuucuaacggguccuacuuaaaugaaacccauuucucagacgauauugagcagcaggcugacaacaugauaacagagcugcuacaaaaagaauauauggaucgccagggaaagacuccucucggucugguggaccuuuuugucuucaguaccagcuuuuacuugaucuccauuuuccugcaccucgugcgaaucccaacacauagacacgugaucggcaaacccugcccuaagccacauaggcugaaucacauggggauuuguucuugcggacuuuauaaacacccgggcguccccguuaaguggaagcgguga

SEQ ID NO: 4898 - RNA, 1473 nt, Artificial Sequence
  derived and/or modified protein sequence (opt3) from LASV(Lassa virus/H.sapiens-wt/NGA/2016/ISTH_0035;Clade II)__AVO03619__GPCstabilized
augggccagaucauuaccuucuuucaagaggugccccacgucauagaagagguuaugaacaucgugcugauugcccucagccuucuggcuaucuugaaggggauuuacaauguagcaacaugcggauuauucggucugguguccuuucuacuccuguguggcagaucuugcucaaugacuuauaaaggggucuacgaacuucagacgcuggaguuggacauggccagucucaacaugaccaugccucugagcuguacaaagaauaacucccaucacuauaucauggugggaaaugaaacuggccuggagcucaccuuaacaaacaccucuauaaucaaucauaaauucugcaaccugucggaugcgcacaagaaaaaucuuuacgaccaugcuuugaugucaauuaucagcacuuuucaccugaguauuccaaacuucaaucaguaugaggccauguccugugauuuuaacggugggaagaucucuguucaguacaaucuaagccacacauaugcaguggacgccgcuaaccauugcggaaccauagcaaauggcguccuccaaacguucaugaggauggccuggggcggguccuacauugcucuggauucaggaugcgguaguugggacuguaucaugacuagcuaccaguaucuuauuauccagaacaccacaugggaagaucacugccaguuuucucggccgucccccaucggcuaccugggguugcucucacaacgcacucgagacauuuauauaagccguagacgccggggaaccuucacauggacccugagugauucugagggcaacgaaacgccugguggguacugucucacuagguggaugcuuaucgaggccgagcugaaaugcuuuggaaauacagcgguggcaaaguguaacgaaaaacaugacgaggaguucugcgauauguugcggcuauuugacuucaauaagcaggccauucgcagacugaaaacccccgcucagauguccauccagcucauaaacaaggccguaaaugcacugauuaacgaucaacuuaucaugaagaaucaccugagggacaucaugugcauuccauauugcaacuacagcaaauauugguacuugaaucacacuaucacaggcaagaccucgcucccccgguguuggcugguuucuaacggguccuacuuaaaugaaacgcauuucucagacgauauugagcagcaggcugacaacaugauaaccgagcugcuacaaaaagaauauauggaucgccagggaaagacaccucucggucugguggaccuuuuugucuucaguacuagcuuuuacuugaucuccauuuuccugcaccucgugaaaaucccaacccaucgacacgugaucggcaagcccugcccuaaaccacauagacugaaucacauggggauuuguucuugcggacuuuauaagcacccgggcguccccguuaaguggaaaagguga

SEQ ID NO: 4899 - RNA, 1473 nt, Artificial Sequence
  derived and/or modified protein sequence (opt3) from LASV(Lassa virus/H.sapiens-wt/NGA/2016/ISTH_0104;Clade II)__AVO03631__GPCstabilized
augggccaggugaucaccuucuuucaagaggucccccacguuauugaagaggugaugaacauaguacugaucgcccucagccuucuggcuauuuugaaggggaucuacaauguggcaacaugcggauuauucggucugauuuccuuucuacuccuguguggcagaucuugcucaacuacguauaaaggggucuacgaacuucagacccuggaguugaacaugcagaaucucaacaugacaaugccucugaguuguacuaagaauagcucccaucacuauaucauggugggaaacgaaaccggccuggagcucacauuaaccaauacuucuauaaucaaccauaaauucugcaaucugucggacgcccacaagaaaaaccuuuacgaucaugcguugaugucaauuaucagcacauuucaccugaguauuccaaauuucaaccaguaugaggcuauguccugugacuuuaauggugggaagaucucuguucaauacaaccuaagccacaccuaugccauagaugcagccaaucauugcggaacgguggcuaacggcguccuccagacuuucaugaggauggcauggggcggguccuacauugcccuggacucaggaugcgguaacugggauuguaucaugaccaguuaccaguaucuuauuauccagaauacaacuugggaagaccacugccaauuuagccgcccgucucccaucggcuaccugggguugcucucccagcgaacccgugauauuuauauaucaagaaggcgccggggaacauucaccuggacgcugagcgacagugagggcaacgaagcuccugguggguacugucucacucgguggaugcuuaucgaggccgagcugaagugcuuuggaaauacagcgguggcaaaauguaacgaaaagcaugaugaggaguucugcgacauguugcgccuauuugauuucaauaaacaggccauuaagagacugaaaacccccgcucagaugucuauccaacucauaaacaaggccguaaaugcacugauuaacgaccagcuuaucaugaagaaucaccugagggauaucaugugcauuccauauugcaacuacuccaaauauugguacuugaaucacacuguuacaggccggaccagccucccccgcuguuggcuggugucgaacgggucuuacuuaaaugacacgcaguucuccgacgauaucgaacaacaggcugacaacaugauuaccgagaugcugcagaaggaguauauggaucgacagggaaaaacaccucuaggucucgucgaccuguuuguguucucaaccaguuuuuaccuuauaagcaucuucuugcaucuggugaagauuccaacucacagacauaucgucggcaggcccugcccuaaaccacaccggcucaaucauauggggaucuguuccugcggacuguauaagcacccgggcguucccgugaaauggaagcguuga

SEQ ID NO: 4900 - RNA, 1476 nt, Artificial Sequence
  derived and/or modified protein sequence (opt3) from LASV(Lassa virus/H.sapiens-wt/NGA/2016/ISTH_0133;Clade II)__AVO03635__GPCstabilized
augggccagaucauuaccuucuuucaagaggugccccacgucauagaagagguuaugaacaucgugcugauugcccucagccuucuggcuguauugaaggcaaucuacaauguggccacaugcggggucuucggauuaauuuccuuucugcuacucugugguagaucuugcucaacuacguauaaaggcguguacgaacugcagacccuugagcuggacauggcgaacuugaauaugacaaugccucucaguuguacuaagaacaauagccaucacuauaucaugguugggaacgaaaccggacuggagcugacacucaccaauacuuccauaaucaaccauaaauucugcaauuuaucugaugcucacaagaaaaaccuguacgaccauucgcuuaugucaauuaucagcacauuucacuugaguauuccaaauuucaaccaguaugaggccauguccugugauuuuaauggcgguaagaucucugugcaguacaaccugagccacuccuaugcagucgacgccgcuaagcauugcgggaccauagcaaauggagugcuacaaacguucaugaggauggccuggggcggcucauacauugcucucgauagugggaaaugcgguugggacuguaucaugacuagcuaccaguaucugauuauccagaacaccacaugggaagaucacugccaguuuucucggccgucccccaucggcuaccuugggcuguugucacaacgcacucgagacauuuauauaagccguagacuccgccggaccuucacauggaccuuaagugauucugagggcaacgacgccccugguggguacugucugacgagguggaugcucaucgaagcggagcuuaagugcuuuggaaauacugcaauugccaaauguaacgagaagcaugaugaagaguucugcgacaugcugcgguuguuugauuucaaucgccaggcuaucaaaagacuaaagacagaaccccagauguccauacagcugauuaacaaggcaguaaaugcucucaucaacgaccaacugaucaugaaaaaucaccuuagggacauuaugggcugcccauauugcaacuacagcaaguauugguaccugaaucacaccauuacuggcaaaacaucguugccccgguguuggcucguuucuaacggguccuaccugaaugagacccauuucucagaugacauagaacagcaggccgauaacaugaucacggaguuacugcaaaaggaguauauggaccgccagggaaaaaccccucuaggucucguggaucuguuugucuucaguacuagcuuuuaccuuauuuccaucuucuugcaccuggugaagaucccaacacaucgacacauugugggcaaacccugcccuaagccacauagacucaaucacauggggauauguucuugcggacuguauaagcacccgggcguccccguuaaauggaagaggcaguga

SEQ ID NO: 4901 - RNA, 1473 nt, Artificial Sequence
  derived and/or modified protein sequence (opt3) from LASV(Lassa virus/H.sapiens-wt/NGA/2016/ISTH_0141;Clade II)__AVO03649__GPCstabilized
augggccagaucauuaccuucuuucaagaggugccccacgucauagaagagguuaugaacaucgugcugauuacacucagccuucuggccaucuugaaggggauuuacaauguagcuacuugcggauuauucggucugguguccuuucuacuccuguguggcagaucuugcucaacgaucuauaaaggggucuacgaacuucagacccuggaguuggacauggcaagucucaacaugacaaugccucugagcuguacuaagaauaacucccaucacuauauaauggugggaaaugaaaccggccuggagcucacauuaaccaacacuucuaucauuaaucauaaauucugcaaccugucggaugcccacaagaaaaaucuuuacgaccaugcguugaugucaaucauuagcacauuucaccugaguaucccaaacuucaaucaguaugaggcuauguccugugauuuuaacggugggaagauaucuguucaguacaaucuaagccacaccuaugccguggacgcagccgaacauugcggaacgauugcuaacggcguccuccaaacuuucaugaggauggcauggggcggguccuacaucgcccuggauucaggaugcgguaguugggacuguauuaugaccagcuaccaguaucuuaucauccagaauacaacuugggaggaucacugccaguuuucucggccgucccccauuggcuaccugggguugcucucacaacgcacccgagacauauauaucagccguagacgccggggaacauucaccuggacgcugagugauucugaaggcaacgagacuccugguggguacugucucacaagguggaugcuuauugaggcugaacugaaaugcuuuggaaacaccgccguggcgaaguguaaugagaaacaugacgaagaguucugcgauauguugcggcuauuugacuucaacaagcaggcaauccgcagacugaaaacucccgcccagauguccauacagcucauuaauaaggcuguaaacgcccugaucaaugaucaacuuaucaugaagaaccaccugagggacauuaugugcaucccauauugcaauuacagcaaauauugguacuugaaccacacaguuaccggcaagacgucgcucccccgguguuggcuggugucuaauggguccuacuuaaacgagacccgcuucucagacgauauugagcagcaggcagacaauaugauaacagaacugcuacaaaaagaguauaucgaucgacagggaaagacuccucucggucuggucgaccuuuuuguguucaguaccagcuuuuacuugauuuccaucuuccugcaucucgugaaaaucccaacacacagacauauuauaggcaagcccugcccuaaaccacacaggcugaaccauauggggaucuguucuugcggacuuuauaagcacccgggcauucccgucaaguggaaacgguga

SEQ ID NO: 4902 - RNA, 1473 nt, Artificial Sequence
  derived and/or modified protein sequence (opt3) from LASV(Lassa virus/H.sapiens-wt/NGA/2016/ISTH_0146;Clade II)__AVO03633__GPCstabilized
augggccagaucauuaccuucuuucaagaggugccccacgucauagaagagguuaugaacaucgugcugauugcccucagccuucuggcuaucuugaaggggauuuacaauguagcaacaugcggauuauucggucugguguccuuucuacuccuguguggcagaucuugcucaacuacguauaaaggggucuacgaacuucagacccuggaguuggacauggccagucucaacaugacaaugccucugagcuguacuaagaauaacucccaucacuauaucauggugggaaaugaaaccggccuggagcucacauuaaccaacacuucuauaaucaaucauaaauucugcaaccugucggaugcgcacaagaaaaaucuuuacgaccaugcuuugaugucaauuaucagcacauuucaccugaguauuccaaacuucaaucaguaugaggccauguccugugauuuuaacggugggaagaucucuguucaguacaaucuaagccacaccuaugcaguggacgccgcuaaccauugcggaacgauagcaaauggcguccuccaaacuuucaugaggauggccuggggcggguccuacauugcucuggauucaggaugcgguaguugggacuguaucaugaccagcuaccaguaucuuauuauccagaacacaacuugggaagaucacugccaguuuucucggccgucccccaucggcuaccugggguugcucucacaacgcacccgagacauuuauauaagccguagacgccggggaacauucaccuggacgcugagugauucugagggcaacgaaacuccugguggguacugucucacaagguggaugcuuaucgaggccgagcugaaaugcuuuggaaauaccgcgguggcaaaguguaacgaaaaacaugacgaggaguucugcgauauguugcggcuauuugacuucaauaagcaggccauucgcagacugaaaacucccgcucagauguccauccagcucauaaacaaggccguaaaugcacugauuaacgaucaacuuaucaugaagaaucaccugagggacaucaugugcauuccauauugcaacuacagcaaauauugguacuugaaucacacaguuaccggcaagacgucgcucccccgguguuggcuggugucuaacggguccuacuuaaaugaaacccauuucucagacgauaucgagcagcaggcugacaacaugauuacagagcugcuacaaaaagaauauauggaucgccagggaaagacuccucucggucuggucgaccuuuuuguguucaguaccagcuuuuacuugauauccaucuuccugcaccucgugaaaauuccaacacaucgacacgucaucggcaagcccugcccuaaaccacauagacugaaucacauggggaucuguucuugcggacuuuauaagcacccgggcguucccgugaaguggaaaagguga

SEQ ID NO: 4903 - RNA, 1473 nt, Artificial Sequence
  derived and/or modified protein sequence (opt3) from LASV(Lassa virus/H.sapiens-wt/NGA/2016/ISTH_0187;Clade II)__AVO03549__GPCstabilized
augggccagaucgugaccuucuuucaagaggucccccacguuauugaagaggugaugaacauaguacugaucgcccucagcgugcuugcuauucugaagggguuguacaauuucgcaacaugcggauuaaucggucuggucacuuuucuacuccuguccggcagaucuuguucaaugguguauaaagggguuuacgaacuucagacgcuggaguugaacauggaaacccucaauaugacaaugccucugaguugcacuaagaacaauagccaucacuauauuagggugggaaacgacaccggccuggagcucacauuaaccaauaacacucugcuuaaucauaaauucuguaacuuguccgaugcccacaagaaaaaucuguacgaccaugcgcuaaugucuaucauaucgacauuucaccucucaaucccaaacuucaaucaguaugaggcuaugagcugcgauuuuaacggugggcggauuaccguccaguacaaucugagucacuccuaugccguggacgcagccaaccauuguggaacgguagcuaacggcguucuucaaacuuucaugcgcauggcauggggcgggucuuacaucgcccuggauagccgaugcggaaauugggacugcauuaugaccuccuaccaguauuugaucauacagaacacaacuugggaagaucauugucaguuuucacguccgagucccauugguuaccucggccuguuaagccaaagaaccagggacaucuauauuucucggcgccgccgggggacauucaccuggacgcuuuccgauucagagggaaaugaaacuccuggcgguuacugccugacaagauggauguugaucgaggcugagcuaaaguguuuugggaacaccgccguggcgaagugcaaugaaaaacacgacgaggaguucugugauaugcugaggcucuuugacuucaacaagcaggcaauccggcgccugaaagcccccgcucagaugagcauucagcuuauaaauaaggccgucaacgcacugaucaaugaucaauugauuaugaaaaaccaccuccgagacaucaugugcauaccauauugcaauuacaguaaguauugguaccugaaccauacuucuacaggcaagaccuccuuacccagaugcuggcuggugagcaauggcucguaccuaaacgaaacgcacuucucugacgauauugagcagcaggcugacaauaugaucaccgagaugcuccaaaaagaauaucuggauaggcaggggaagacaccucuuggauugguggacaucuuugucuucuccacuucauuuuaccugauuaguaucuuccuccaucugauuaaaauaccaacccaccggcauaucguugguaagcccuguccuaaaccacaccgucuuaaccacaugggcauuugcagcugugggcuguauaagcagccgggagugcccguacgcuggaaaagauga

SEQ ID NO: 4904 - RNA, 1473 nt, Artificial Sequence
  derived and/or modified protein sequence (opt3) from LASV(Lassa virus/H.sapiens-wt/NGA/2016/ISTH_0199;Clade II)__AVO03653__GPCstabilized
augggccagaucauuaccuucuuucaagaggugccccacgucauagaagagguuaugaacaucgugcugauugcccucagccuucuggcuaucuugaaggggauuuacaauguagcaacaugcggauuauucggucugguguccuuucuacuccuguguggcagaucuugcucaacuacguauaaaggggucuacgaacuucagacccuggaguuggacauggccagucucaacaugacaaugccucugagcuguacuaagaauaacucccaucacuauaucauggugggaaaugaaaccggccuggagcucacauuaaccaacacuucuauaaucaaucauaaauucugcaaccugucggaugcgcacaagaaaaaucuuuacgaccaugcuuugaugucaauuaucagcacauuucaccugaguauuccaaacuucaaucaguaugaggccauguccugugauuuuaacggugggaagaucucuguucaguacaaucuaagccacaccuaugcaguggacgccgcuaaccauugcggaacgauagcaaauggcguccuccaaacuuucaugaggauggccuggggcggguccuacauugcucuggauucaggaugcgguaacugggacuguaucaugaccaguuaccaguaucuuauuauccagaacacaacuugggaagaucacugccaguuuagccggccgucucccaucggcuaccugggguugcucucccaacgcacccgagacauuuauauaucacguagacgccggggaacauucaccuggacgcugagcgauagugagggcaaugaaacuccugguggguacugucucacaagguggaugcuuaucgaggccgagcugaaaugcuuuggaaacaccgcgguggcaaaguguaaugaaaaacaugacgaggaguucugcgauauguugcggcuauuugacuucaacaagcaggccauuucucgccugaaaacucccgcucagauguccauccagcucauaaauaaggccguaaacgcacugauuaaugaucaacuuaucaugaagaaccaccugagagacaucaugugcauuccauauugcaauuacagcaaauauugguacuugaaccacacaguuaccggcaagacgucgcuccccagguguuggcuggugucuaauggguccuacuuaaacgaaacccauuucucagacgauaucgagcagcaggcugacaauaugauuacagagaugcugcaaaaagaauauauagaucggcagggaaagacuccucuaggucucgucgaccuguuuguguucaguaccagcuuuuaccuuaucuccauuuucuugcaccuggugaaaaucccaacacaucgccacgucaucggcaagcccugcccuaaaccacaucgacucaaccacauggggauuuguucuugcggacuguauaagcacccgggcguucccgugaaguggaaaagauga

SEQ ID NO: 4905 - RNA, 1473 nt, Artificial Sequence
  derived and/or modified protein sequence (opt3) from LASV(Lassa virus/H.sapiens-wt/NGA/2016/ISTH_0419;Clade II)__AVO03539__GPCstabilized
augggccagaucgugaccuucuuucaagaggucccccacguuauugaagaggugaugaacauaguacugaucgcccucagccuucuggcuauuuugaaggggaucuacaauuucgcaacaugcggauuaauuggucugaucacuuuucuauuccucuguggcagauccugcucugccauauauaaagggucauaccagcugcagacgaucgaacuuaacauggagacccugaauaugacaaugccuuugaguuguacuaagaacagcucccaucacuauauuagggugggaaaugaaaccggccucgagcugacacugaccaacaucucuauuaucgaccauaaauuuugcaaucucucggaugcgcacaagaaaaacuuauacgaccaugcucugaugucaauaauuagcacuuuccaccuuaguaucccaaauuuuaaccaguaugaggccauguccugugauuucaauggugggaagauuucuguccaauacaacuugagccacacauaugcaguggacgccgcuaaucauugcggaaccguugcaaacggcgugcugcagacguuuaugcggauggccuggggcggguccuacaucgcucuagauucaggaugcgguaauugggacuguaucaugacaaguuaccaguaucucauuauacagaacaccacaugggaagaucacugccaauucagccgaccgucucccaucggcuaccuggggcuucugucccagcguacuagagacauuuauaucucaaggcggcgccggggaaccuuuacauggacccugagcgauagugagggcaaggaaacgccugguggguacuguuuaacucgcuggaugcugauagaggccgagcucaaaugcuucggaaacacagcggucgcaaaguguaaugaaaaacaugacgaggaauuuugcgauaugcuuagacuguucgacuucaacaagcaggccauucagagguugaaagcucccgcccaaaugucuauccagcuaaucaauaaggcagugaacgcucugauuaaugaucagcucaucaugaagaaccaucugcgggacauuaugugcauaccauauugcaauuacuccaaauauugguaccuuaaccacaccagcacuggccgcacaucgcugccccgauguugguugguaucuaauggguccuaccucaacgaaacccacuuuucagacgauaucgagcaacaggccgacaauaugauuacggagaugcugcagaaggaauauaucgauagacagggaaaaaccccuuuaggucugguugaccuauucguguuuaguacuagcuucuaccucaucuccauuuuucugcaccuuauaaagaucccaacucauaggcacauugucggcaaaucuugccccaagccucaucgguugaaccacauggggaucuguagcugcggacuguauaaacaaccaggcgugccggugaaguggaagcguuga

SEQ ID NO: 4906 - RNA, 1473 nt, Artificial Sequence
  derived and/or modified protein sequence (opt3) from LASV(Lassa virus/H.sapiens-wt/NGA/2016/ISTH_0447;Clade II)__AVO03559__GPCstabilized
augggccagaucauuaccuucuuucaagaggugccccacgucauagaagagguuaugaacaucgugcugauugcccucagccuucuggcuaucuugaaggggauuuacaauaucgcaacaugcggauuauucggucugguauccuuucuacuccuguguggcagaucuugcucaacuacguauaaagggguguacgaacuucagacccuggaguuggacauggccagucucaacaugacaaugccucugagcuguacuaagaauaacucccaucacuauauaauggucggaaaugaaaccggccuggagcucacauuaaccaacacuucuaucauuaaucauaaauucugcaaccugucggaugcgcacaagaaaaaucuuuacgaccauacauugaugucaaucauuagcaccuuucaccugaguaucccaaacuucaaucaguaugaggcuauguccugugauuuuaacggugggaagauaucugugcaguacaaucuaagccacgccuaugcaguugacgccgcuaaccauugcggaacgauugcaaauggcgugcuccaaacuuucaugaggauggccuggggcggguccuacaucgcucuggauucaggaugcgguaacugggacuguauuaugaccaguuaccaguaucuuaucauccagaacacaacuugggaagaucacugccaguuuagccggccgucucccauuggcuaccugggguugcucucccaacgcacccgagacauauauaucucacguagacgccggggaacauucaccuggacgcugagcgauagugagggcaaugaaacuccugguggguacugucucacaagguggaugcuuauugaggccgagcugaaaugcuuuggaaacaccgcggucgcaaaguguaaugaaaaacaugacgaggaguucugcgauauguugcggcuauuugacuucaacaagcaggccauccgcagacugaaaacucccgcucagaugucuauacagcucauuaauaaggccgugaacgcacugaucaaugaucaacuuaucaugaagaaccaccugagggacauuaugugcaucccauauugcaauuacuccaaauauugguacuugaaccacacaguaaccggcaagacgagccucccccgguguuggcugguuucgaaugggucuuacuuaaacgaaacccauuucuccgacgauauugagcagcaggcugacaauaugauaacagagcugcuacaaaaagaauauaucgaucgccagggaaagacuccucucggucugguggaccuuuuugucuucucaaccaguuuuuacuugauuagcaucuuccugcaccucgugaaaaucccaacacaucgacacguggucggcaagcccugcccuaaaccacauagacugaaccacauggggauuuguuccugcggacuuuauaagcacccgggcguucccgugaaguggaaaagguga

SEQ ID NO: 4907 - RNA, 1473 nt, Artificial Sequence
  derived and/or modified protein sequence (opt3) from LASV(Lassa virus/H.sapiens-wt/NGA/2016/ISTH_0543;Clade II)__AVO03595__GPCstabilized
augggccagaucauuaccuucuuucaagaggugccccacgucauagaagagguuaugaacaucgugcugauugcccucagccuucuggcuaucuugaaggggauuuacaauaucgcaacaugcggauuauucggucugauauccuuucuacuccuguguggcagaucuugcucaacuacguauaaagggguauacgaacuucagacccuggaguuggacauggccaaccucaauaugacaaugccucugaguuguacuaagaacaauagccaucacuauaucauggugggaaacgaaaccggccuggagcucacauuaaccaauacuuccauuaucaaccauaaauucugcaaucugucugaugcgcacaagaaaaaccuuuacgaccaugcuuugaugucgauuaucucaacauuucaccugagcauaccaaauuucaaccaguaugaggccaugaguugugauuuuaauggugggaagauuuccguccaguacaaccuaucucacagcuaugcaguggacgccgcuggacauugcggcaccaucgcaaauggcguucuccaaacguucaugaggauggccuggggaggguccuacauugcucuggauucagguugcggcaacugggacuguaucaugaccaguuaccaguaucuugugauccagaacacuacaugggaagaucacugccaguuuagccggccgucucccauuggguaccugggauugcucucccaacgcacucgagacauauauaucucacguagacgccggggcaccuucacauggacccugagcgauagugaggguaaugaagccccugggggauacugucucacgagguggaugcuuauugaggcggagcugaaaugcuuuggcaacacugcaaucgccaaguguaaugaaaaacaugacgaggaguucugcgauauguugcggcuauuugacuucaacaagcaggcuauacgcagacugaaagcccccgcacagaugucuauucagcucaucaauaaggcugucaacgcccugaucaaugaucaacuuauuaugaagaaccaccugagggacaucaugugcauuccauauugcaauuacuccaaauauugguacuugaaccacacagugaccgggaagacuagccuccccaaauguuggcugguaucgaauggaucuuacuuaaacgaaacacauuucuccgacgauauagagcagcaggcggacaauaugaucaccgagcugcuacaaaaggaauauauggaucggcaggguaaaacgccucucggccugguugaccuuuuuguguucucaaccaguuuuuacuugauuagcaucuuccugcaccucgucaagaucccaacacaucgccacauuguggggcgacccugcccuaaaccacauagacugaaccacaugggaauauguuccugcggccuuuauaagcacccgggugugcccgucaaguggaaaagguga

SEQ ID NO: 4908 - RNA, 1473 nt, Artificial Sequence
  derived and/or modified protein sequence (opt3) from LASV(Lassa virus/H.sapiens-wt/NGA/2016/ISTH_0565;Clade II)__AVO03637__GPCstabilized
augggccagaucgugaccuucuuucaagaggucccccacguuauugaagaggugaugaacauaguacugaucgcccucagccuucuggcuauuuugaaggggaucuacaauguggcaacaugcggauuauucggucugauuuccuuucuacuccuguguggcagaucuugcucaacuacguauaaaggggucuacgaacuucagacccuggaguuggacauggccaaccucaauaugacaaugccucugaguuguacuaagaacagcucccaucacuauaucauggugggaaaugaaaccggccuggagcucacauuaaccaacacuucuauaaucaaucauaaauucugcaaccugucggaugcgcacaagaaaaaucuuuacgaccaugcuuugaugucaauuaucagcacauuucaccugaguauuccaaacuucaaucaguaugaggccauguccugugauuuuaacggugggaagaucucuguucaguacaaucuaagccacaccuaugcaguggacgccgcuaaccauugcggaacgauagcaaauggcguccuccaaacuuucaugaggauggccuggggcggguccuacauugcucuggauucaggaugcgguaacugggacuguaucaugaccaguuaccaguaucuuauuauccagaacacaacuugggaagaucacugccaguuuagccggccgucucccaucggcuaccugggguugcucucccaacgcacccgagacauuuauauaucacguagacgccggggaacauucaccuggacgcugagcgauagugagggcaaugaagccccugguggguacugucucacuagguggaugcuuaucgaggcggagcugaaaugcuuuggaaacacagcaauugccaaguguaaugaaaaacaugacgaggaguucugcgauauguugcggcuauuugacuucaacaagcaggcuaucaaacgccugaagucucccgcccagauguccauacagcucauuaauaaggcagugaacgcucugaucaaugaucaacuuaucaugaaaaaccaccugagagacauuaugugcaucccauauugcaauuacagcagguauugguacuugaaccacaccguaacuggcaagacaucgcucccccgguguuggcugauuucuaauggguccuacuuaaacgaaacccauuucucagacgauauagagcagcaggccgacaauaugaucacggagcugcuacaaaaagaauauauggaucgccagggaaagaccccucucggucugguugaccuuuuuguguucaguacuagcuuuuacuugauuuccaucuuccugcaccucgucaaaaucccaacacaucgacacauugugggcagacccugcccuaagccacauaggcugaaccacauggggauauguucuugcggacuuuauaaacacccgggcgugcccgucaaguggaagcgguga

SEQ ID NO: 4909 - RNA, 1473 nt, Artificial Sequence
  derived and/or modified protein sequence (opt3) from LASV(Lassa virus/H.sapiens-wt/NGA/2016/ISTH_0572;Clade II)__AVO03611__GPCstabilized
augggccagaucauuaccuucuuucaagaggugccccacgucauagaagagguuaugaacaucgugcugauugcccucagccuucuggcuaucuugaaggggauuuacaauguagcaacaugcggauuauucggucugguggccuuucuacuccuguguggcagauccugcucuacuacguauaaaggggucuacgaacuucagacccuggaguuggacauggcgucacucaacaugacaaugccucugaguuguacuaagaauaacagccaucacuauaucauggugggaaaugaaaccggccuggagcucacauuaaccaacacuuccauaaucaaucauaaauucugcaaccugucugaugcucacaagaaaaaucuuuacgaccaugccuugaugucgauuaucucaacauuucaccugagcauuccaaacuucaaucagcacgaggcaaugaguugugauuuuaacggugggaagaucuccguucaguauaaucuaucucauaccuacgccguggacgcugcaaaccacugcggaacgauagccaauggcguccuccaaacuuucaugaggauggcuuggggcgggagcuauauugcccuggauuccggaugcgguucaugggacuguaucaugaccaguuaccaguaccuuauuauccagaacacaacuugggaagaucauugccaguuuagccggccgucucccaucggcuaucugggguugcucucccaacgcacccgagacauuuacauaucacguagacgccggggaacauucaccuggacgcugagcgauagugagggcaacgaaacuccugguggguauugucucacaagguggaugcuuaucgaggcggagcugaaaugcuuuggaaauaccgcaguggccaaguguaacgaaaaacacgacgaggaguucugcgauauguugcggcuauuugacuucaauaagcaggcuauucgcagacugaaaacucccgcccagaugucuauccagcucauaaacaaggcaguaaaugcucugauuaacgaucaacuuaucaugaagaaucaccugagggacaucaugugcauuccauacugcaacuauuccaaauacugguauuugaaucauacaguuaccggccggacgagccucccccgcuguuggcuggugucgaacgggucuuacuuaaaugaaacccacuucuccgacgauaucgagcagcaggccgacaacaugauuacagagcugcuacaaaaggaauacauggaucgacagggaaaaacuccucucggucuggucgaccuuuuuguguucucaaccaguuuuuauuugauaagcaucuuccugcaucucauuaagaucccaacacacagacaugugaucggcaaacccugcccuaagccacacaggcugaaucacauggggauuuguuccugcggacuuuacaaacauccgggcguccccguuaaguggaagcgguga

SEQ ID NO: 4910 - RNA, 1473 nt, Artificial Sequence
  derived and/or modified protein sequence (opt3) from LASV(Lassa virus/H.sapiens-wt/NGA/2016/ISTH_0610;Clade II)__AVO03585__GPCstabilized
augggccagaucauuaccuucuuucaagaggugccccacgucauagaagagguuaugaacaucgugcugauugcccucagccuucuggcuaucuugaaggggguauacaauguggcaacaugcggauuauucggucuggucuccuuucuacuccuguguggcagaucuugcucaacuacguauaaagggguguacgaacuucagacccuggaguuggacauggccagucucaacaugacaaugccucugagcuguacuaagaauaacucccaucacuauauuaugguuggaaaugaaaccggccuggagcucacauuaaccaacacuucuaucauaaaucauaaauucugcaaccugucggaugcgcacaagaaaaaucuuuacgaccaugcuuugaugucaaucauuagcacauuucaccugaguaucccaaacuucaaucaguaugaggccauguccugugauuuuaacggugggaagauuucugugcaguacaaucuaagccacaccuaugcagucgacgccgcuaaccauugcggaacgaucgcaaauggcgugcuccaaacuuucaugaggauggccuggggcggguccuacauagcucuggauucaggaugcgguaguugggacuguauuaugaccagcuaccaguaucuuaucauucagaacacaacuugggaagaucacugccaguuuucucgcccgucccccaucggcuaccugggguugcucucacaacgaacccgugacaucuauauuagcagaaggcgccggggaacauucaccuggacgcugagugauucugagggcaacgaaacuccugguggguacugucucacacgguggaugcuuauagaggccgagcugaagugcuuuggaaauaccgcgguagcaaaauguaacgaaaagcaugacgaggaguucugcgauauguugcgccuauuugacuucaauaaacaggccaucagaaggcugaaggcucccgcccagauguccauucagcucaucaacaaagcaguuaaugcucugauaaacgaucaacuuauuaugaagaaucaucugcgggacaucaugugcaucccauauugcaacuacagcaaguauugguacuugaaucacacugugacaggccgcaccucgcucccccgauguuggcuggucucuaacggguccuacuuaaaugaaacgcacuucucagacgauauugagcagcaggccgacaacaugaucaccgagcugcuacaaaaagaauauauugauagacagggaaagacaccucucggucugguggaccuuuuuguguucaguacuagcuuuuacuugauauccaucuuccugcaccucgucaaaauuccaacccauaggcacaucaucggcaagcccugcccuaaaccacaucggcugaaucacauggggauuuguucuugcggacuuuauaagcacccgggcguucccgugaaauggaagcguuga

SEQ ID NO: 4911 - RNA, 1473 nt, Artificial Sequence
  derived and/or modified protein sequence (opt3) from LASV(Lassa virus/H.sapiens-wt/NGA/2016/ISTH_0621;Clade II)__AVO03543__GPCstabilized
augggccagaucgugaccuucuuucaagagauuccccacgucguugaagagauaaugaacaucgugcugauuacacucagccuucuggccaucuugaagggguuauacaauuucgcuacuugcggacugauuggucuaaucacguuucucuuccuguguggcagauccugcucuaccauauauaaagggucauaccagcuucaggcacuggaauugaacauggagacacucaauaugacuaugccucugaguuguaccaagaacaauagccaucacuauaucaggguaggaaacgaaacaggccuggagcucaccuuaacuaauacauccauuaucgaccauaaauuuugcaaccugucugaugcccacaagcggaaucuuuacgaccauaccuugaugucgauuaucucaacguuccaccugagcauaccaaacuuuaaucaguaugaggcgaugaguugugauuucaacggugggaaaauuuccgugcaauacaaucuaucucacagcuaugcuggagacgccgcacgccauugcggcacugucgccaacggcgugcuccagaccuuuaugcgaauggcuuggggaggguccuacaucgcacuggauucagguugcggcaauugggacuguauuaugacaaguuaccaguaucuuaucauccagaacacuaccugggaaaaccacugccaauucagccguccgucucccauuggguaccugggauugcucucccagagaacaagggauauauauaucucacggcgccgccggggcaccuuuacguggacucugagcgacagugaggguaaggaaacaccugggggauacugucucaccagauggaugcuuauugaggccgagcugaaaugcuucggcaauacugcuguugccaaguguaacgaaaaacaugaugaggaauuuugcgacauguugaggcuauucgauuucaauaagcaggcgauccagcggcugaaaacacccgcacaaaugucuauacagcucauuaacaaggccgugaaugcucugaucaacgaccagcuuaucaugaagaaucaucugcgcgauauuaugugcaucccauauugcaacuacuccaaauauugguacuugaaucacaccacgaccgggaagacaagccuccccaaauguuggcuggucucgaacggaucuuacuuaaaugaaacucacuuuuccgacgacauugagcaacaggccgauaacaugauaaccgagaugcugcagaaggaauauaucgaccgacaggguaaaacaccucuaggccucguggaucuguucguauuuucaaccaguuucuaccuuauuagcaucuuuuugcaccugaucaagauuccaacucauagacacauaguugggaaauccugccccaagccucauaggcucaaucacaugggaaucuguucuugcggccuguauaagcaaccaggugugcuugucaaauggaagcgguga

SEQ ID NO: 4912 - RNA, 1473 nt, Artificial Sequence
  derived and/or modified protein sequence (opt3) from LASV(Lassa virus/H.sapiens-wt/NGA/2016/ISTH_0701;Clade II)__AVO03629__GPCstabilized
augggccagaucauuaccuucuuucaagaggugccccacgucauagaagagguuaugaacaucgugcugauugcccucagccuucuggcuaucuugaaggggauuuacaauguagcaacaugcggauuauucggucugguguccuuucuacuccuguguggcagaucuugcucaacuacguauaaaggggucuacgaacuucagacccuggaguuggacauggccagucucaacaugacaaugccucugagcuguacuaagaauaacucccaucacuauaucauggugggaaaugaaaccggccuggagcucacauuaaccaacacuucuauaaucggucauaaauucugcaaucugucggaugcgcacaagaaaaaccuuuacgaccaugcuuugaugucaauuaucagcacauuucaccugaguauuccaaauuucaaccaguaugaggccauguccugugauuuuaaugggggaaagaucucuguucaguacaaccuaagccacgcauaugccguggacgcugcaaaucauugcggcaccauagccaacggcguccuccaaacguucaugaggauggcuuggggaggguccuacauugcccuggauucagguugcggcaguugggacuguaucaugacuagcuaccaguaucuuauuauccagaauaccacaugggaagaucacugccaguuuucucggccgucccccaucggguaccugggauugcucucacaacgcacucgagacauuuauauaagccguagacgccggggcaccuucacauggacccugagugauucugaggguaacgaaacgccugggggauacugucucacuagguggaugcuuaucgaggcggagcugaaaugcuuuggcaacacagcaguggccaaguguaaugaaaaacaugacgaggaguucugcgauauguugcggcuauuugacuucaacaagcaggcuauucgcagacugaaaacccccgcccagauguccauccagcucauaaauaaggcaguaaacgcucugauuaaugaucaacuuaucaugaagaaccaccugagggacaucaugugcauuccauauugcaauuacagcaaauauugguacuugaaccacacuguuacagggaagaccucgcucccccgguguuggcuggugucuaauggauccuacuuaaacgaaacgcauuucucagacgauaucgagcagcaggccgacaauaugauuaccgagcugcuacaaaaagaauauauagaucgccaggguaagacaccucucggccuggucgaccuuuuuguguucaguacuagcuuuuacuugaucuccauuuuccugcaccucgugaaaaucccaacccaucgacacgucaucgggaagcccugcccuaaaccacauagacugaaccacaugggaauuuguucuugcggccuuuauaagcacccggguguucccgugaaguggaaaagguga

SEQ ID NO: 4913 - RNA, 1473 nt, Artificial Sequence
  derived and/or modified protein sequence (opt3) from LASV(Lassa virus/H.sapiens-wt/NGA/2016/ISTH_0702;Clade II)__AVO03557__GPCstabilized
augggccagaucauuaccuucuuucaagaggugccccacgucauagaagagguuaugaacaucgugcugauugcccucagccuucuggcuguauugaaggggaucuacaauguggcaacaugcggauuauucggucuggucgccuuucuacuccuguguggcagauccugcucuacuacguauaaagggguguacgaacuucagacccuggaguuggacauggcgaaccucaauaugacaaugccucugucauguacuaagaacaauagucaucacuauauuaugguuggaaacgaaaccggccuggagcucacauuaaccaauacuagcaucauaaaccauaaauucugcaaucuguccgaugcucacaagaaaaaccuuuacgaccaugccuugaugucuaucauuucgacauuucaccugucaaucccaaauuucaaccaguaugaggcaaugagcugugauuuuaauggugggaagauuagugugcaguacaaccuaucccacaccuaugccgucgacgcugcaaaucauugcggaacgaucgccaacggcgugcuccaaacuuucaugaggauggcuuggggcgggucuuacauagcccuggauagcggaugcgguuccugggacuguauuaugaccucauaccaguaucuuaucauucagaacacaacuugggaagaucacugccaguuuagucggccgagccccaucggcuaccugggguugcucucucaacgcacccgagacaucuauauuucccguagacgccggggaacauucaccuggacgcugucagauagcgagggcaaugaaacuccugguggguacugucucacaagguggaugcuuauagaggcggagcugaaaugcuuuggaaacaccgcaguagccaaguguaaugaaaaacaugacgaggaguucugcgauauguugcggcuauuugacuucaacaagcaggcuauccgcagacugaaaacucccgcccagaugaguauucagcucaucaauaaggcaguuaacgcucugauaaaugaucaacuuauuaugaagaaccaccugagggacaucaugugcaucccauauugcaauuacucuaaauauugguacuugaaccacacagugaccggccggacgucccucccccgcuguuggcuggucagcaaugggucguacuuaaacgaaacccauuucucugacgauauugagcagcaggccgacaauaugaucacagagcugcuacaaaaggaauauauggaucgacagggaaaaacuccucucggucugguggaccuuuuuguguucuccaccucauuuuacuugauuaguauauuccugcaccucaucaagauuccaacacauagacacgucaucggcaaacccugcccuaagccacauaggcugaaccacauggggaucuguagcugcggacuuuauaaacacccgggcguucccgugaaguggaagcgguga

SEQ ID NO: 4914 - RNA, 1473 nt, Artificial Sequence
  derived and/or modified protein sequence (opt3) from LASV(Lassa virus/H.sapiens-wt/NGA/2016/ISTH_0703;Clade II)__AVO03597__GPCstabilized
augggccagaucauuaccuucuuucaagaggugccccacgucauagaagagguuaugaacaucgugcugauugcccucagccuucuggcuaucuugaaggggauuuacaauguagcaacaugcggauuauucggucugguguccuuucuacuccuguguggcagaucuugcucaacuacguauaaaggggucuacgaacuucagacccuggaguuggacauggccagucucaacaugacaaugccucugagcuguacuaagaauaacucccaucacuauaucauggugggaaaugaaaccggccuggagcucacauuaaccaacacuucuauaaucaaucauaaauucugcaaccugucggaugcgcacaagaaaaaucuuuacgaccaugcuuugaugucaauuaucagcacauuucaccugaguauuccaaacuucaaucaguaugaggccauguccugugauuuuaacggugggaagaucucuguucaguacaaucuaagccacaccuaugcaguggacgccgcuucccauugcggaacgauagcaaacggcguccuccaaacuuucaugaggauggccuggggcgggucauacauugcucuggauaguggaugcgguagcugggacuguaucaugaccucuuaccaguaucuuauuauccagaauacaacuugggaagaucacugccaguuuucccggccgucacccaucggcuaccugggguugcucagccaacgcacccgagacauuuauauaagucguagacgccggggaacauucaccuggacgcugucugauuccgagggcaacgaaacuccugguggguacugucucacaagguggaugcuuaucgaggccgagcugaaaugcuuuggaaacaccgcgguggcaaaguguaaugaaaaacaugacgaggaguucugcgauauguugcggcuauuugacuucaacaagcaggccauucgcagacugaaaacucccgcucagaugagcauccagcucauaaauaaggccguaaacgcacugauuaaugaucaacuuaucaugaagaaccaccugagggacaucaugugcauuccauauugcaauuacucgaaauauugguacuugaaccacacaguuaccggccggacgucucucccccgcuguuggcugguguccaaugggucauacuuaaacgaaacccauuucagugacgauaucgagcagcaggcugacaauaugauuacagagcugcuacaaaaggaauauauagagcgacagggaaaaacuccucucggucuggucgaucuuuuuguguucagcaccuccuuuuacuugaucucuauuuuccugcaccucaucaagaucccaacacauagacacgugauuggcaaacccugcccuaagccacauaggcugaaccacauggggauauguagcugcggacuuuauaaacacccgggcguccccguuaaguggaagcgguga

SEQ ID NO: 4915 - RNA, 1473 nt, Artificial Sequence
  derived and/or modified protein sequence (opt3) from LASV(Lassa virus/H.sapiens-wt/NGA/2016/ISTH_0717;Clade II)__AVO03547__GPCstabilized
augggccagaucgugaccuucuuucaagaggucccccacguuauugaagaggugaugaacauaguacugaucgcccucagcauucuugcuauccugaagggguuguacaauguggcaacaugcggauuaauuggucuggucacuuuccuacuccuguccggcagaucuuguucaaugaucuauaaagggguguacgaacuucagacgcuggaguugaacauggaaacccucaauaugacaaugccucugaguugcacuaagaacaauagccaucacuauauaaugguuggaaacgagaccggccuggagcucacauuaaccaauacuucccugcuuaaccauaaauuuuguaauuugucugacgcccacaagaaaaaccuguacgaucauacacuaaugucgaucauuucaaccuuccaccucagcaucccaaauuuuaaccaguaugaagcgaugaguugcgacuucaauggugggaagauuacggugcaguacaaccugucccacacuuaugcugucgaugccgugaaucauuguggaacccuugcaaacggcauccugcaaacauuuaugaggauggccuggggcgggucuuacauagcuuuggacagccggugcggauccugggauugcauuaugacuucauaccaguaucucaucauucagaacaccacaugggaggaccauugucaguucagucgcccgagccccaucgguuaccugggcuuacugucucaacgaacccgugauaucuauauuuccagaaggcgccgggggacguuuacuuggacacugucagacagcgaaggaaaugagaccccuggcgguuacugcuugacucgguggaugcuaauagaggcagaacugaaguguuucgggaacacagccguagcuaaaugcaaugagaagcacgaugaagaguuuugugacaugcuccgccuguucgauuuuaacaaacaggccaucagaaggcuuaaggcgcccgcacagaugaguauucagcugaucaauaaagccguuaacgcuuugauaaaugaccaacucauuaugaagaaccaucugcgggauaucaugugcaucccauauugcaauuacucuaaguauugguacuuaaaccacaccuccacgggccgcaccagccugccccgaugcuggcuagugucgaauggcucuuaccucaacgagacacacuucuccgacgacauugagcagcaggccgauaauaugaucacugaaaugcugcaaaaagaguaucuugacagacaggggaagaccccuuugggacuggucgaucucuucguguuuucaacaaguuucuaccugauuagcauauuucuucaucugaucaaaauuccaacucacaggcauaucguggguaagcccuguccuaaaccacaccgguugaaccacaugggcaucugcuccugugggcucuauaagcagccgggaguccccguucguuggaaacgcuga

SEQ ID NO: 4916 - RNA, 1473 nt, Artificial Sequence
  derived and/or modified protein sequence (opt3) from LASV(Lassa virus/H.sapiens-wt/NGA/2016/ISTH_0753;Clade II)__AVO03609__GPCstabilized
augggccagaucauuaccuucuuucaagaggugccccacgucauagaagagguuaugaacaucgugcugauugcccucagccuucuggcuaucuugaaggggauuuacaauguagcaacaugcggauuauucggucugguguccuuucuacuccuguguggcagaucuugcucaacuacguauaaaggggucuacgaacuucagacccuggaguuggacauggccagucucaacaugacaaugccucugagcuguacuaagaauaacucccaucacuauaucauggugggaaaugaaaccggccuggagcucacauuaaccaacacuucuauaaucaaucauaaauucugcaaccugucggaugcgcacaagaaaaaucuuuacgaccaugcuuugaugucaauuaucagcacauuucaccugaguauuccaaacuucaaucaguaugaggccauguccugugauuuuaacggugggaagaucucuguucaguacaaucuaagccacaccuaugcaguggacgccgcuaaccauugcggaacgauagcaaauggcguccuccaaacuuucaugaggauggccuggggcggguccuacauugcucuggauucaggaugcgguaacugggacuguaucaugaccaguuaccaguaucuuauuauccagaacacaacuugggaagaucacugccaguuuagccggccgucucccaucggcuaccugggguugcucucccaacgcacccgagacauuuauauaucacguagacgccggggaacauucaccuggacgcugagcgauagugagggcaaugaaacuccugguggguacugucucacaagguggaugcuuaucgaggccgagcugaaaugcuuuggaaacaccgcgguggcaaaguguaaugaaaaacaugacgaggaguucugcgauauguugcggcuauuugacuucaacaagcaggccauuucucgccugaaaacucccgcucagauguccauccagcucauaaauaaggccguaaacgcacugauuaaugaucaacuuaucaugaagaaccaccugagagacaucaugugcauuccauauugcaauuacagcaaauauugguacuugaaccacacaguuaccggcaggacgucgcucccccgguguuggcuggugucuaauggguccuacuuaaacgaaacccauuucucagacgauaucgagcagcaggcugacaauaugauuacagagcugcuacaaaaggaauauauggaucgccagggaaaaacuccucucggucuggucgaccuuuuuguguucaguaccagcuuuuacuugauauccaucuuccugcaccucgugaagauuccaacacaucgacacgucaucggcaaacccugcccuaagccacauagacugaaccacauggggaucuguucuugcggacuuuauaaacacccgggcguucccgugaaguggaagagguga

SEQ ID NO: 4917 - RNA, 1473 nt, Artificial Sequence
  derived and/or modified protein sequence (opt3) from LASV(Lassa virus/H.sapiens-wt/NGA/2016/ISTH_0759;Clade II)__AVO03593__GPCstabilized
augggccagaucauuaccuucuuucaagaggugccccacgucauagaagagguuaugaacaucgugcugauugcccucagccuucuggcuaucuugaaggggauuuacaauguagcaacaugcggauuauucggucugguguccuuucuacuccuguguggcagaucuugcucaacuacguauaaaggggucuacgaacuucagacccuggaguuggacauggccagucucaacaugacaaugccucugagcuguacuaagaauaacucccaucacuauaucauggugggaaaugaaaccggccuggagcucacauuaaccaacacuucuauaaucaaucauaaauucugcaaccugucggaugcgcacaagaaaaaucuuuacgaccauacauugaugucaauuaucagcaccuuucaccugaguauuccaaacuucaaucaguaugaggcuauguccugugauuuuaacggugggaagaucucuguucaguacaaucuaagccacacguaugccguggacgcagccaaccauugcggaacuauagcuaauggcguccuccaaaccuucaugaggauggcauggggcggguccuacauugcccuggauucaggaugcgguaguugggacuguaucaugacaagcuaccaguaucuuauuauccagaacacuucuugggaagaucacugccaguuuucccggccgucacccaucggcuaccugggguugcucagccaacgcacccgagacauuuauauaagucguagacgccggggaacauucaccuggacgcugucugauuccgagggcaacgaaacuccugguggguacugucucacaagguggaugcuuaucgaggcugagcugaaaugcuuuggaaauaccgccguggcgaaguguaacgaaaaacaugacgaggaguucugcgauauguugcggcuauuugacuucaauaagcaggcaauucgcagacugaaaacucccgcccagaugagcauccagcucauaaacaaggcuguaaaugcccugauuaacgaucaacuuaucaugaagaaucaccugagggacaucaugugcauuccauauugcaacuacucgaaauauugguacuugaaucacacaguuaccggcaagacgucucucccccgguguuggcugguguccaacgggucauacuuaaaugaaacccauuucagugacgauaucgagcagcaggcagacaacaugauuacagagcugcuacaaaaagaauauauagaucgccagggaaagacuccucucggucuggucgaccuuuuuguguucagcaccuccuuuuacuugaucucuauuuuccugcaccucgugaaaaucccaacacaucgacacgucaucggcaagcccugcccuaaaccacauagacugaaucacauggggauuuguagcugcggacuuuauaagcacccgggcguucccgugaaguggaaaagguga

SEQ ID NO: 4918 - RNA, 1473 nt, Artificial Sequence
  derived and/or modified protein sequence (opt3) from LASV(Lassa virus/H.sapiens-wt/NGA/2016/ISTH_0777;Clade II)__AVO03615__GPCstabilized
augggccagaucauuaccuucuuucaagaggugccccacgucauagaagagguuaugaacaucgugcugauugcccucagccuucuggcuaucuugaaggggauuuacaauguagcaacaugcggauuacugggucuaaucuccuuccuccugcuuuguggcagaucuugcucaacuacguauaaagggguguacgaacugcagaccuuggagcucgacauggccaaccugaauaugacaaugccucugaguuguacuaagaacagcucccaucacuauauaauggucggaaaugaaaccggccucgaguuaacacugaccaacacuucuaucauuaaucauaaauuuugcaaccuuucggaugcgcacaagaaaaauuuguacgaccaugcucugaugucaaucauuagcacauuccaccuaaguaucccaaacuuuaaucaguaugaggccauguccugugauuucaacggugggaagauaucugugcaguacaaucucagccacgcauaugccguugacgcugcaaaccauugcggaaccauugccaauggcgugcugcaaacguuuaugaggauggcuuggggcggguccuacaucgcccuugauucaggaugcgguaacugggacuguauuaugacuucauaccaguaucugaucauccagaacaccacaugggaagaucacugccaguucagccggccgucucccauuggcuacuuggggcuccugucccaacgcacucgagacauauauaucucacguagacgccggggaaccuuuacauggacccucagcgauagugagggcaaugaagcgccugguggguacugucuuacgagguggaugcugauugaggcagaguugaaaugcuucggaaacacugccaucgcuaaguguaaugaaaaacaugacgaggaauuuugcgauaugcuacggcuguucgacuuuaacaagcaggccauacgcagacucaaaacacccgcacagaugucuauucagcugaucaauaaggcugucaacgcccuuaucaaugaucaacugauuaugaagaaccacuugagggacaucaugugcauuccauauugcaauuacuccaaauauugguaccucaaccacaccgugacuggcaagacaagccugccccgguguugguuaauaucgaaugggucuuaccugaacgaaacccauuucuccgacgauaucgagcagcaggcggacaauaugauuacggagcuacuccaaaaagaauauauggaucgccagggaaagaccccucugggucuuguagacuuguucguuuuuaguacaaguuucuaccugaucagcaucuuucuccaccuggugaaaauuccaacucaucgacacauagucggcaagcccugcccuaaaccacauagacuuaaccacauggggaucuguuccugcggacuguauaagcacccgggcgugcccgugaaguggaaaagguga

SEQ ID NO: 4919 - RNA, 1473 nt, Artificial Sequence
  derived and/or modified protein sequence (opt3) from LASV(Lassa virus/H.sapiens-wt/NGA/2016/ISTH_0779;Clade II)__AVO03655__GPCstabilized
augggccagaucauuaccuucuuucaagaggugccccacgucguugaagaggugaugaacguagugcugauagcccucagccuucuggcuaucuugaaggggauuuacaauaucgcaacaugcggauuauucggucugauuuccuuucuacuccuguguggcagaucuugcucaacuacguauaaaggggucuacgaacuucagacccuggaguuggacauggccaaccucaauaugacaaugccucugaguuguacuaagaacaauagccaucacuauaucauggugggaaacgaaaccggccuggagcucacauuaaccaauacuuccauaaucaaccauaaauucugcaaucugucugaugcgcacaagaaaaaccuuuacgaccauacauugaugucgauuaucucaaccuuucaccugagcauuccaaauuucaaccaguaugaggcuaugaguugugauuuuaauggugggaagaucuccguucaguacaaccuaucucacggauaugccguggacgcagccaaucauugcggcacgauagcuaacggcguccuccaaacuuucaugaggauggcauggggagggagcuacauugcccuggauuccgguugcggcaacugggacuguaucaugaccucauaccaguaucuugugauucagaauacaacuugggaagaucacugccaguuuagucggccgagccccaucggguaccugggauugcucucucaacgcacccgagacaucuauauuucccguagacgccggggcacauucaccuggacgcugucagauagcgaggguaacgacgcuccugggggauacugucucacuagguggaugcuuauagaagccgagcugaaaugcuuuggcaauacagcgaucgcaaaguguaacgagaaacaugaugaagaguucugcgacauguugcggcuauuugauuucaaucgccaggccauuaagagacugaaaacccccgcucagaugaguauccagcucauaaacaaggccguaaaugcacugauuaacgaccaacuuaucaugaagaaucaccugagggacaucaugugcauuccauauugcaacuacucuaaauauugguacuugaauaacacuguuacagggaaguccagccuccccaaauguuggcuggugucgaauggaucuuacuuaaacgagacccacuucuccgaugacaucgaacagcaggcugauaauaugauuacggagaugcugcaaaaggaguauauagaccggcaggguaaaaccccucuaggccucgucgaucuguuuguguucucaacaaguuuuuaccuuaucagcauuuucuugcaucuggugcgcaucccaacucaccgacauaucaccgggaagcccugcccuaaaccacacagacucaaccauaugggaauuuguuccugcggccuguauaagcagccggguguccccguuaaguggaaaagguga

SEQ ID NO: 4920 - RNA, 1473 nt, Artificial Sequence
  derived and/or modified protein sequence (opt3) from LASV(Lassa virus/H.sapiens-wt/NGA/2016/ISTH_0917;Clade II)__AVO03535__GPCstabilized
augggccagaucgugaccuucuuucaagaggucccccacguuauugaagagauaaugaacaucgugcugauuacacucagccuucuggccaucuugaaggggguauacaauuuagcuacuugcggacugauuggucuaaucacguuccucuuucuguguggcagauccugcucuaugaccuauaaagggaacuaccagcuugaaacacuggaguugaauauggaaaugcucaacaugacuaugccucugucauguaccaagaauaacagucaucacuauauaagggugggaaaugagacaggccuggagcucaccuuaacuaacacaagcaucauucagcauaaauucugcaaucuguccgacgcacacaagcggaaccuuuacgaucauucuuugaugucgaucgucucaaccuuucaccugagcauuccaaauuucaaccaguaugaagccaugaguugugacuuuaauggugggaaaaucuccauacaauacaaccuaucucacacguaugcgggagaugcugccaagcauugcggcacucucgcaaauggcauucugcagaccuucaugcgcauggccuggggagggagcuacaucgcucuugacuccgguugcggcgggugggauuguauuaugacaaacuaccaguaucugaucauccagaacgugacuugggaggaccacugccaauuuucacguccgagucccauuggauacuugggccuccugagccagagaaccagggaaguuuauauaucucggcgccgccgggguacauucaccuggacgcucuccgauucagaggggaaugaggcaccuggaggcuacugucuuacuagauggaugcugaucgaagccgaguugaagugcuuuggcaacacagcuguggccaaauguaaugaaaagcaugacgaggaguucugcgauaugcuaaggcuguuugacuucaacaaacaggcgauucggcgccucaaggcacccacccagaugagcauccaacugauaaauaaagccgucaacgcucuuauuaaugaucagcugaucaugaagaaccacuugcgagacaucaugugcauuccauauugcaauuacaguaaguauugguaccucaaccacacuaucacaggaagaaccucucugcccagguguugguuaguguccaaugguagcuaccugaacgagacgcauuucucggaugacauugaacagcaagccgacaauaugauaaccgagaugcuacagaaagaauauaucgaucggcagggcaagacaccucucgggcugguagaccuuuuuguuuucucuacuuccuuuuacuugauuucaaucuuccugcaccucgugaaaaucccaacccaucgucacauugucggaaagaguugccccaaaccucaucgccugaaccacaugggcauauguagcugcggucuuuauaagagaccagggguguccgugagguggaaacgguga

SEQ ID NO: 4921 - RNA, 1473 nt, Artificial Sequence
  derived and/or modified protein sequence (opt3) from LASV(Lassa virus/H.sapiens-wt/NGA/2016/ISTH_1006;Clade II)__AVO03643__GPCstabilized
augggccagaucauuaccuucuuucaagaggugccccacgucauagaagagguuaugaacaucgugcugauugcccucagccuucuggcuaucuugaaggggauuuacaauguagcaacaugcggauuauucggucugguggccuuucuacuccuguguggcagauccugcucuacuacguauaaaggggucuacgaacuucagacccuggaguuggacauggcgucacucaacaugacaaugccucugaguuguacuaagaauaacagccaucacuauaucauggugggaaaugaaaccggccuggagcucacauuaaccaacacuuccauaaucaaucauaaauucugcaaccugucugaugcucacaagaaaaaucuuuacgaccaugccuugaugucgauuaucucaacauuucaccugagcauuccaaacuucaaucaguaugaggcaauggguugugauuuuaacgggggaaagaucaguguucaguacaaucuaucccacucuuaugccguggacgcugcaaaccauugcggcaccauagccaauggcguccuccaaacguucaugaggauggcuuggggagggagcuacauugcccuggauuccgguugcggcucaugggacuguaucaugaccaguuaccaguaucuuauuauccagaacacuacaugggaagaucacugccaguuuagccggccgucucccaucggguaccugggauugcucucccaacgcacucgagacauuuauauaucacguagacgccggggcaccuucacauggacccugagcgauagugaggguaacgaaacgccugggggauacugucucacuagguggaugcuuaucgaggcggagcugaaaugcuuuggcaauacagcaguggccaaguguaacgaaaaacaugacgaggaguucugcgauauguugcggcuauuugacuucaauaagcaggcuauucgcagacugaaaacccccgcccagaugucuauccagcucauaaacaaggcaguaaaugcucugauuaacgaucaacuuaucaugaagaaucaccugagggacaucaugugcauuccauauugcaacuacuccaaauauugguacuugaaucacacuguuacagggcggaccagccucccccgcuguuggcuggugucgaacggaucuuacuuaaaugaaacgcauuucuccgacgauaucgagcagcaggccgacaacaugauuaccgagcugcuacaaaaggaauauauggaucgacaggguaaaacaccucucggccuggucgaccuuuuuguguucucaaccaguuuuuacuugauaagcaucuuccugcaccucauuaagaucccaacucauagacacgugaucgggaaacccugcccuaagccacauaggcugaaucacaugggaauuuguuccugcggccuuuauaaacacccggguguccccguuaaguggaagcgguga

SEQ ID NO: 4922 - RNA, 1473 nt, Artificial Sequence
  derived and/or modified protein sequence (opt3) from LASV(Lassa virus/H.sapiens-wt/NGA/2016/ISTH_1026;Clade II)__AVO03589__GPCstabilized
augggccagaucauuaccuucuuucaagaggugccccacgucauagaagagguuaugaacaucgugcugauugcccucagccuucuggcuaucuugaaggggauuuacaauguagcaacaugcggauuauucggucugguguccuuucuacuccuguguggcagaucuugcucaacuacguauaaaggggucuacgaacuucagacccuggaguuggacauggccagucucaacaugacaaugccucugagcuguacuaagaauaacucccaucacuauaucauggugggaaaugaaaccggccuggagcucacauuaaccaacacuucuauaaucaaucauaaauucugcaaccugucggaugcgcacaagaaaaaucuuuacgaccaugcuuugaugucaauuaucagcacauuucaccugaguauuccaaacuucaaucaguaugaggccauguccugugauuuuaacggugggaagaucucuguucaguacaaucuaagccacgcauaugccauagacgcugcaucccauugcggaaccauugccaacggcgugcuccaaacguucaugaggauggcuuggggcgggucauacaucgcccuggauaguggaugcgguagcugggacuguauuaugacuucuuaccaguaucuuaucauccagaauaccacaugggaagaucacugccaguuuucccggccgucacccauuggcuaccugggguugcucagccaacgcacucgagacauauauaucagucguagacgccggggaaccuucacauggacccugucugauuccgagggcaacgaaacgccugguggguacugucucacuagguggaugcuuauugaggcggagcugaaaugcuuuggaaacacagcagucgccaaguguaaugaaaaacaugacgaggaguucugcgauauguugcggcuauuugacuucaacaagcaggcuauccgcagacugaaaacccccgcccagaugagcauacagcucauuaauaaggcagugaacgcucugaucaaugaucaacuuaucaugaagaaccaccugagggacauuaugugcaucccauauugcaauuacucgaaauauugguacuugaaccacacuguaacaggcaagaccucucucccccgguguuggcugguuuccaaugggucauacuuaaacgaaacgcauuucagugacgauauugagcagcaggccgacaauaugauaaccgagcugcuacaaaaagaauaucucgaucgccagggaaagacaccucugggucuuguggacuuguuugucuucagcacuuccuuuuaccugaucucuauuuuccuccaccuggugaaaaucccaacccaucgacacgugaucggcagacccugcccuaagccacauaggcuuaaccacauggggauuuguagcugcggacuguauaaacacccgggcguccccguuaaguggaagcgguga

SEQ ID NO: 4923 - RNA, 1473 nt, Artificial Sequence
  derived and/or modified protein sequence (opt3) from LASV(Lassa virus/H.sapiens-wt/NGA/2016/ISTH_1070;Clade II)__AVO03651__GPCstabilized
augggccagaucauuaccuucuuucaagaggugccccacgucauagaagagguuaugaacaucgugcugauugcccucagccuucuggcuaucuugaaggggauuuacaauguagcaacaugcggauuauucggucugguguccuuucuacuccuguguggcagaucuugcucaacuacguauaaaggggucuacgaacuucagacccuggaguuggacauggccagucucaacaugacaaugccucugagcuguacuaagaauaacucccaucacuauaucauggugggaaaugaaaccggccuggagcucacauuaaccaacacuucuauaaucaaucauaaauucugcaaccugucggaugcgcacaagaaaaaucuuuacgaccaugcuuugaugucaauuaucagcacauuucaccugaguauuccaaacuucaaucaguaugaggccauguccugugauuuuaacggugggaagaucucuguucaguacaaucuaagccacaccuucgcaguggacgccgcuaaccauugcggaacgauagcaaauggcguccuccaaacuuuuaugaggauggccuggggcggguccuauauugcucuggauucaggaugcgguaguugggacuguaucaugaccagcuaccaguaccuuauuauccagaacacaacuugggaagaucacugccaguucucucggccgucccccaucggcuaucugggguugcucucacaacgcacccgagacauuuacauaagccguagacgccggggaacauuuaccuggacgcugagugauucugagggcaacgaaacuccugguggguauugucucacaagguggaugcuuaucgaggccgagcugaaaugcuucggaaauaccgcgguggcaaaguguaacgaaaaacaugacgaggaauuuugcgauauguugcggcuauucgacuucaauaagcaggccauucgcagacugaaaacucccgcucagauguccauccagcucauaaacaaggccguaaaugcacugauuaacgaucaacuuaucaugaagaaucaccugagggacaucaugugcauuccauacugcaacuauagcaaauacugguauuugaaucacacaguuaccggcaagacgucgcucccccgguguuggcuggugucuaacggguccuacuuaaaugaaacccauuuuucagacgauaucgagcagcaggcugacaacaugauuacagagcugcuacaaaaagaauacauggaucgccagggaaagacuccucucggucuggucgaccuuuucguguuuaguaccagcuucuauuugauauccaucuuucugcaccucgugaaaauuccaacacaucgacacaucaucggcaagcccugcccuaaaccacauagacugaaucacauggggauuuguucuugcggacuuuacaagcacccgggcguccccguuaaguggaaaagguga

SEQ ID NO: 4924 - RNA, 1473 nt, Artificial Sequence
  derived and/or modified protein sequence (opt3) from LASV(Lassa virus/H.sapiens-wt/NGA/2016/ISTH_1123;Clade II)__AVO03645__GPCstabilized
augggccagaucauuaccuucuuucaagaggugccccacgucauagaagagguuaugaacaucgugcugauugcccucagccuucuggcuaucuugaaggggauuuacaauguagcaacaugcggauuauucggucugguguccuuucuacuccuguguggcagaucuugcucaacuacguauaaaggggucuacgaacuucagacccuggaguuggacaugggaagucucaacaugacaaugccucugagcuguacuaagaauaacucccaucacuauaucauggugggcaaugaaaccggucuggagcucacauuaaccaacacuucuauaaucaaucauaaauucugcaaccugucggaugcccacaagaaaaaucuuuacgaccaugcguugaugucaauuaucagcacauuucaccugaguauuccaaacuucaaucaguaugaggcuauguccugugauuuuaacgggggaaagaucucuguucaguacaaucuaagccacgccuaugcaguggacgccgcuaaccauugcggcaccauagcaaauggcguccuccaaacguucaugaggauggccuggggaggguccuacauugcucuggauucagguugcggcaguugggacuguaucaugacuagcuaccaguaucuuauuauccagaacaccucuugggaagaucacugccaguuuucccggccgucacccaucggguaccugggauugcucagccaacgcacacgagacauuuauauaagucguagacgccggggcacuuucaccuggacacugucugauuccgaggguaacgaaaccccugggggauacugucucacgagguggaugcuuaucgaggccgagcugaaaugcuuuggcaauacugcgguggcaaaguguaacgaaaaacaugacgaggaguucugcgauauguugcggcuauuugacuucaauaagcaggccauucgcagacugaaaacacccgcucagaugagcauccagcucauaaacaaggccguaaaugcacugauuaacgaucaacuuaucaugaagaaucaccugagggacaucaugugcauuccauauugcaacuacucgaaauauugguacuugaaucacaccguuacugggaagacaucucucccccgguguuggcugguguccaacggaucauacuuaaaugaaacccauuucagugacgauaucgagcagcaggcugacaacaugauuacggagcugcuacaaaaagaauauauagaucgccaggguaagaccccucucggccuggucgaccuuuuuguguucagcacauccuuuuacuugaucucuauuuuccugcaccucgugaaaaucccaacucaucgacacgucaucgggaagcccugcccuaaaccacauagacugaaucacaugggaauuuguagcugcggccuuuauaagcacccggguguucccgugaaguggaaaagguga

SEQ ID NO: 4925 - RNA, 1473 nt, Artificial Sequence
  derived and/or modified protein sequence (opt3) from LASV(Lassa virus/H.sapiens-wt/NGA/2016/ISTH_1150;Clade II)__AVO03627__GPCstabilized
augggccaggugaucaccuucuuucaagagauuccccacgucauagaagagguuaugaacaucgugcugauuacacucagccuucuggccaucuugaaggggauuuacaauguagcuacuugcggauuauucggucugaucuccuuucuacuccuguguggcagaucuugcucaacgaccuauaaagggguguacgaacuucagacacuggaguuggacauggcaaaccucaauaugacuaugccucugaguuguaccaagaacagcucccaucacuauauaauggucggaaaugaaacaggccuggagcucaccuuaacuaacacaucuaucauuaaucauaaauucugcaaccugucggaugcccacaagaaaaaucuuuacgaccaugcguugaugucaaucauuagcaccuuucaccugaguaucccaaacuucaaucaguaugaggcuauguccugugauuuuaacggugggaagauaucugugcaguacaaucuaagccacgccuaugcaguugacgccgcuaaccauugcggaacgauugcaaauggcgugcuccaaacuuucaugaggauggccuggggcggguccuacaucgcucuggauucaggaugcgguaacugggacuguauuaugaccaguuaccaguaucuuaucauccagaacacaacuugggaagaucacugccaguuuagccggccgucucccauuggcuaccugggguugcucucccaacgcacccgagacauauauaucucacguagacgccggggaacauucaccuggacgcugagcgauagugagggcaaugaagccccugguggguacugucucacuagguggaugcuuauugaggcggagcugaaaugcuuuggaaacacagcaaucgccaaguguaaugaaaaacaugacgaggaguucugcgauauguugcggcuauuugacuucaacaagcaggcuauacgcagacugaaaacccccgcccagaagucuauucagcucaucaauaaggcagucaacgcucugaucaaugaucaacuuauuaugaaaaaccaccugagggacaucaugugcauuccauauugcaauuacuccaaguauugguacuugaaccacacugugacaggcaaaaccagccuccccaaguguuggcugauaucgaaugggucuuacuuaaacgaaacgcauuucuccgacgauaucgagcagcaggccgacaauaugauuaccgagcugcuacaaaaagaauauauggaucggcagggaaagacaccucucggucugguagaccuuuuuguuuucucaaccaguuuuuacuugaucagcaucuuccugcaccucgugaaaauuccaacucaucgccacauagucggccgacccugcccuaagccacauagacugaaccacauggggaucuguuccugcggacuuuauaagcacccgggcgugcccgugaaauggaagagguga

SEQ ID NO: 4926 - RNA, 1473 nt, Artificial Sequence
  derived and/or modified protein sequence (opt3) from LASV(Lassa virus/H.sapiens-wt/NGA/2016/ISTH_1174;Clade II)__AVO03555__GPCstabilized
augggccagaucauuaccuucuuucaagaggugccccacgucauagaagagguuaugaacaucgugcugauugcccucagccuucuggcuaucuugaaggggauuuacaauguagcaacaugcggauucuuugguuuaguguccuuccugcuacucuguggcagaucuugcucaacuaucuauaaaggggucuacgaacugcagacgcuugagcuggacauggccaguuugaacaugaccaugccucucagcuguacaaagaauaacucccaucacuauauaauggugggaaaugaaacuggccuggagcugacccucacaaacaccucuaucauuaaucauaaauuuugcaacuuaucggaugcgcacaagaaaaaucuguacgaccaugcucuuaugucaaucauuagcacuuuccacuugaguaucccacacuuuaaccaguaugaggccauguccugugauuucaauggugggaagauaucuguucaguacaaccugagccauacauaugcaguggacgccgcuaaucacugcggaaccauugcaaacggcguccuacaaacguuuaugaggauggccuggggcggguccuacaucgcucucgauucaggaugcgguaguugggacuguauuaugacuagcuaccaguaucugaucauccagaauaccacaugggaagaucauugccaguucucucggccgucccccauuggcuaccuugggcuguugucacaacgcacucgagacauauauaucagccguagacgccggggaaccuuuacauggaccuuaagugauucugagggcaacgaaacgccugguggguacugucugacuagguggaugcucauugaggccgagcuuaaaugcuucggaaacacagcgguggcaaaguguaaugaaaaacacgacgaggaauuuugcgauaugcugcgguuguucgacuucaacaagcaggccauccgcaaacuaaagacccccgcucagauguccauacagcugauuaauaaggccguaaacgcacucaucaaugaucaacugaucaugaaaaaccaccuuagagacauuaugugcaucccauauugcaauuacagcaaguauugguaccugaaccauacuguuacaggcaaaaccucguugcccagguguuggcucgugucuaauggguccuaccugaacgaaacgcacuuuucagacgauauugagcagcaggcugacaauaugauaaccgaguuacugcaaaaggaauauauggaucggcagggaaaaacaccucuaggucucgucgaccuguucguguuuaguacuagcuucuaccuuaucuccaucuuuuugcaucuggugaagauuccaacccaccgccaugucaucggcaaacccugcccuaagccacaccgacucaaccacauggggauuuguucuugcggacuguauaagcauccgggcguucccgugaaauggaagagauga

SEQ ID NO: 4927 - RNA, 1473 nt, Artificial Sequence
  derived and/or modified protein sequence (opt3) from LASV(Lassa virus/H.sapiens-wt/NGA/2016/ISTH_1207;Clade II)__AVO03599__GPCstabilized
augggccagaucauuaccuucuuucaagaggugccccacgucauagaagagguuaugaacaucgugcugauugcccucagccuucuggcuaucuugaaggggauuuacaauguagcaacaugcggauuauucggucugguguccuuucuacuccuguguggcagaucuugcucaacuacguauaaaggggucuacgaacuucagacccuggaguuggacaugacaagucucaacaugacuaugccucugagcuguaccaagaauaacucccaucacuauaucauggugggaaaugaaacaggccuggagcucaccuuaacuaacacaucuauaaucaaucauaaauucugcaaccugucggaugcccacaagaaaaaucuuuacgaccaugcguugaugucaauuaucagcaccuuucaccugaguauuccaaacuucaaucaguaugaggcuauguccugugauuuuaacggugggaagaucucuguucaguacaaucuaagccacacguaugccguggacgcagccaaccauugcggaacuauagcuaauggcguccuccaaaccuucaugaggauggcauggggcggguccuacauugcccuggauucaggaugcgguaguugggacuguaucaugacaagcuaccaguaucuuauuauccagaacacuaccugggaagaucacugccaguuuucucggccgucccccaucggcuaccugggguugcucucacaacgcacacgagacauuuauauaagccguagacgccggggaaccuucacguggacucugagugauucugagggcaacgacacaccugguggguacugucucaccagguggaugcuuaucgaagcugagcugaaaugcuuuggaaauacugccguggcgaaguguaacgagaaacaugaugaagaguucugcgacauguugcggcuauuugauuucaauaagcaggcaauucgcagacugaaaacacccgcccagauguccauccagcucauaaacaaggcuguaaaugcccugauuaacgaccaacuuaucaugaagaaucaccugagggacaucaugugcauuccauauugcaacuacagcaaauauugguacuugaaucacaccguuacgggcaagaccucgcucccccgguguuggcuggugucuaacggguccuacuuaaaugagacacauuucucagaugacaucgaacagcaggcagauaacaugauuacugagcugcuacaaaaagaguauauagaccgccagggaaagaccccucucggucuggucgaucuuuuuguguucaguacuagcuuuuacuugaucuccauuuuccugcaccucgugaaaaucccaacacaucgacacgucaucggcaagcccugcccuaaaccacauagacugaaucacauggggauuuguucuugcggacuuuauaagcacccgggcguucccgugaaguggaaaagguga

SEQ ID NO: 4928 - RNA, 1473 nt, Artificial Sequence
  derived and/or modified protein sequence (opt3) from LASV(Lassa virus/H.sapiens-wt/NGA/2016/ISTH_1306;Clade II)__AVO03623__GPCstabilized
augggccagaucauuaccuucuuucaagaggugccccacgucauagaagagguuaugaacaucgugcugauugcccucagccuucuggcuaucuugaaggggauuuacaauguagcaacaugcggauuauucggucugguguccuuucuacuccuguguggcagaucuugcucaacuacguauaaaggggucuacgaacuucagacccuggaguuggacauggccagucucaacaugacaaugccucugagcuguacuaagaauaacucccaucacuauaucauggugggaaaugaaaccggccuggagcucacauuaaccaacacuucuauaaucaaucauaaauucugcaaccugucggaugcgcacaagaaaaaucuuuacgaccaugcuuugaugucaauuaucagcacauuucaccugaguauuccaaacuucaaucaguaugaggccauguccugugauuuuaacggugggaagaucucuguucaguacaaucuaagccacaccuaugcaguggacgccgcuaaccauugcggaacggucgcaaauggcgugcuccaaacuuucaugaggauggccuggggcggguccuacauagcucuggauucaggaugcgguaguugggacuguauuaugaccagcuaccaguaucuuaucauucagaacacaacuugggaagaucacugccaguuuucucggccgucccccaucggcuaccugggguugcucucacaacgcacccgagacaucuauauuagccguagacgccggggaacauucaccuggacgcugagugauucugagggcaacgaaacuccugguggguacugucucacaagguggaugcuuauagaggccgagcugaaaugcuuuggaaauaccgcgguagcaaaguguaacgaaaaacaugacgaggaguucugcgauauguugcggcuauuugacuucaauaagcaggccauccgcagacugaaaacucccgcucagauguccauucagcucaucaacaaggccguuaaugcacugauaaacgaucaacuuauuaugaagaaucaccugagggacaucaugugcaucccauauugcaacuacagcaaauauugguacuugaaucacacagugaccggccggacgucgcucccccgcuguuggcuggucucuaacggguccuacuuaaaugaaacccauuucucagacgauauugagcagcaggcugacaacaugaucacagagcugcuacaaaaggaauauauugaucgacagggaaaaacuccucucggucugguggaccuuuuuguguucaguaccagcuuuuacuugauauccaucuuccugcaccucgucaagauuccaacacauagacacguuaucggcaaacccugcccuaagccacauaggcugaaucacauggggaucuguucuugcggacuuuauaaacacccgggcgugcccguaaaguggaagcgguga

SEQ ID NO: 4929 - RNA, 1473 nt, Artificial Sequence
  derived and/or modified protein sequence (opt3) from LASV(Lassa virus/H.sapiens-wt/NGA/2016/ISTH_1311;Clade II)__AVO03575__GPCstabilized
augggccagaucgugaccuucuuucaagaggucccccacguuauugaagaggugaugaacauaguacugaucgcccucagccuucuggcuauuuugaaggggaucuacaauguggcaacaugcggauuauucggucugauuuccuuucuacuccuguguggcagaucuugcucaacuacguauaaaggggucuacgaacuucagacccuggaguuggacauggccaaccucaauaugacaaugccucugaguuguacuaagaacaauagccaucacuauaucauggugggaaacgaaaccggccuggagcucacauuaaccaauacuuccauaaucaaccauaaauucugcaaucugucugaugcgcacaagaaaaaccuuuacgaccaugcuuugaugucgauuaucucaacauuucaccugagcauuccaaauuucaaccaguaugaggccaugaguugugauuuuaauggugggaagaucuccguucaguacaaccuaucucacgcauaugccggagacgcugcaagccauugcggcaccauagccaauggcgugcuccaaacguucaugaggauggcuuggggaggguccuacauugcccuggauucagguugcggcaacugggacuguaucaugaccaguuaccaguaucuuauuauccagaacacuacaugggaagaucacugccaguuuagccggccgucucccaucggguaccugggauugcucucccaacgcacucgagacauuuauauaucacguagacgccggggcaccuucacauggacccugagcgauagugaggguaaugacgcgccugggggauacugucucacgagguggaugcuuaucgaagcagagcugaaaugcuuuggcaacacugccauugcuaaguguaaugagaaacaugaugaagaguucugcgacauguugcggcuauuugauuucaacaagcaggccaucaaacgccugaagacacccgcacagaugucuauacagcucauuaauaaggcugucaacgcccugaucaaugaccaacuuaucaugaaaaaccaccugagagacauuaugugcaucccauauugcaauuacuccaaguauugguacuugaaccacaccacuacagggaaaaccagccuccccaaguguuggcugauuucgaauggaucuuacuuaaacgagacgcauuucuccgaugacauagaacagcaggcggauaauaugaucaccgagcugcuacaaaaagaguaucucgacaggcaggguaagacaccucugggccuuguggauuuguuuguauucucaaccaguuuuuaccugauuagcaucuuccuccaccugaucaaaauuccaacucaucggcacauaguugggcgccccugcccuaagccacaucgacuuaaccacaugggaaucuguuccugcggccuguauaagcacccgggugugcccgucaaauggaagagauga

SEQ ID NO: 4930 - RNA, 1473 nt, Artificial Sequence
  derived and/or modified protein sequence (opt3) from LASV(Lassa virus/H.sapiens-wt/NGA/2016/ISTH_1423;Clade II)__AVO03577__GPCstabilized
augggccagaucgugaccuucuuucaagaggucccccacguuauugaagaggugaugaacauaguacugaucgcccucagccuucuggcuauuuugaaggggaucuacaauguggcaacaugcggauuauucggucuggucuccuuucuacuccuguguggcagaucuugcucaacuacguauaaagggguguacgaacuucagacccuggaguuggacauggccaaccucaauaugacaaugccucugaguuguacuaagaacaauagccaucacuauauuaugguuggaaacgaaaccggccuggagcucacauuaaccaauacuuccaucauaaaccauaaauucugcaaucugucugaugcgcacaagaaaaaccuuuacgaccaugcuuugaugucgaucauuucaacauuucaccugagcaucccaaauuucaaccaguaugaggccaugaguugugauuuuaauggugggaagauuuccgugcaguacaaccuaucucacagcuaugcagucgacgccgcuaaucauugcggaaccguggcaaacggcguacuccaaacguucaugaggauggccuggggcggguccuacaucgcucuggauucaggaugcgguaguugggacuguauaaugacuagcuaccaguaucuuauuauccagaacauuaccugggaagaucacugccaguuuucucggccgucccccaucggcuaccugggguugcucucacaacgcacacgagacaucuauauuagccguagacgccggggaacuuucaccuggacacugagugauucugagggcaaagaaaccccugguggguacugucucacgagguggaugcuuauagaggccgagcugaagugcuuuggaaauacugcgguugcaaaauguaacgaaaagcaugacgaggaguucugcgauauguugcggcuauuugacuucaauaaacaggccauccgcagacugaagacacccgcucagauguccauucagcucaucaacaaggccgugaaugcacugauaaacgaucaacuuauuaugaaaaaucaccugagggacaucaugugcaucccauauugcaacuacagcaaguauugguacuugaaucacaccgucacuggcaaaacaucgcucccccgguguuggcuggugucuaacggguccuacuuaaaugaaacccauuucucagacgauauugagcagcaggcugacaacaugaucacggagcugcuacaaaaggaauauauugaucgccagggaaaaaccccucucggucugguggaccuuuuugucuucaguacuagcuuuuacuugauauccaucuuccugcaccucguuaagauuccaacacaucgacacauccugggcaaacccugcccuaagccacauagacuuaaucacauggggaucuguucuugcggacuguauaagcacccgggcgugcccguaaaauggaagagguga

SEQ ID NO: 4931 - RNA, 1473 nt, Artificial Sequence
  derived and/or modified protein sequence (opt3) from LASV(Lassa virus/H.sapiens-wt/NGA/2016/ISTH_1462;Clade II)__AVO03587__GPCstabilized
augggccagaucauuaccuucuuucaagaggugccccacgucauagaagagguuaugaacaucgugcugauugcccucagccuucuggcuaucuugaaggggauuuacaauguagcaacaugcggauuauucggucugguguccuuucuacuccuguguggcagaucuugcucaacuacguauaaaggggucuacgaacuucagacccuggaguuggacauggccagucucaacaugacaaugccucugagcuguacuaagaauaacucccaucacuauaucauggugggaaaugaaaccggccuggagcucacauuaaccaacacuucuauaaucaaucauaaauucugcaaccugucggaugcgcacaagaaaaaucuuuacgaccaugcuuugaugucaauuaucagcacauuucaccugaguauuccaaacuucaaucaguaugaggccauguccugugauuuuaacggugggaagaucucuguucaguacaaucuaagccacaccuaugcaguggacgccgcuaaccauugcggaacgauagcaaauggcguccuccaaacuuucaugaggauggccuggggcggguccuacauugcucuggauucaggaugcgguaguugggacuguaucaugaccagcuaccaguaucuuauuauccagaacacaacuugggaagaucacugccaguuuucucggccgucccccaucggcuaccugggguugcucucacaacgcacccgagacauuuauauaagccguagacgccggggaacauucaccuggacgcugagugauucugagggcaacgaaacuccugguggguacugucucacaagguggaugcuuaucgaggccgagcugaaaugcuuuggaaauaccgcgguggcaaaguguaacgaaaaacaugacgaggaguucugcgauauguugcggcuauuugacuucaauaagcaggccauucgcagacugaaaacucccgcucagauguccauccagcucauaaacaaggccguaaaugcacugauuaacgaucaacuuaucaugaagaaucaccugagggacaucaugugcauuccauauugcaacuacagcaaauauugguacuugaaucacacaguuaccggccggacgucgcucccccgcuguuggcuggugucuaacggguccuacuuaaaugaaacccauuucucagacgauaucgagcagcaggcugacaacaugauuacagagcugcuacaaaaggaauauauagagcgacagggaaaaacuccucucggucuggucgaucuuuuuguguucaguaccagcuuuuacuugaucuccauuuuccugcaccucaucaagaucccaacacauagacacgugauuggcaaacccugcccuaagccacauaggcugaaucacauggggauauguucuugcggacuuuauaaacacccgggcguccccguuaaguggaagcgguga

SEQ ID NO: 4932 - RNA, 1473 nt, Artificial Sequence
  derived and/or modified protein sequence (opt3) from LASV(Lassa virus/H.sapiens-wt/NGA/2016/ISTH_1472;Clade II)__AVO03605__GPCstabilized
augggccagaucauuaccuucuuucaagaggugccccacgucauagaagagguuaugaacaucgugcugauugcccucagccuucuggcuaucuugaaggggauuuacaauguagcaacaugcggauuauucggucugguguccuuucuacuccuguguggcagaucuugcucaacuacguauaaaggggucuacgaacuucagacccuggaguuggacauggccagucucaacaugacaaugccucugagcuguacuaagaauaacucccaucacuauaucauggugggaaaugaaaccggccuggagcucacauuaaccaacacuucuauaaucaaucauaaauucugcaaccugucggaugcgcacaagaaaaaucuuuacgaccaugcuuugaugucaauuaucagcacauuucaccugaguauuccaaacuucaaucaguaugaggccauguccugugauuuuaacggugggaagaucucuguucaguacaaucuaagccacaccuaugcaguggacgccgcuaaccauugcggaacgauagcaaauggcguccuccaaacuuucaugaggauggccuggggcggguccuacauugcucuggauucaggaugcgguaguugggacuguaucaugaccagcuaccaguaucuuauuauccagaacacaacuugggaagaucacugccaguuuucucggccgucccccaucggcuaccugggguugcucucacaacgcacccgagacauuuauauaagccguagacgccggggaacauucaccuggacgcugagugauucugagggcaacgaaacuccugguggguacugucucacaagguggaugcuuaucgaggccgagcugaaaugcuuuggaaauaccgcgguggcaaaguguaacgaaaaacaugacgaggaguucugcgauauguugcggcuauuugacuucaauaagcaggccauucgcagacugaaaacucccgcucagauguccauccagcucauaaacaaggccguaaaugcacugauuaacgaucaacuuaucaugaagaaucaccugagggacaucaugugcauuccauauugcaacuacagcaaauauugguacuugaaucacacaguuaccggccggacgucgcucccccgcuguuggcuggugucuaacggguccuacuuaaaugaaacccauuucucagacgauaucgagcagcaggcugacaacaugauuacagagcugcuacaaaaggaauauauagaucgacagggaaaaacuccucucggucuggucgaccuuuuuguguucaguaccagcuuuuacuugaucuccauuuuccugcaccucaucaagaucccaacacauagacacgugauuggcaaacccugcccuaagccacauaggcugaaucacauggggauauguucuugcggacuuuauaaacacccgggcguccccguuaaguggaagcgguga

SEQ ID NO: 4933 - RNA, 1473 nt, Artificial Sequence
  derived and/or modified protein sequence (opt3) from LASV(Lassa virus/H.sapiens-wt/NGA/2016/ISTH_1474;Clade II)__AVO03613__GPCstabilized
augggccagaucauuaccuucuuucaagaggugccccacgucauagaagagguuaugaacaucgugcugauugcccucagccuucuggcuaucuugaaggggauuuacaauguagcaacaugcggauuauucggucugguguccuuucuacuccuguguggcagaucuugcucaacuacguauaaaggggucuacgaacuucagacccuggaguuggacauggccagucucaacaugacaaugccucugagcuguacuaagaauaacucccaucacuauaucauggugggaaaugaaaccggccuggagcucacauuaaccaacacuucuauaauccaucacaaauucugcaaucugucggaugcgcauaagaaaaaccuuuacgaccacgcuuugaugucaauuaucagcacauuucaccugaguauuccaaauuucaaccaguaugaggccauguccugugauuuuaauggugggaagaucucuguucaguacaaccuaagccauaccuaugcaguggacgccgcuaaucacugcggaacgauagcaaacggcguccuccaaacuuucaugaggauggccuggggcggguccuacauugcucuggauucaggaugcgguaguugggacuguaucaugaccagcuaccaguaucuuauuauccagaauacaacuugggaagaucauugccaguuuucucggccgucccccaucggcuaccugggguugcucucacaacgcacccgagacauuuauauaagccguagacgccggggaacauucaccuggacgcugagugauucugagggcaacgaaacuccugguggguacugucucacaagguggaugcuuaucgaggccgagcugaaaugcuuuggaaacaccgcgguggcaaaguguaaugaaaaacacgacgaggaguucugcgauauguugcggcuauuugacuucaacaagcaggccauucgcagacugaaaacucccgcucagauguccauccagcucauaaauaaggccguaaacgcacugauuaaugaucaacuuaucaugaagaaccaccugagggacaucaugugcauuccauauugcaauuacagcaaauauugguacuugaaccauacaguuaccggccggacgucgcucccccgcuguuggcuggugucuaauggguccuacuuaaacgaaacccacuucucagacgauaucgagcagcaggcugacaauaugauuacagagcugcuacaaaaggaauauauagaucgacagggaaaaacuccucucggucuggucgaccuuuuuguguucaguaccagcuuuuacuugaucuccauuuuccugcaucucaucaagaucccaacacacagacaugugauuggcaaacccugcccuaagccacacaggcugaaccacauggggauauguucuugcggacuuuauaaacauccgggcguccccguuaaguggaagcgguga

SEQ ID NO: 4934 - RNA, 1476 nt, Artificial Sequence
  derived and/or modified protein sequence (opt3) from LASV(Lassa virus/H.sapiens-wt/NGA/2016/ISTH_1496;Clade II)__AVO03579__GPCstabilized
augggccagaucauuaccuucuuucaagaggugccccacgucauagaagagguuaugaacaucgugcugauugcccucagccuucuggcuaucuugaaggggguauacaauguggcaacaugcggauuauucggucuggucuccuuucuacuccuguguggcagaucuugcucaacuacgauuuauaaagggguguacgaacuucagacccuggaguuggacauggccagucucaacaugacaaugccucugagcuguacuaagaauaacucccaucacuauaucaugguuggaaaugaaaccggccuggagcucacauuaaccaacacuucuauaaucaaucauaaauucugcaaccugucggaugcgcacaagaaaaaucuuuacgaccaugcuuugaugucaauuaucagcacauuucaccugaguauuccaaacuucaaucaguaugaggccauguccugugauuuuaacggugggaagaucucugugcaguacaaucuaagccacgcauaugccgucgacgcugcaaaccauugcggaaccauagccaauggcgugcuccaaacguucaugaggauggcuuggggcggguccuacauugcccuggauucaggaugccggaguugggacuguaucaugacuagcuaccaguaucuuauuauccagaacaccacaugggaagaucacugccaguuuucucgcccgucccccaucgguuaccugggcuugcucucacaacgaacucgugacauuuauauaagcagaaggcgccgggggaccuucacauggacccugagugauucugagggaaacgaaacgccuggcgguuacugucucacucgguggaugcuuaucgaggcggagcugaaaugcuuugggaauacagcaguagccaaguguaacgaaaaacaugacgaggaguucugcgauauguugcgccuauuugacuucaauaagcaggcuauuagaaggcugaaaacccccgcccagauguccauccagcucauaaacaaggcaguuaaugcucugauuaacgaucaacuuaucaugaagaaucaucugcgggacaucaugugcauuccauauugcaacuacagcaaauauugguacuugaaucacacugugacaggaaagaccucgcucccccgcuguuggcuggucucuaacggcuccuacuuaaaugaaacgcacuucucagacgauaucgagcagcaggccgacaacaugauuaccgagcugcuacaaaaagaauauauagaucgacaggggaagacaccucucggacugguggaccuuuuuguguucaguacuagcuuuuacuugaucuccauuuuccugcaccucgucaaaaucccaacccauagacacguuaucgguaagcccugcccuaaaccacauaggcugaaucacaugggcauuuguucuugcgggcuuuauaagcacccgggagugcccguaaaguggaaacgguga

SEQ ID NO: 4935 - RNA, 1473 nt, Artificial Sequence
  derived and/or modified protein sequence (opt3) from LASV(Lassa virus/H.sapiens-wt/NGA/2016/ISTH_1541;Clade II)__AVO03553__GPCstabilized
augggccagaucgugaccuucuuucaagaggucccccacguuauugaagagauaaugaacaucgugcugauuacacucagccuucuggccguauugaaggggaucuacaauuucgcuacuugcggauuaauuggucugaucacguuucuauuccucuguggcagauccugcucuaccauauauaaagggaacuaccagcugcagacacuugaacugaauauggagacuuugaacaugaccaugccucucucauguacaaagaauaacagucaucacuauaucagggugggaaaugaaaccggccuggagcugacucucacaaacgucagcauuaucaaucaucgguuuugcaacuuauccgacgcacacaaacgcaaucuguacgaucauacccuuaugucuauuaucucgacguuccacuugucaauaccaaacuuuaaucaguaugaggccaugagcugugacuucaacggugggaagauuagugugcaauacaaucugucccacggauaugcgguugaugcugccaaacauugcggcacuguggcaaacggcguccuacagaccuuuaugcgaauggccuggggagggucuuacaucgcucucgacagcgguugcggcaacugggauuguauuaugacauccuaccaguaucugaucauccagaauacuaccugggaagaccacugccaauucucacguccgagucccauuggguaccuuggacuguugagccagagaacaagggauauauauaucucucggcgccgccggggcaccuuuacguggacuuuauccgacucagaggguagagaaacaccugggggauacugucugaccagguggaugcucauugaggcagagcuuaagugcuucggcaacacugccguggcuaaauguaaugaaaagcaugaugaggaauuuugcgacaugcugcgguuguucgauuucaacaaacaggccauccagcgccuaaagacacccgcgcaaaugagcauacagcugauuaauaaagcaguaaacgcccucaucaaugaccagcugaucaugaagaaccaccuucgagauauuaugugcaucccauauugcaauuacaguaaguauugguaccugaaccacaccacgaccgggaaaacaucuuugcccaaguguuggcucguuacuaauggauccuaccugaacgaaacccauuuuagcgacgacauugagcaacaggcugauaauaugauaacagagauguuacagaaagaauauaucgacagacaggguaagacuccucugggccuaguggaucucuucgucuuuucgaccucuuucuaccugauuuccaucuuucuucacuugaucaaaauuccaaaccauaggcacauaguggggaagcccugcccuaaaccacaucggcugaaucacaugggaaucuguucaugcggcuucuauaagcaaccgggugugcccguccguuggaagcgcuga

SEQ ID NO: 4936 - RNA, 1473 nt, Artificial Sequence
  derived and/or modified protein sequence (opt3) from LASV(Lassa virus/H.sapiens-wt/NGA/2016/ISTH_1546;Clade II)__AVO03537__GPCstabilized
augggccagaucgugaccuucuuucaagagauuccccacgucguugaagagauaaugaacaucgugcugauuacacucagccuucuggccaucuugaagggguuauacaauuucgcuacuugcggacugauuggucuaaucacguuucucuuccuguguggcagauccugcucuaccauauauaaagggucauaccagcuucaggcacuggaauugaacauggagacacucaauaugacuaugccucugaguuguaccaagaacaauagccaucacuauaucaggguaggaaacgaaacaggccuggagcucaccuuaacuaauacauccauuaucaaccauaaauuuugcaaucugucugacgcccacaagaaaaaccuuuacgaucauaccuugaugucgauuaucucaacguuccaccugagcauaccaaauuuuaaccaguaugaggcgaugaguugugacuucaauggugggaagauuuccgugcaauacaaccuaucucacagcuaugcuggagaugccgcacggcauugcggcacugucgccaauggcgugcuccagaccuuuaugcgcauggcuuggggaggguccuacaucgcacuggacucagguugcggcaacugggauuguauuaugacaaguuaccaguaucuuaucauccagaacacuaccugggaagaccacugccaauucagccgaccgucucccauuggguaccugggauugcucucccagcguacaagagauauauauaucucaaggcggcgccggggcaccuuuacguggacucugagcgacagugaggguaaagaaacaccugggggauacugucucacccgcuggaugcuuauugaggccgagcugaagugcuucggcaauacugcuguugccaaauguaacgaaaagcaugaugaggaauuuugcgacauguugagacuauucgauuucaauaaacaggcgauccagaggcugaagacacccgcacaaaugucuauacagcucauuaacaaggccgugaaugcucugaucaacgaccagcuuaucaugaaaaaucaucugcgggauauuaugugcaucccauauugcaacuacuccaaguauugguacuugaaucacaccacgaccgggaaaacaagccucccccgcuguuggcuggucucgaacggaucuuacuuaaaugaaacucacuuuuccgacgacauugagcaacaggccgauaacaugauaaccgagaugcugcagaaggaauauaucgaccgacaggguaaaacaccucuaggccucguggaucuguucguauuuucaaccaguuucuaccuuauuagcaucuuuuugcaccugaucaagauuccaacucauagacacauaguugggaaauccugccccaagccucauaggcucaaucacaugggaaucuguucuugcggccuguauaagcaaccaggugugccggucaaauggaagcgguga

SEQ ID NO: 4937 - RNA, 1473 nt, Artificial Sequence
  derived and/or modified protein sequence (opt3) from LASV(Lassa virus/H.sapiens-wt/NGA/2016/ISTH_1591;Clade II)__AVO03647__GPCstabilized
augggccagaucauuaccuucuuucaagaggugccccacgucauagaagagguuaugaacaucgugcugauugcccucagccuucuggcuaucuugaaggggauuuacaauguagcaacaugcggauuauucggucugguguccuuucuacuccuguguggcagaucuugcucaacuacguauaaaggggucuacgaacuucagacccuggaguuggacauggccagucucaacaugacaaugccucugagcuguacuaagaauaacucccaucacuauaucauggugggaaaugaaaccggccuggagcucacauuaaccaacacuucuauaauccagcauaaauucugcaaucugucggaugcgcacaagaaaaaccuuuacgaccaugcuuugaugucaauuguuagcacauuucaccugaguaucccaaauuucaaccaguaugaggccauguccugugauuuuaauggugggaagauuaccgugcaauacaaccuaucucacagcuaugcaaucgacgccgcuaaucauugcggaacggucgcaaacggcgugcuccagacuuucaugaggauggccuggggcggguccuacauagcucuggauucaggaugcgguaguugggacuguauuaugaccagcuaccaguaucuuaucauucagaauacaacuugggaagaucacugccaauuuucucgcccgucccccaucggcuaccugggguugcucucacagcgaacccgugacaucuauauuagcagaaggcgccggggaacauucaccuggacgcugagugauucugagggcaacgaaacuccugguggguacugucucacacgguggaugcuuauagaggccgagcugaagugcuuuggaaacaccgcgguagcaaaauguaaugaaaagcaugacgaggaguucugcgauauguugcgccuauuugacuucaacaaacaggccaucagaaggcugaaggcucccgcccagauguccauucaacucaucaauaaagcaguuaacgcucugauaaaugaucagcuuauuaugaagaaccaucugcgggacaucaugugcaucccauauugcaauuacagcaaguauugguacuugaaccacacugugacaggccgcaccucgcucccccgauguuggcuggucucuaauggguccuacuuaaacgaaacgcacuucucagacgauauugagcagcaagccgacaauaugaucaccgagcugcuacagaaagaauauauggauagacagggaaagacaccucucggucugguggaccuuuuuguguucaguacuagcuuuuacuugauuuccauauuccugcaccucgucaaaaucccaacccauaggcacauuaucggcaagcccugcccuaaaccacaucggcugaaccacauggggguuuguucuugcggacuuuauaagcacccgggcgugcccguaaaauggaagcguuga

SEQ ID NO: 4938 - RNA, 1473 nt, Artificial Sequence
  derived and/or modified protein sequence (opt3) from LASV(Lassa virus/H.sapiens-wt/NGA/2016/ISTH_1604;Clade II)__AVO03541__GPCstabilized
augggccagaucgugaccuucuuucaagaggucccccacguuauugaagagauaaugaacaucgugcugauuacacucagccuucuggccaucuugaaggggguauacaauuuagcuacuugcggacugauuggucuaaucacguuccucuuucuguguggcagauccugcucuaugaccuauaaagggucauaccagcuugaaacacuggaguugaacauggaaacucucaauaugaccaugccucugaguuguacaaagaacaccagccaucacuauauaagggugggaaaugagacuggccuggagcucacauuaaccaacacguccaucauuaaucauaaauucugcaaccugucugacgcacacaagaaaaaucuuuacgaucauucguugaugucaaucgucagcacuuuucaccugaguauuccaaacuucaaucaguaugaagccauguccugugacuuuaacggugggaagaucucuauacaguacaaucuaagccacgcguaugcuggagaugccgcaaagcauugcggcacccucgccaacggcgugcugcaaacauucaugcggauggcuuggggaggguccuacauugcacuugacucagguugcggcaauugggauuguaucaugaccaguuaccaguaucugauuauccagaacacuacaugggaggaccacugccaguuuagccgaccgucucccaucggguacuugggacuccugucccaacguaccagagaaauuuauauaucaaggcggcgccggggcacguucacuuggacacucagcgauagugaggguaacgaggccccugggggauacugucuuacccgcuggaugcugaucgaagcugaguugaaaugcuuuggcaaugccgcgguugcaaaguguaacgaaaaacaugacgaggaguucugcgauaugcuaagacuguuugacuucaauaagcaggccauucagaggcucaaaacucccgcucagaugucuauccaacugauaaacaaggccgugaaugcacuuauuaacgaucagcugaucaugaagaaucacuugcgggacaucaugugcauuccauauugcaacuacuccaaauauugguaccucaaucacacaaccacggggcgcaccagccugccccgauguugguuagucucgaacggaucuuaccugaaugagacacauuucuccgaugacaucgaacagcaagcugacaacaugauuacugagaugcuacagaaggaauauauagauagacaggguaaaaccccucucggccugguggaccuuuuuguauucucaacaaguuuuuacuugaucagcauuuuccugcaccucguuaagaucccaacucauaggcacaucguggggaaauccugccccaagccucaucggcugaaucacaugggaauuuguucuugcggccuuuauaaacagccaggugucccggugcguuggaagcgcuga

SEQ ID NO: 4939 - RNA, 1473 nt, Artificial Sequence
  derived and/or modified protein sequence (opt3) from LASV(Lassa virus/H.sapiens-wt/NGA/2016/ISTH_1609;Clade II)__AVO03661__GPCstabilized
augggccagaucgugaccuucuuucaagagauuccccacgucauagaagagguuaugaacaucgugcugauuacacucagccuucuggccguauugaaggggaucuacaauuucgcuacuugcggauuaauuggucugaucacguuucuauuccucuguggcagauccugcucuaccauauauaaagggucauaccagcugcagaagcuggaacugaacauggagacauugaauaugacuaugccucucaguuguaccaaaaacagcucccaucacuauaucagggugggaaaugaaacaggccuggagcugacccucacuaacacaucuauuaucucgcauaaguuuugcaauuuaucagacgcacacaaaaagaaccuguacgaucaugcccuuaugagcauuaucaguaccuuccacuuguccauaccaaauuuuaaccaguaugaggcgaugucuugugacuucaauggugggaagauuagcguccaauacaaccugucccacucauaugcuggagaugccgcacggcauugcggcacgcuagccaauggcgugcuccagacuuuuaugcgcauggcuuggggagggaguuacaucgcacuggacagcgguugcggcaacugggauuguauuaugaccucuuaccaguuccuuaucauccagaauacaacuugggaagaccacugccaauuuucccgaccgucacccaugggguaucugggauugcucagccagcguaccagagauauuuacauaaguaggcggcgccggggcacauucaccuggacgcugucugacuccgaggguaaggaaacuccugggggauauugucucacacgcuggaugcuuaucgaggccgagcugaaaugcuuuggcaacaccgcuguugccaaguguaacgaaaaacaugaugaggaguucugcgacauguugagacuauucgauuuuaauaagcaggcgauucagaggcugaagacucccgcacaaaugagcauccagcucauaaacaaagccgugaaugcucugauuaacgaccagcuuaucaugaagaaucaccuucgggauaucaugugcauuccauacugcaacuauucgcaauacugguauuugaaucacacaaucaccgggaaaacgucucuccccaaguguuggcuggucuccaacggaucauacuuaaaugaaacccauuucagugacgacauugagcagcaggccgauaacaugauaacagagaugcugcagaaagaauacaucgaccgccaagguaagacuccucuaggccucguggaucuguuuguauucagcaccuccuuuuaucuuauuucuaucuucuugcaccugaucaaaauuccaacacaucgacacauaguuggaaagagcugccccaagccucauagacucaauaggauggggaucuguucaugcggccuguacaaacagccaggugugccggucaaguggaaacgguga

SEQ ID NO: 4940 - RNA, 1473 nt, Artificial Sequence
  derived and/or modified protein sequence (opt3) from LASV(Lassa virus/H.sapiens-wt/NGA/2016/ISTH_1610;Clade II)__AVO03603__GPCstabilized
augggccagaucauuaccuucuuucaagaggugccccacgucauagaagagguuaugaacaucgugcugauugcccucagccuucuggcuaucuugaaggggauuuacaauguagcaacaugcggauuauucggucugguguccuuucuauuccucuguggcagaucuugcucaacuacguauaaaggggucuacgaacugcagacccuugagcuggacauggccaguuugaacaugacaaugccucucagcuguacuaagaauaacucccaucacuauaucauggugggaaaugaaaccggccuggagcugacacucaccaacacuucuauaaucaaucauaaauuuugcaacuuaucggaugcgcacaagaaaaaucuguacgaccaugcucuuaugucaauuaucagcacauuccacuugaguauuccaaacuuuaaucaguaugaggccauguccugugauuucaacggugggaagaucucuguucaguacaaucugagccacaccuaugcaauagacgccgcuaaccauugcggaacgauugcaaauggcgugcuacaaacuuuuaugaggauggccuggggcggguccuacaucgcucucgauucaggaugcgguaguugggacuguauuaugaccagcuaccaguaucugaucauccagaacacaacuugggaagaucacugccaguucucucgcccgucccccauuggcuaccuugggcuguugucacaacgaacccgugacauauauaucagcagaaggcgccggggaacauuuaccuggacguuaagugauucugagggcaacgaaacuccugguggguacugucugacacgguggaugcucauugaggccgagcuuaagugcuucggaaauaccgcggucgcaaaauguaacgaaaagcaugacgaggaauuuugcgauaugcugcgcuuguucgacuucaauaaacaggccaucagaaggcuaaaggcucccgcccagaugaacauacagcugauuaauaaagcagugaacgcucucaucaaugaucaacugaucaugaagaaccaccuucgggacauuaugugcaucccauauugcaauuacuccaaguauugguaccugaaccacacuguaacaggccgcaccagcuugccccgauguuggcucguuucgaaugggucuuaccugaacgaaacgcauuuuuccgacgauauugagcagcaggccgacaauaugauaaccgaguuacugcaaaaagaauauauggauagacagggaaagacaccucuaggucucguggaccuguucgucuuuucaaccaguuucuaccuuaucagcaucuuuuugcaccugauuaaaaucccaacucauaggcacauugugggcaagcccugcccuaaaccacaucggcucaaccacauggggauauguuccugcggacuguauaagcacccgggcgugcccgucaaauggaagcguuga

SEQ ID NO: 4941 - RNA, 1473 nt, Artificial Sequence
  derived and/or modified protein sequence (opt3) from LASV(Lassa virus/H.sapiens-wt/NGA/2018/ISTH_0959;Clade II)__AVV65099__GPCstabilized
augggccagaucauuaccuucuuucaagaggugccccacgucauagaagagguuaugaacaucgugcugauugcccucagccuucuggcuaucuugaaggggauuuacaauguagugacaugcggauuauucggucuggucuccuuucuacuccuguguggcagaucuugcucaacuacguauaaagggguguacgaacuucagacccuggaguuggacauggcaagucucaacaugacaaugccucugagcuguacuaagaauaacucccaucacuauaucaugguuggaaaugaaaccggccuggagcucacauuaaccaacacuucuauaaucaaucauaaauucugcaaccugucggaugcccacaagaaaaaucuuuacgaccaugcguugaugucaauuaucagcacauuucaccugaguauuccaaacuucaaucaguaugaggcuauguccugugauuuuaacggugggaagaucucugugcaguacaaucuaagccacgccuaugcaauagacgccgcuaaccauugcggaaccauugcaaauggcguccuccaaacguucaugaggauggccuggggcggguccuacaucgcucuggauucaggaugcgguaguugggacuguauuaugacuagcuaccaguaucuuaucauccagaacaccacaugggaagaucacugccaguuuucucggccgucccccauuggcuaccugggguugcucucacaacgcacucgagacauauauaucagccguagacgccggggaaccuucacauggacccugagugauucugagggcaacgaaacgccugguggguacugucucacuagguggaugcuuauugaggccgagcugaaaugcuuuggaaauacagcgguggcaaaguguaacgaaaaacaugacgaggaguucugcgauauguugcggcuauuugacuucaauaagcaggccauccgcagacugaaaacccccgcucagauguccauacagcucauuaacaaggccguaaaugcacugaucaacgaucaacuuaucaugaagaaucaccugagggacauuaugugcaucccauauugcaacuacagcaaauauugguacuugaaucacacuguuacaggcaagaccucgcucccccgguguuggcuggugucuaacggguccuacuuaaaugaaacgcauuucucagacgauauugagcagcaggcugacaacaugauaaccgagcugcuacaaaaagaauauaucgaucgccagggaaagacaccucucggucuggucgaccuuuuuguguucaguacuagcuuuuacuugauuuccaucuuccugcaccucgugaaaaucccaacccaucgacacgucauuggcaagcccugcccuaaaccacauagacugaaucacauggggauauguucuugcggacuuuauaagcacccgggcguucccgugaaguggaaaagguga

SEQ ID NO: 4942 - RNA, 1473 nt, Artificial Sequence
  derived and/or modified protein sequence (opt3) from LASV(Lassa virus/H.sapiens-wt/NGA/2018/ISTH_1024;Clade II)__AVV65105__GPCstabilized
augggccagaucauuaccuucuuucaagaggugccccacgucauagaagagguuaugaacaucgugcugauugcccucagccuucuggcuaucuugaaggggguauacaauguggcaacaugcggauuauucggucuggucuccuuucuacuccuguguggcagaucuugcucaacuacguauaaagggguguacgaacuucagacccuggaguuggacauggccaaccucaauaugacaaugccucugaguuguacuaagaacaauagccaucacuauauuaggguuggaaacgaaaccggccuggagcucacauuaaccaauacuuccaucauaaaccauaaauucugcaaucugucugaugcgcacaagaacaaucuuuacgaccaugcuuugaugucgaucauuucaacauuucaccugagcaucccaaacuucaaucaguaugaggccaugaguugugauuuuaacggugggaaaauuuccgugcaguacaaucuaucucacgcauaugccgucgacgcugcaaaccauugcggaaccaucgccaacggcgugcuccaaacguucaugcggauggcuuggggcgggagcuacauagcccuggauuccggaugcgguucaugggacuguauuaugaccaguuaccaguaucuuaucauucagaauacuacaugggaagaucacugccaguuuagccgaccgucucccaucggcuaccugggguugcucucccaacguacuagagacaucuauauuucaaggcggcgccggggaaccuucacauggacccugagcgauagugagggcaacgaaacgccugguggguacugucucacucgcuggaugcuuauagaggcggagcugaagugcuuuggaaauacagcaguagccaaguguaacgaaaaacaugacgaggaguucugcgauauguugagacuauuugacuucaauaagcaggcuaucaggcggcugaaaacccccgcccagaugucuauucagcucaucaacaaggcaguuaaugcucugauaaacgaucaacuuauuaugaaaaaucaucugcgcgacaucaugugcaucccauauugcaacuacuccaaguauugguacuugaaucacacugugacaggcaagaccagccucccccgauguuggcuggucucgaacgggacguacuuaaaugaaacccacuucucugacgauauugagcagcaggccgacaacaugaucacagagcugcuacaaaaagaauauauggauagacagggaaagacuccucucggucugguggaccuuuuuguguucuccaccucauuuuacuugauuaguauauuccugcaccucgucaaaaucccaacacauaggcacguuauuggcaagcccugcccuaaaccacaucggcugaaucacauggggaucuguagcugcggacuuuauaagcacccgggcgugcccguaaaauggaagcguuga

SEQ ID NO: 4943 - RNA, 1473 nt, Artificial Sequence
  derived and/or modified protein sequence (opt3) from LASV(Lassa virus/H.sapiens-wt/NGA/2018/ISTH_1079;Clade II)__AVV65107__GPCstabilized
augggccagaucauuaccuucuuucaagaggugccccacgucauagaagagguuaugaacaucgugcugauugcccucagccuucuggcuaucuugaaggggauuuacaauguagcaacaugcggauuauucggucugguggccuuucuacuccuguguggcagauccugcucuacuacguauaaaggggucuacgaacuucagacccuggaguuggacauggcgucacucaacaugacaaugccucugaguuguacuaagaauaacagccaucacuauaucauggugggaaaugaaaccggccuggagcucacauuaaccaacacuuccauaaucaaucauaaauucugcaaccugucugaugcucacaagaaaaaucuuuacgaccaugccuugaugucgauuaucucaacauuucaccugagcauuccaaacuucaaucaguaugaggcaaugaguugugauuuuaacggugggaagaucuccguucaguacaaucuaucucacaccuaugccguggacgcugcaaaccauugcggaacgauagccaauggcguccuccaaacuuucaugaggauggcuuggggcgggagcuacauugcccuggauuccggaugcgguucaugggacuguaucaugaccaguuaccaguaucuuauuauccagaacacaacuugggaagaucacugccaguuuagccggccgucucccaucggcuaccugggguugcucucccaacgcacccgagacauuuauauaucacguagacgccggggaacauucaccuggacgcugagcgauagugagggcaacgaaacuccugguggguacugucucacaagguggaugcuuaucgaggcggagcugaaaugcuuuggaaauaccgcaguggccaaguguaacgaaaaacaugacgaggaguucugcgauauguugcggcuauuugacuucaauaagcaggcuauucgcagacugaaaacucccgcccagaugucuauccagcucauaaacaaggcaguaaaugcucugauuaacgaucaacuuaucaugaagaaucaccugagggacaucaugugcauuccauauugcaacuacuccaaauauugguacuugaaucacacaguuaccggccggacgagccucccccgcuguuggcuggugucgaacgggucuuacuuaaaugaaacccauuucuccgacgauaucgagcagcaggccgacaacaugauuacagagcugcuacaaaaggaauauauggaucgacagggaaaaacuccucucggucuggucgaccuuuuuguguucucaaccaguuuuuacuugauaagcaucuuccugcaccucauuaagaucccaacacauagacacgugaucggcaaacccugcccuaagccacauaggcugaaucacauggggauuuguuccugcggacuuuauaaacacccgggcguccccguuaaguggaagcgguga

SEQ ID NO: 4944 - RNA, 1473 nt, Artificial Sequence
  derived and/or modified protein sequence (opt3) from LASV(Lassa virus/H.sapiens-wt/NGA/2018/ISTH_1177;Clade II)__AVV65101__GPCstabilized
augggccagaucauuaccuucuuucaagaggugccccacgucauagaagagguuaugaacaucgugcugauugcccucagccuucuggcuaucuugaaggggauuuacaauguagcaacaugcggauuauucggucugguguccuuucuacuccuguguggcagaucuugcucaacuacguauaaaggggucuacgaacuucagacccuggaguuggacauggccagucucaacaugacaaugccucugagcuguacuaagaauaacucccaucacuauaucagggugggaaaugaaaccggccuggagcucacauuaaccaacacuucuauaaucgaucauaaauucugcaaucugucggacgcgcacaagaaaaaccuuuacgaucaugcuuugaugucaauuaucagcacauuucaccugaguauuccaaauuucaaccaguaugaggccauguccugugacuuuaauggugggaagaucucuguucaguacaaccuaagccacaccuaugcaguggaugccgcuaaucauugcggaacgauagcaaacggcguccuccaaacuuucaugcggauggccuggggcggguccuacauugcucuggacucaggaugcgguaguugggauuguaucaugaccagcuaccaguaucuuauuauccagaauacaacuugggaagaccacugccaguuuucucgcccgucccccaucggcuaccugggguugcucucacaacgaacccgugauauuuauauaagcagaaggcgccggggaacauucaccuggacgcugagugacucugagggcaacgaaacuccugguggguacugucucacacgguggaugcuuaucgaggccgagcugaaaugcuuuggaaacaccgcgguggcaaaguguaaugaaaaacaugaugaggaguucugcgacauguugcgccuauuugauuucaacaagcaggccauuagaaggcugaaaacucccgcucagauguccauccagcucauaaauaaggccguaaacgcacugauuaaugaccaacuuaucaugaagaaccaucugcgggacaucaugugcauuccauauugcaauuacagcaaauauugguacuugaaccacacaaucaccggccgcacgucgcucccccgauguuggcugguuucuaauggguccuacuuaaacgaaacccacuucucagaugacauugagcagcaggcugauaauaugauaacagagcugcuacaaaaggaauauauggacagacagggaaaaacuccucucggucugguggaucuuuuugucuucaguaccagcuuuuacuugaucuccauuuuccugcaccucgugaagaucccaacacauaggcacgugaucggcaaacccugcccuaagccacaucggcugaaccacauggggauuuguucuugcggacuuuauaaacacccgggcguccccguuaaguggaagcguuga

SEQ ID NO: 4945 - RNA, 1473 nt, Artificial Sequence
  derived and/or modified protein sequence (opt3) from LASV(Lassa virus/H.sapiens-wt/NGA/2018/ISTH_1375;Clade II)__AVV65115__GPCstabilized
augggccagaucauuaccuucuuucaagaggugccccacgucauagaagagguuaugaacaucgugcugauugcccucagccuucuggcuaucuugaaggggauuuacaauaucgcaacaugcggauuauucggucugguauccuuucuacuccuguguggcagaucuugcucaacuacguauaaagggguguacgaacuucagacccuggaguuggacauggccagucucaacaugacaaugccucugagcuguacuaagaauaacucccaucacuauauaauggucggaaaugaaaccggccuggagcucacauuaaccaacacuucuaucauuaaucauagguucugcaaccugucggaugcgcacaaaaagaaucuuuacgaccaugcuuugaugucaaucauuagcacauuucaccugaguaucccaaacuucaaucaguaugaggccauguccugugauuuuaacggugggaaaauaucugugcaguacaaucuaagccacgcauaugccguugacgcugcaaaccauugcggaaccauugccaauggcgugcuccaaacguucaugcggauggcuuggggcggguccuacaucgcccuggauucaggaugcgguaguugggacuguauuaugacuagcuaccaguaucuuaucauccagaacaccacaugggaagaucacugccaguuuucucgcccgucccccauuggcuaccugggguugcucucacaacgaacucgugacauauauaucagcagaaggcgccggggaaccuucacauggacccugagugauucugagggcaacgaaacgccugguggguacugucucacucgguggaugcuuauugaggcggagcugaagugcuuuggaaauacagcagucgccaaauguaacgaaaagcaugacgaggaguucugcgauauguugcgccuauuugacuucaauaaacaggcuaucagaaggcugaagacccccgcccagauguccauacagcucauuaacaaagcagugaaugcucugaucaacgaucaacuuaucaugaagaaucaucugcgggacauuaugugcaucccauauugcaacuacagcaaguauugguacuugaaucacacuguaacaggcaaaaccucgcucccccgcuguuggcugguuucuaacggguccuacuuaaaugaaacgcacuucucagacgauauugagcagcaggccgacaacaugauaaccgagcugcuacaaaaggaauauaucgaucgacagggaaaaacaccucucggucugguggaccuuuuugucuucaguacuagcuuuuacuugauuuccaucuuccugcaccucgugaagaucccaacccauagacacgugauuggcaaacccugcccuaagccacauaggcugaaucacauggggauauguucuugcggacuuuauaaacacccgggcguccccguuaaguggaagcgguga

SEQ ID NO: 4946 - RNA, 1473 nt, Artificial Sequence
  derived and/or modified protein sequence (opt3) from LASV(Lassa virus/H.sapiens-wt/NGA/2018/ISTH_1381;Clade II)__AVV65111__GPCstabilized
augggccagaucgugaccuucuuucaagaggucccccacguuauugaagaggugaugaacauaguacugaucgcccucagccuucuggcuauuuugaaggggaucuacaauguggcaacaugcggauuauucggucuggucuccuuucuacuccuguguggcagaucuugcucaacuacguauaaagggguguacgaacuucagacccuggaguuggacauggccagucucaacaugacaaugccucugagcuguacuaagaauaacucccaucacuauauuaugguuggaaaugaaaccggccuggagcucacauuaaccaacacuucuaucauaaaucauaaauucugcaaccugucggaugcgcacaagaaaaaucuuuacgaccaugcuuugaugucaaucauuagcacauuucaccugaguaucccaaacuucaaucaguaugaggccauguccugugauuuuaacggugggaagauuucugugcaguacaaucuaagccacaccuaugcagucgacgccgcuaaccauugcggaacgaucgcaaauggcgugcuccaaacuuucaugaggauggccuggggcggguccuacauagcucuggauucaggaugcgguaguugggacuguauuaugaccagcuaccaguaucuuaucauucagaacacaacuugggaagaucacugccaguuuucucggccgucccccaucggcuaccugggguugcucucacaacgcacccgagacaucuauauuagccguagacgccggggaacauucaccuggacgcugagugauucugagggcaacgaaacuccugguggguacugucucacaagguggaugcuuauagaggccgagcugaaaugcuuuggaaauaccgcgguagcaaaguguaacgaaaaacaugacgaggaguucugcgauauguugcggcuauuugacuucaauaagcaggccauccgcagacugaaaacucccgcucagauguccauucagcucaucaacaaggccguuaaugcacugauaaacgaucaacuuauuaugaagaaucaccugagggacaucaugugcaucccauauugcaacuacagcaaauauugguacuugaaucacacagugaccggcaagacgucgcucccccgguguuggcuggucucuaacggguccuacuuaaaugaaacccauuucucagacgauauugagcagcaggcugacaacaugaucacagagcugcuacaaaaagaauauauggaucgccagggaaagacuccucucggucugguggaccuuuuuguguucaguaccagcuuuuacuugauuuccauauuccugcaccucgucaaaaucccaacacaucgacacguugugggcaagcccugcccuaaaccacauagacugaaucacauggggauuuguucuugcggacuuuauaagcacccgggcguacccgugagguggaagcgguga

SEQ ID NO: 4947 - RNA, 1473 nt, Artificial Sequence
  derived and/or modified protein sequence (opt3) from LASV(Lassa virus/H.sapiens-wt/NGA/2018/ISTH_1643;Clade II)__AVV65119__GPCstabilized
augggccagaucauuaccuucuuucaagaggugccccacgucauagaagagguuaugaacaucgugcugauugcccucagccuucuggcuaucuugaaggggauuuacaauguagcaacaugcggauuauucggucugguguccuuucuacuccuguguggcagaucuugcucaacuacguauaaaggggucuacgaacuucagacccuggaguuggacauggccagucucaacaugacaaugccucugagcuguacuaagaauaacucccaucacuauaucauggugggaaaugaaaccggccuggagcucacauuaaccaacacuucuauaaucaaucauaaauucugcaaccugucggaugcgcacaagaaaaaucuuuacgaccaugcuuugaugucaauuaucagcacauuucaccugaguauuccaaacuucaaucaguaugaggccauguccugugauuuuaacggugggaagaucucuguucaguacaaucuaagccacaccuaugcaguggacgccgcuaaccauugcggaacgauagcaaauggcguccuccaaacuuucaugaggauggccuggggcggguccuacauugcucuggauucaggaugcgguaguugggacuguaucaugaccagcuaccaguaucuuauuauccagaacacaucuugggaagaucacugccaguuuucccggccgucacccaucggcuaccugggguugcucagccaacgcacucgagacauuuauauaagucguagacgccggggaaccuucacauggacccugucugauuccgagggcaacgaaacgccugguggguacugucucacuagguggaugcuuaucgaggccgagcugaaaugcuuuggaaauacagcgguggcaaaguguaacgaaaaacaugacgaggaguucugcgauauguugcggcuauuugacuucaauaagcaggccauucgcagacugaaaacccccgcucagaugagcauccagcucauaaacaaggccguaaaugcacugauuaacgaucaacuuaucaugaagaaucaccugagggacaucaugugcauuccauauugcaacuacucgaaauauugguacuugaaucacacuguuacaggcaagaccucucucccccgguguuggcugguguccaacgggacguacuuaaaugaaacccauuucucagacgauaucgagcagcaggcugacaacaugauuacagagcugcuacaaaaagaauauauagaucgccagggaaagacuccucucggucuggucgaccuuuuuguguucaguaccagcuuuuacuugaucuccauuuuccugcaccucgugaaaaucccaacacaucgacacgucaucggcaagcccugcccuaaaccacauagacugaaucacauggggauuuguucuugcggacuuuauaagcacccgggcguucccgugaaguggaaaagguga

SEQ ID NO: 4948 - RNA, 1473 nt, Artificial Sequence
  derived and/or modified protein sequence (opt3) from LASV(LASV003-NIG-2008;Clade II)__AIT17580__GPCstabilized
augggccagaucauuaccuucuuucaagaggugccccacgucauagaagagguuaugaacaucgugcugauugcccucagccuucuggcuaucuugaaggggauuuacaauguagcaacaugcggauuauucggucugguguccuuucuacuccuguguggcagaucuugcucaacuacguauaaaggggucuacgaacuucagacccuggaguuggacauggccagucucaacaugacaaugccucugagcuguacuaagaauaacucccaucacuauaucauggugggaaaugaaaccggccuggagcucacauuaaccaacacuucuauaaucaaucauaaauucugcaaccugucggaugcgcacaagaaaaaucuuuacgaccaugcuuugaugucaauuaucagcacauuucaccugaguauuccaaacuucaaucaguaugaggccauguccugugauuuuaacggugggaagaucucuguucaguacaaucuaagccacaccuaugcaguggacgccgcuaaccauugcggaacgauagcaaauggcguccuccaaacuuucaugaggauggccuggggcggguccuacauugcucuggauucaggaugcgguaguugggacuguaucaugaccagcuaccaguaucuuauuauccagaacacaacuugggaagaucacugccaguuuucucggccgucccccaucggcuaccugggguugcucucacaacgcacccgagacauuuauauaagccguagacgccggggaacauucaccuggacgcugagugauucugaguccaacgaaacuccuggcgguuacugucucacaagguggaugcuuaucgaggccgagcugaaaugcuuugggaauaccgcgguggcaaaguguaacgaaaaacaugacgaggaguucugcgauauguugcggcuauuugacuucaauaagcaggccauucgcagacugaaagcucccgcccagaugagcauccagcucauaaacaaggcaguaaaugcucugauuaacgaucaacuuaucaugaagaaucaccugagggacaucaugugcauuccauauugcaacuacucgaaauauugguacuugaaucacacuguuacaggacggaccucucucccccgcuguuggcugguguccaacggcucauacuuaaaugaaacgcauuucagugacgauaucgagcagcaggccgacaacaugauuaccgagcugcuacaaaaggaauauauggaucgacaggggaaaacaccucucggacuggucgaccuuuuuguguucagcacuuccuuuuacuugauaucuaucuuccugcaccucgugaagauuccaacccauagacacgucaucgguaaacccugcccuaagccacauaggcugaaucacaugggcaucuguagcugcgggcuuuauaaacacccgggaguucccgugaaguggaagcgguga

SEQ ID NO: 4949 - RNA, 1473 nt, Artificial Sequence
  derived and/or modified protein sequence (opt3) from LASV(LASV006-NIG-2008;Clade II)__AIT17584__GPCstabilized
augggccagaucauuaccuucuuucaagaggugccccaggucauagaagagguuaugaacaucgugcugauugcccucagccuucuggcuaucuugaaggggauuuacaauguagcaacaugcggauuauucggucugguguccuuucuacuccuguguggcagaucuugcucaacuacguauaaaggggucuacgaacuucagacccuggaguuggacauggccagucucaacaugacaaugccucugagcuguacuaagaauaacucccaccauuauaucauggugggaaaugaaaccggccuggagcucacauuaaccaaccagucuauaaucaaucacaaauucugcaaccugucggaugcgcauaagaaaaaucuuuacgaccacgcuuugaugucaauuaucagcacuuuucaucugaguauuccaaacuucaaucaauaugaggccauguccugugauuuuaacggugggaagaucucuguucaguacaaucuaagccacuccuucgcaguggacgccgcuaaccacugcggaacaauagcaaauggcguccuccagaccuuuaugaggauggccuggggcgggucauauauugcucuggauaguggaugcgguagcugggacuguaucaugacgucuuaccaguaccuuauuauccaaaacacuaccugggaagaucauugccaguucucccggccgucacccaucggcuaucugggguugcucagccagcgcacacgagacauuuacauaagucguagacgccggggaacuuuuaccuggacacugucugauuccgagggcaacgaaaccccugguggguauugucucacgagguggaugcuuaucgaggccgagcugaaaugcuucggaaauacugcgguggcaaaguguaacgaaaaacacgacgaggaauuuugcgauauguugcggcuauucgacuucaauaagcaggccauucgcagacugaaaacacccgcucaaaugagcauccagcucauaaacaaggccguaaaugcacugauuaacgaucagcuuaucaugaagaaucaucugagggacaucaugugcauuccauacugcaacuauucgaaauacugguauuugaaucacaccaagacuggcaaaacaucucucccccgguguuggcugguuuccaacgggucauacuuaaaugaaacccacuuuagugacgauaucgagcaacaggcugacaacaugauuacggagcugcuacagaaggaauacauggaucgccagggaaaaaccccucucggucugguggaccuuuucgucuuuagcacauccuucuauuugauaucuaucuuucugcaucucgugaagauuccaacucaccgacaugugaucggcaaacccugcccuaagccacacagacugaaucauauggggaucuguagcugcggacuuuacaagcacccgggcguccccguuaaauggaagagguga

SEQ ID NO: 4950 - RNA, 1473 nt, Artificial Sequence
  derived and/or modified protein sequence (opt3) from LASV(LASV035-NIG-2009;Clade II)__AIT17588__GPCstabilized
augggccagaucauuaccuucuuucaagaggugccccacgucauagaagagguuaugaacaucgugcugauugcccucagccuucuggcuaucuugaaggggauuuacaauguagcaacaugcggauuauucggucugguguccuuucuacuccuguguggcagaucuugcucaacuacguauaaaggggucuacgaacuucagacccuggaguuggacauggccagucucaacaugacaaugccucugagcuguacuaagaauaacucccaucacuauaucauggugggaaaugaaaccggccuggagcucacauuaaccaacacuucuauaaucaaucauaaauucugcaaccugucggaugcgcacaagaaaaaucuuuacgaccaugcuuugaugucaauuaucagcacauuucaccugaguauuccaaacuucaaucaguaugaggccauguccugugauuuuaacggugggaagaucucuguucaguacaaucuaagccacgcauaugccguggacgcugcaaaccauugcggaaccauagccaauggcguccuccaaacguucaugaggauggcuuggggcggguccuacauugcccuggauucaggaugcgguaguugggacuguaucaugacuagcuaccaguaucuuauuauccagaacaccacaugggaagaucacugccaguuuucucggccgucccccaucggcuaccugggguugcucucacaacgcacucgagacauuuauauaagccguagacgccggggaaccuucacauggacccugagugauucugagggcaacgaaacgccugguggguacugucucacuagguggaugcuuaucgaggcggagcugaaaugcuuuggaaauacagcaguggccaaguguaacgaaaaacaugacgaggaguucugcgauauguugcggcuauuugacuucaauaagcaggcuauucgcagacugaaagcccccgcacagauguccauccagcucauaaacaaggcuguaaaugcccugauuaacgaucaacuuaucaugaagaaucaccugagggacaucaugugcauuccauauugcaacuacagcaaauauugguacuugaaucacaccguuacuggcaagacaucgcucccccgguguuggcuggugucuaacggguccuacuuaaaugaaacccauuucucagacgauaucgagcagcaggcggacaacaugauuacggagcugcuacaaaaagaauauauagaucgccagggaaagaccccucucggucuggucgaccuuuuuguguucaguacuagcuuuuacuugaucuccauuuuccugcaccucgugaaaaucccaacacaucgacacgucaucggcaagcccugcccuaaaccacauagacugaaucacauggggauuuguucuugcggacuuuauaagcacccgggcguucccgugaaguggaaaagguga

SEQ ID NO: 4951 - RNA, 1473 nt, Artificial Sequence
  derived and/or modified protein sequence (opt3) from LASV(LASV042-NIG-2009;Clade II)__AIT17592__GPCstabilized
augggccagaucauuaccuucuuucaagaggugccccacgucauagaagagguuaugaacaucgugcugauugcccucagccuucuggcuaucuugaaggggauuuacaauguagcaacaugcggauuauucggucugguguccuuucuacuccuguguggcagaucuugcucaacuacguauaaaggggucuacgaacuucagacccuggaguuggacauggccagucucaacaugacaaugccucugagcuguacuaagaauaacucccaucacuauaucauggugggaaaugaaaccggccuggagcucacauuaaccaacacuucuauaaucaaucauaaauucugcaaccugucggaugcgcacaagaaaaaucuuuacgaccauacauugaugucaauuaucagcaccuuucaccugaguauuccaaacuucaaucaguaugaggcuauguccugugauuuuaacggugggaggaucucuguucaguacaaucuaagccacgccuaugcaguggacgccgcuaaccauugcggaacgauagcaaauggcguccuccaaacuuucaugcggauggccuggggcggguccuacauugcucuggauucaggaugcgguaguugggacuguaucaugaccagcuaccaguaucuuauuauccagaacacaacuugggaagaucacugccaguuuucucgcccgucccccaucggcuaccugggguugcucucacaacgaacccgugacauuuauauaagcagaaggcgccggggaacauucaccuggacgcugagugauucugagggcaacgaaacuccugguggguacugucucacacgguggaugcuuaucgaggccgagcugaagugcuuuggaaauaccgcgguggcaaaauguaacgaaaagcaugacgaggaguucugcgauauguugcgccuauuugacuucaauaaacaggccauuagaaggcugaagacucccgcucagauguccauccagcucauaaacaaagccguaaaugcacugauuaacgaucaacuuaucaugaagaaucaucugcgggacaucaugugcauuccauauugcaacuacagcaaguauugguacuugaaucacacaaucaccggcaaaacgucgcucccccgcuguuggcugguuucuaacggguccuacuuaaaugaaacccacuucucagacgauauugagcagcaggcugacaacaugauaacagagcugcuacaaaaggaauauaucgaucgacagggaaaaacuccucucggucugguggaccuuuuugucuucaguaccagcuuuuacuugauuuccaucuuccugcaccucgugaagaucccaacacauagacacguggucggcaaacccugcccuaagccacauaggcugaaucacauggggauuuguucuugcggacuuuauaaacacccgggcguucccgugaaguggaagcgguga

SEQ ID NO: 4952 - RNA, 1473 nt, Artificial Sequence
  derived and/or modified protein sequence (opt3) from LASV(LASV045-NIG-2009;Clade II)__AIT17596__GPCstabilized
augggccagaucauuaccuucuuucaagaggugccccacgucauagaagagguuaugaacaucgugcugauugcccucagccuucuggcuaucuugaaggggauuuacaauguagcaacaugcggauuauucggucugguguccuuucuacuccuguguggcagaucuugcucaacuacguauaaaggggucuacgaacuucagacccuggaguuggacauggccagucucaacaugacaaugccucugagcuguacuaagaauaacucccaucacuauaucauggugggaaaugaaaccggccuggagcucacauuaaccaacacuucuauaaucaaucauaaauucugcaaccugucggaugcgcacaagaaaaaucuuuacgaccaugcuuugaugucaauuaucagcacauuucaccugaguauuccaaacuucaaucaguaugaggccauguccugugauuuuaacggugggaagaucucuguucaguacaaucuaagccacaccuaugcaguggacgccgcuaaccauugcggaacgauagcaaauggcguccuccaaacuuucaugaggauggccuggggcggguccuacauugcucuggauucaggaugcgguaguugggacuguaucaugaccagcuaccaguaucuuauuauccagaacacaucuugggaagaucacugccaguuuucccggccgucacccaucggcuaccugggguugcucagccaacgcacucgagacauuuauauaagucguagacgccggggaaccuucacauggacccugucugauuccgagggcaacgaaacgccugguggguacugucucacuagguggaugcuuaucgaggccgagcugaaaugcuuuggaaauacagcgguggcaaaguguaacgaaaaacaugacgaggaguucugcgauauguugcggcuauuugacuucaauaagcaggccauucgcagacugaaaacccccgcucagaugagcauccagcucauaaacaaggccguaaaugcacugauuaacgaucaacuuaucaugaagaaucaccugagggacaucaugugcauuccauauugcaacuacucgaaauauugguacuugaaucacacuguuacaggcaagaccucucucccccgguguuggcugguguccaacgggucauacuuaaaugaaacgcauuucagugacgauaucgagcagcaggcugacaacaugauuaccgagcugcuacaaaaagaauauauagaucgccagggaaagacaccucucggucuggucgaccuuuuuguguucagcacuuccuuuuacuugaucucuauuuuccugcaccucgugaaaaucccaacccaucgacacgucaucggcaagcccugcccuaaaccacauagacugaaucacauggggauuuguagcugcggacuuuauaagcacccgggcguucccgugaaguggaaaagguga

SEQ ID NO: 4953 - RNA, 1473 nt, Artificial Sequence
  derived and/or modified protein sequence (opt3) from LASV(LASV046-NIG-2009;Clade II)__AIT17600__GPCstabilized
augggccagaucauuaccuucuuucaagaggugccccacgucauagaagagguuaugaacaucgugcugauugcccucagccuucuggcuaucuugaaggggauuuacaauguagcaacaugcggauuauucggucugguguccuuucuacuccuguguggcagaucuugcucaacuacguauaaaggggucuacgaacuucagacccuggaguuggacauggccagucucaacaugacaaugccucugagcuguacuaagaauaacucccaucacuauaucauggugggaaaugaaaccggccuggagcucacauuaaccaacacuucuauaaucaaucauaaauucugcaaccugucggaugcgcacaagaaaaaucuuuacgaccaugcuuugaugucaauuaucagcacauuucaccugaguauuccaaacuucaaucaguaugaggccauguccugugauuuuaacggugggaagaucucuguucaguacaaucuaagccacgcauaugccggagacgcugcaaaccauugcggcaccauagccaauggcgugcuccaaacguucaugaggauggcuuggggaggguccuacauugcccuggauucagguugcggcaguugggacuguaucaugacuagcuaccaguaucuuauuauccagaacaccacaugggaagaucacugccaguuuucucggccgucccccaucggguaccugggauugcucucacaacgcacucgagacauuuauauaagccguagacgccggggcaccuucacauggacccugagugauucugaggguaacgaaacgccugggggauacugucucacuagguggaugcuuaucgaggcggagcugaaaugcuuuggcaauacagcagucgccaaguguaacgaaaaacaugacgaggaguucugcgauauguugcggcuauuugacuucaauaagcaggcuauucgcagacugaaaacccccgcccagauguccauccagcucauaaacaaggcagugaaugcucugauuaacgaucaacuuaucaugaagaaucaccugagggacaucaugugcauuccauauugcaacuacagcaaauauugguacuugaaucacacuguaacagggaagaccucgcucccccgguguuggcugguuucuaacggauccuacuuaaaugaaacgcauuucucagacgauaucgagcagcaggccgacaacaugauuaccgagcugcuacaaaaagaauauauagaucgccaggguaagacaccucucggccugguggaccuuuuugucuucaguacuagcuuuuacuugaucuccauuuuccugcaccucgugaaaaucccaacccaucgacacgugaucgggaagcccugcccuaaaccacauagacugaaucacaugggaauuuguucuugcggccuuuauaagcacccggguguccccguuaaguggaaaagguga

SEQ ID NO: 4954 - RNA, 1473 nt, Artificial Sequence
  derived and/or modified protein sequence (opt3) from LASV(LASV049-NIG-2009;Clade II)__AIT17604__GPCstabilized
augggccagaucauuaccuucuuucaagaggugccccacgucauagaagagguuaugaacaucgugcugauugcccucagccuucuggcuaucuugaaggggauuuacaauguagcaacaugcggauuauucggucugguguccuuucuacuccuguguggcagaucuugcucaacuacguauaaaggggucuacgaacuucagacccuggaguuggacaugacaagucucaacaugacuaugccucugagcuguaccaagaauaacucccaucacuauaucauggugggaaaugaaacaggccuggagcucaccuuaacuaacacaucuauaaucaaucauaaauucugcaaccugucggaugcccacaagaaagaccuuuacgaucaugcguugaugucaauuaucagcaccuuucaccugaguauuccaaauuucaaccaguaugaggcuauguccugugacuuuaauggugggaagaucucuguucaguacaaccuaagccacacguaugccguggaugcagccaagcauugcggaacuauagcuaauggcguccuccaaaccuucaugaggauggcauggggcggguccuacauugcccuggacucaggaugcgguaguugggauuguaucaugacaagcuaccaguaucuuauuauccagaacacuaccugggaagaccacugccaguuuucucggccgucccccgugggcuaccugggguugcucucacaacgcacacgagauaucuauauuagccguagacgccggggaaccuucacguggacucugagugacucugagggcaaugaaacaccugguggguacugucucaccagguggaugcuuauagaggcugagcugaagugcuuuggaaacacugccguagcgaaauguaacgaaaagcaugaugaggaguucugcgacauguugcggcuauuugauuucaauaaacaggcaauccgcagacugaagacacccgcccagauguccauucagcucaucaacaaggcuguuaaugcccugauaaacgaccaacuuauuaugaaaaaucaccugagggacaucaugugcaucccauauugcaacuacagcaaguauugguacuugaaucacaccgugacgggcaaaaccucgcucccccgguguuggcuggucucuaacggguccuacuuaaaugaaacacauuucucagaugacauugagcagcaggcagauaacaugaucacugagcugcuacaaaaggaauaucucgaccgccagggaaaaaccccucugggucuuguggauuuguuuguguucaguacuagcuuuuaccugauuuccauauuccuccaccuggucaagaucccaacacaucgacacguuauuggcaaacccugcccuaagccacauagacuuaaucacauggggaucuguucuugcggacuguauaagcacccgggcgugcccguaaaauggaagagguga

SEQ ID NO: 4955 - RNA, 1473 nt, Artificial Sequence
  derived and/or modified protein sequence (opt3) from LASV(LASV052-NIG-2008;Clade II)__AIT17608__GPCstabilized
augggccagaucauuaccuucuuucaagaggugccccacgucauagaagagguuaugaacaucgugcugauugcccucagccuucuggcuaucuugaaggggauuuacaauguagcaacaugcggauuauucggucugguguccuuucuacuccuguguggcagaucuugcucaacuacguauaaaggggucuacgaacuucagacccuggaguuggacauggccagucucaacaugacaaugccucugagcuguacuaagaauaacucccaucacuauaucauggugggaaaugaaaccggccuggagcucacauuaaccaacacuucuauaaucaaucauaaauucugcaaccugucggaugcgcacaagaggaaucuuuacaaccaugcuuugaugucaauuaucagcacauuucaccugaguauuccaaauuucaaccaguaugaggccauguccugugacuuuaauggugggaaaaucucuguucaguacaaccuaagccacaccuaugcaguggaugccgcuaaucauugcggaacgauagcaaacggcguccuccaaacuuucaugcggauggccuggggcggguccuacauugcucuggacucaggaugcgguaguugggauuguaucaugaccagcuaccaguaucuuauuauccagaacacaacuugggaagaccacugccaguuuucucgcccgucccccaucggcuaccugggguugcucucacaacgaacccgugauauuuauauaagcagaaggcgccggggaacauucaccuggacgcugagugacucugagggcaaugaaacuccugguggguacugucucacacgguggaugcuuaucgaggccgagcugaagugcuuuggaaacaccgcgguggcaaaauguaaugaaaagcaugaugaggaguucugcgacauguugcgccuauuugauuucaacaaacaggccauuagaaggcugaagacucccgcucagauguccauccagcucauaaauaaagccguaaacgcacugauuaaugaccaacuuaucaugaagaaccaucugcgggauaucaugugcauuccauauugcaauuacagcaaguauugguacuugaaccacacaguuaccggcaaaacgucgcucccccgcuguuggcuggugucuaauggguccuacuuaaacgaaacccacuucucagacgacaucgagcagcaggcugauaauaugauuacagagcugcuacaaaaggaauauauagaccgacagggaaaaacuccucucggucuggucgaucuuuuuguguucaguaccagcuuuuacuugaucuccauuuuccugcaccucgugaagaucccaacacauagacacaucauuggcaaacccugcccuaagccacauaggcugaaccacauggggauauguucuugcggacuuuauaaacacccgggcguccccguuaaguggcggcguuga

SEQ ID NO: 4956 - RNA, 1473 nt, Artificial Sequence
  derived and/or modified protein sequence (opt3) from LASV(LASV056-NIG-2008;Clade II)__AIT17612__GPCstabilized
augggccagaucauuaccuucuuucaagaggugccccacgucauagaagagguuaugaacaucgugcugauugcccucagccuucuggcuaucuugaaggggauuuacaauguagcaacaugcggauuauucggucugguguccuuucuacuccuguguggcagaucuugcucaacuacguauaaaggggucuacgaacuucagacccuggaguuggacauggccagucucaacaugacaaugccucugagcuguacuaagaauaacucccaucacuauaucagggugggaaaugaaaccggccuggagcucacauuaaccaacacuucuauaaucaaucauaaauucugcaaccugucggaugcgcacaagaaaaaucuuuacgaccauucauugaugagcauuaucaguacauuucaccuguccauuccaaacuucaaucaguaugaggcuaugucuugugauuuuaacggugggaagaucagcguucaguacaaucuaucccacaccuaugccguggacgcagccaaccauugcggaacgauagcuaauggcguccuccaaacuuucaugcggauggcauggggcgggucauacauugcccuggauaguggaugcgguaacugggacuguaucaugaccagcuaccaguaucuuauuauccagaacacaacuugggaagaucacugccaguuuucucgcccgucccccaucggcuaccugggguugcucucacaacgaacccgugacauuuauauaagcagaaggcgccggggaacauucaccuggacgcugagugauucugagggcaaugaaacuccugguggguacugucucacacgguggaugcuuaucgaggcugagcugaaaugcuuuggaaacaccgccguggcgaaguguaaugaaaaacaugacgaggaguucugcgauauguugcgccuauuugacuucaacaagcaggcaauuagaaggcugaaaacucccgcccagauguccauccagcucauaaauaaggcuguaaacgcccugauuaaugaucaacuuaucaugaagaaccaucugcgggacaucaugugcauuccauauugcaauuacagcaaauauugguacuugaaccacacaguuaccggcaagacgucgcucccccgcuguuggcuggugucuaauggguccuacuuaaacgaaacccacuucucagacgauaucgagcagcaggcagacaauaugauuacagagcugcuacaaaaagaauauauagaucgacagggaaagacuccucucggucuggucgaccuuuuuguguucaguaccagcuuuuacuugaucuccauuuuccugcaccucgugaaaaucccaacacauagacacgucguuggcaagcccugcccuaaaccacauaggcugaaccacauggggaucuguucuugcggacuuuauaagcacccgggcgugcccguaaaguggaaacgguga

SEQ ID NO: 4957 - RNA, 1473 nt, Artificial Sequence
  derived and/or modified protein sequence (opt3) from LASV(LASV058-NIG-2008;Clade II)__AIT17616__GPCstabilized
augggccagaucauuaccuucuuucaagaggugccccacgucauagaagagguuaugaacaucgugcugauugcccucagccuucuggcuaucuugaaggggauuuacaauguagcaacaugcggauuauucggucugguguccuuucuacuccuguguggcagaucuugcucaacuacguauaaaggggucuacgaacuucagacccuggaguuggacauggccagucucaacaugacaaugccucugagcuguacuaagaauaacucccaucacuauaucauggugggaaaugaaaccggccuggagcucacauuaaccaacacuucuauaaucaaucauaaauucugcaaccugucggaugcgcacaagaaaaaucuuuacgaccaugcuuugaugucaauuaucagcacauuucaccugaguauuccaaacuucaaucaguaugaggccauguccugugauuuuaacggugggaagaucucuguucaguacaaucuaagccacgcauaugccguggacgcugcaaaccauugcggaaccauagccaauggcguccuccaaacguucaugaggauggcuuggggcggguccuacauugcccuggauucaggaugcgguaguugggacuguaucaugacuagcuaccaguaucuuauuauccagaacaccacaugggaagaucacugccaguuuucucggccgucccccaucggcuaccugggguugcucucacaacgcacucgagacauuuauauaagccguagacgccggggaaccuucacauggacccugagugauucugagggcaacgaaacgccugguggguacugucucacuagguggaugcuuaucgaggcggagcugaaaugcuuuggaaauacagcaguggccaaguguaacgaaaaacaugacgaggaguucugcgauauguugcggcuauuugacuucaauaagcaggcuauucgcagacugaaaacccccgcccagauguccauccagcucauaaacaaggcaguaaaugcucugauuaacgaucaacuuaucaugaagaaucaccugagggacaucaugugcauuccauauugcaacuacagcaaauauugguacuugaaucacacuguuacaggcaagaccucgcucccccgguguuggcuggugucuaacggguccuacuuaaaugaaacgcauuucucagacgauaucgagcagcaggccgacaacaugauuaccgagcugcuacaaaaagaauauauagaucgccagggaaagacaccucucggucuggucgaccuuuuuguguucaguacuagcuuuuacuugaucuccauuuuccugcaccucgugaaaaucccaacccaucgacacgucaucggcaagcccugcccuaaaccacauagacugaaucacauggggauuuguucuugcggacuuuauaagcacccgggcguucccgugaaguggaaaagguga

SEQ ID NO: 4958 - RNA, 1473 nt, Artificial Sequence
  derived and/or modified protein sequence (opt3) from LASV(LASV063-NIG-2009;Clade II)__AIT17620__GPCstabilized
augggccagaucauuaccuucuuucaagaggugccccacgucauagaagagguuaugaacaucgugcugauugcccucagccuucuggcuaucuugaaggggauuuacaauguagcaacaugcggauuauucggucugguguccuuucuacuccuguguggcagaucuugcucaacuacguauaaaggggucuacgaacuucagacccuggaguuggacauggccagucucaacaugacaaugccucugagcuguacuaagaauaacucccaucacuauaucauggugggaaaugaaaccggccuggagcucacauuaaccaacacuucuauaaucucgcauaaauucugcaaucugucagaugcgcacaagaaaaaccuuuacgaccaugcuuugaugagcauuaucaguacauuucaccuguccauuccaaauuucaaccaguaugaggccaugucuugugauuuuaauggugggaagaucagcguucaguacaaccuaucccacgcauaugccauagacgcugcaaaucauugcggaaccguggccaacggcguccuccaaacguucaugaggauggcuuggggcgggucauacauugcccuggauaguggaugcgguagcugggacuguaucaugacuucuuaccaguaucuuauuauccagaauaccacaugggaagaucacugccaguuuucccggccgucacccaucggcuaccugggguugcucagccaacgcacucgagacauuuauauaagucguagacgccggggaaccuucacauggacccugucugauuccgagggcaacgaaacgccugguggguacugucucacuagguggaugcuuaucgaggcggagcugaaaugcuuuggaaacacagcaguggccaaguguaaugaaaaacaugacgaggaguucugcgauauguugcggcuauuugacuucaacaagcaggcuauucgcagacugaaagcccccgcacagaugagcauccagcucauaaauaaggcuguaaacgcccugauuaaugaucaacuuaucaugaagaaccaccugagggacaucaugugcauuccauauugcaauuacucgaaauauugguacuugaaccacaccguuacuggcaagacaucucucccccgguguuggcugguguccaaugggucauacuuaaacgaaacccauuucagugacgauaucgagcagcaggcggacaauaugauuacggagcugcuacaaaaagaauauauggaucgccagggaaagaccccucucggucuggucgaccuuuuuguguucagcacauccuuuuacuugauaucuaucuuccugcaccucgugaaaauuccaacucaucgacacgucaucggcaagcccugcccuaaaccacauagacugaaccacauggggaucuguagcugcggacuuuauaagcacccgggcguucccgugaaguggaaaagguga

SEQ ID NO: 4959 - RNA, 1473 nt, Artificial Sequence
  derived and/or modified protein sequence (opt3) from LASV(LASV1000-NIG-2009;Clade II)__AIT17782__GPCstabilized
augggccagaucauuaccuucuuucaagaggugccccacgucauagaagagguuaugaacaucgugcugauugcccucagccuucuggcuaucuugaaggggauuuacaauguagcaacaugcggauuauucggucugguguccuuucuacuccuguguggcagaucuugcucaacuacguauaaaggggucuacgaacuucagacccuggaguuggacauggccagucucaacaugacaaugccucugagcuguacuaagaauaacucccaucacuauaucauggugggaaaugaaaccggccuggagcucacauuaaccaacacuucuauaaucaaucauaaauucugcaaccugucggaugcgcacaagaaaaaucuuuacgaccaugcuuugaugucaauuaucagcacauuucaccugaguauuccaaacuucaaucaguaugaggccauguccugugauuuuaacggugggaagaucucuguucaguacaaucuaagccacaccuaugcaguggacgccgcuaaccauugcggaacgauagcaaauggcguccuccaaacuuucaugaggauggccuggggcggguccuacauugcucuggauucaggaugcgguaguugggacuguaucaugaccagcuaccaguaucuuauuauccagaacacaacuugggaagaucacugccaguuuucucggccgucccccaucggcuaccugggguugcucucacaacgcacccgagacauuuauauaagccguagacgccggggaacauucaccuggacgcugagugauucugagggcaacgaaacuccugguggguacugucucacaagguggaugcuuaucgaggccgagcugaaaugcuuuggaaauaccgcgguggcaaaguguaacgaaaaacaugacgaggaguucugcgauauguugcggcuauuugacuucaauaagcaggccauuaaacgccugaagacucccgcucagauguccauccagcucauaaacaaggccguaaaugcacugauuaacgaucaacuuaucaugaaaaaucaccugagagacaucaugugcauuccauauugcaacuacagcaaguauugguacuugaaucacacaguuaccggcaaaacgucgcuccccagguguuggcuggugucuaacggguccuacuuaaaugaaacccauuucucagacgauaucgagcagcaggcugacaacaugauuacagagcugcuacaaaaggaauauauagaucggcagggaaaaacuccucucggucuggucgaccuuuuuguguucaguaccagcuuuuacuugaucuccauuuuccugcaccucgugaagaucccaacacaucgccacgucguuggcaaacccugcccuaagccacaucgacugaaucacauggggaucuguucuugcggacuuuauaagcacccgggcgugcccguaaaauggaagagauga

SEQ ID NO: 4960 - RNA, 1473 nt, Artificial Sequence
  derived and/or modified protein sequence (opt3) from LASV(LASV1008-NIG-2009;Clade II)__AIT17786__GPCstabilized
augggccagaucauuaccuucuuucaagaggugccccacgucauagaagagguuaugaacaucgugcugauugcccucagccuucuggcuaucuugaaggggauuuacaauguagcaacaugcggauuauucggucugguguccuuucuacuccuguguggcagaucuugcucaacuacguauaaaggggucuacgaacuucagacccuggaguuggacauggccagucucaacaugacaaugccucugagcuguacuaagaauaacucccaucacuauaucauggugggaaaugaaaccggccuggagcucacauuaaccaacacuucuauaaucaaucauaaauucugcaaccugucggaugcgcacaagaaaaaucuuuacgaccaugcuuugaugucaauuaucagcacauuucaccugaguauuccaaacuucaaucaguaugaggccauguccugugauuuuaacggugggaagaucucuguucaguacaaucuaagccacgcauaugccauagacgcugcagaucauugcggaaccauugccaacggcgugcuccaaacguucaugaggauggcuuggggcggguccuacaucgcccuggacucaggaugcgguaguugggauuguauuaugacuagcuaccaguaucuuaucauccagaauaccacaugggaagaccacugccaguuuucucggccgucccccauuggcuaccugggguugcucucacaacgcacucgagauauauauaucagccguagacgccggggaaccuucacauggacccugagugacucugagggcaacgaaacgccugguggguacugucucacuagguggaugcuuauugaggcggagcugaaaugcuuuggaaacacagcagucgccaaguguaaugaaaaacaugaugaggaguucugcgacauguugcggcuauuugauuucaacaagcaggcuauccgcagacugaaaacccccgcccagauguccauacagcucauuaauaaggcagugaacgcucugaucaaugaccaacuuaucaugaagaaccaccugagggacauuaugugcaucccauauugcaauuacagcaaauauugguacuugaaccacacuguaacaggcaagaccucgcucccccgguguuggcugguuucuaauggguccuacuuaaacgaaacgcauuucucagaugacauugagcagcaggccgauaauaugauaaccgagcugcuacaaaaagaauauauggaccgccagggaaagacaccucucggucugguggaucuuuuugucuucaguacuagcuuuuacuugaucuccauuuuccugcaccucgugaaaaucccaacccaucgacacaucacaggcaagcccugcccuaaaccacauagacugaaccacauggggauuuguucuugcggacuuuauaagcacccgggcgugcccgucaaguggaaaagguga

SEQ ID NO: 4961 - RNA, 1473 nt, Artificial Sequence
  derived and/or modified protein sequence (opt3) from LASV(LASV1011-NIG-2009;Clade II)__AIT17790__GPCstabilized
augggccagaucauuaccuucuuucaagaggugccccacgucauagaagagguuaugaacaucgugcugauugcccucagccuucuggcuaucuugaaggggauuuacaauguagcaacaugcggauuauucggucugguguccuuucuacuccuguguggcagaucuugcucaacuacguauaaaggggucuacgaacuucagacccuggaguuggacauggccagucucaacaugacaaugccucugagcuguacuaagaauaacucccaucacuauaucauggugggaaaugaaaccggccuggagcucacauuaaccaacacuucuauaaucaaucauaaauucugcaaccugucggaugcgcacaagaaaaaucuuuacgaccaugcuuugaugucaauuaucagcacauuucaccugaguauuccaaacuucaaucaguaugaggccauguccugugauuuuaacggugggaagaucucuguucaguacaaucuaagccacaccuaugcaguggacgccgcuaaccauugcggaacgauagcaaauggcguccuccaaacuuucaugaggauggccuggggcggguccuacauugcucuggauucaggaugcgguaguugggacuguaucaugaccagcuaccaguaucuuauuauccagaacacaacuugggaagaucacugccaguuuucucggccgucccccaucggcuaccugggguugcucucacaacgcacccgagacauuuauauaagccguagacgccggggaacauucaccuggacgcugagugauucugagggcaacgaaacuccugguggguacugucucacaagguggaugcuuaucgaggccgagcugaaaugcuuuggaaauaccgcgguggcaaaguguaacgaaaaacaugacgaggaguucugcgauauguugcggcuauuugacuucaauaagcaggccauucgcagacugaaaacucccgcucagauguccauccagcucauaaacaaggccguaaaugcacugauuaacgaucaacuuaucaugaagaaucaccugagggacaucaugugcauuccauauugcaacuacagcaaauauugguacuugaaucacacaguuaccggcaagacgucgcucccccgguguuggcuggugucuaacggguccuacuuaaaugaaacccauuucucagacgauaucgagcagcaggcugacaacaugauuacagagcugcuacaaaaagaauauauggaucgccagggaaagacuccucucggucuggucgaccuuuuuguguucaguaccagcuuuuacuugauauccaucuuccugcaccucgugaaaauuccaacacaucgacacaucacuggcaagcccugcccuaaaccacauagacugaaucacauggggaucuguucuugcggacuuuauaagcacccgggcguccccguuaaguggaaaagguga

SEQ ID NO: 4962 - RNA, 1473 nt, Artificial Sequence
  derived and/or modified protein sequence (opt3) from LASV(LASV1016-NIG-2009;Clade II)__AIT17798__GPCstabilized
augggccagaucauuaccuucuuucaagaggugccccacgucauagaagagguuaugaacaucgugcugauugcccucagccuucuggcuaucuugaaggggauuuacaauguagcaacaugcggauuauucggucugguguccuuucuacuccuguguggcagaucuugcucaacuacguauaaaggggucuacgaacuucagacccuggaguuggacauggccagucucaacaugacaaugccucugagcuguacuaagaauaacucccaucacuauaucauggugggaaaugaaaccggccuggagcucacauuaaccaacacuucuauaaucaaucauaaauucugcaaccugucggaugcgcacaagaaaaaucuuuacgaccaugcuuugaugucaauuaucagcacauuucaccugaguauuccaaacuucaaucaguaugaggccauguccugugauuuuaacggugggaagaucucuguucaguacaaucuaagccacaccuaugcaguggacgccgcuaaccauugcggaacgauagcaaauggcguccuccaaacuuucaugaggauggccuggggcggguccuacauugcucuggauucaggaugcgguaguugggacuguaucaugaccagcuaccaguaucuuauuauccagaacacaacuugggaagaucacugccaguuuucucggccgucccccaucggcuaccugggguugcucucacaacgcacccgagacauuuauauaagccguagacgccggggaacauucaccuggacgcugagugauucugagggcaacgaaacuccugguggguacugucucacaagguggaugcuuaucgaggccgagcugaaaugcuuuggaaauaccgcgguggcaaaguguaacgaaaaacaugacgaggaguucugcgauauguugcggcuauuugacuucaauaagcaggccauuaugcgccugaaaacucccgcucagauguccauccagcucauaaacaaggccguaaaugcacugauuaacgaucaacuuaucaugaagaaucaccugagagacaucaugugcauuccauauugcaacuacagcaaauauugguacuugaaucacacaguuaccggcaagacgucgcuccccagguguuggcuggugucuaacggguccuacuuaaaugaaacccauuucucagacgauaucgagcagcaggcugacaacaugauuacagagaugcugcaaaaagaauaucuagaucggcagggaaagacuccucucggucuggucgaccuuuuuguguucaguaccagcuuuuacuugauauccaucuuccugcaccucgugaaaauuccaacacaucgccacaucaucggcaagcccugcccuaaaccacaucgacugaaucacauggggauuuguucuugcggacuuuauaagcacccgggcguccccguuaaguggaaaagauga

SEQ ID NO: 4963 - RNA, 1473 nt, Artificial Sequence; identical to SEQ ID NO: 4875
  derived and/or modified protein sequence (opt3) from LASV(LASV221-NIG-2010;Clade II)__AIT17624__GPCstabilized

SEQ ID NO: 4964 - RNA, 1473 nt, Artificial Sequence
  derived and/or modified protein sequence (opt3) from LASV(LASV224-NIG-2010;Clade II)__AIT17626__GPCstabilized
augggccagaucauuaccuucuuucaagaggugccccacgucauagaagagguuaugaacaucgugcugauugcccucagccuucuggcuaucuugaaggggguauacaauguggcaacaugcggauuauucggucuggucuccuuucuacuccuguguggcagaucuugcucaacuacguauaaagggguguacgaacuucagacccuggaguuggacauggccagucucaacaugacaaugccucugagcuguacuaagaauaacucccaucacuauauuaugguuggaaaugaaaccggccuggagcucacauuaaccaacacuucuaucauacagcauaaauucugcaaucugucggaugcgcacaagaaaaaccuuuacgaccaugcuuugaugucaaucauuagcacauuucaccugaguaucccaaauuucaaccaguaugaggccauguccugugauuuuaauggugggaagauuaccgugcaauacaaccuaucucacagcuaugcaaucgacgccgcuaaucauugcggaacgauagcaaacggcguccuccagacuuucaugaggauggccuggggcggguccuacauugcucuggauucaggaugcgguaguugggacuguaucaugaccagcuaccaguaucuuauuauccagaauacaacuugggaagaucacugccaauuuucucggccgucccccaucggcuaccugggguugcucucacagcgcacccgagacauuuauauaagccguagacgccggggaacauucaccuggacgcugagugauucugagggcaacgaaacuccugguggguacugucucacaagguggaugcuuaucgaggccgagcugaaaugcuuuggaaacaccgcgguggcaaaguguaaugaaaaacaugacgaggaguucugcgauauguugcggcuauuugacuucaacaagcaggccauucgcagacugaaaacucccgcucagauguccauccaacucauaaauaaggccguaaacgcacugauuaaugaucagcuuaucaugaagaaccaccugagggacaucaugugcauuccauauugcaauuacagcaaauauugguacuugaaccacacaguuaccggccggacgucgcucccccgcuguuggcuggugucuaauggguccuacuuaaacgaaacccauuucucagacgauaucgagcagcaagcugacaauaugauuacagagcugcuacagaaggaauauauggaucgacagggaaaaacuccucucggucuggucgaccuuuuuguguucaguaccagcuuuuacuugauauccaucuuccugcaccucgugaagauuccaacacauagacacaucaucggcaaacccugcccuaagccacauaggcugaaccacaugggggucuguucuugcggacuuuauaaacacccgggcguucccgugaaguggaagcgguga

SEQ ID NO: 4965 - RNA, 1473 nt, Artificial Sequence
  derived and/or modified protein sequence (opt3) from LASV(LASV225-NIG-2010;Clade II)__AIT17630__GPCstabilized
augggccagaucauuaccuucuuucaagaggugccccacgucauagaagagguuaugaacaucgugcugauugcccucagccuucuggcuaucuugaaggggauuuacaauguagcaacaugcggauuauucggucugcuauccuuucuccugcuuuguggcagaucuugcucaacuacguauaaagggguguacgaacugcagaccuuggagcucgacauggccagucugaacaugacaaugccucugagcuguacuaagaauaacucccaucacuauaucauggucggaaaugaaaccggccucgaguuaacacugaccaacacuucuauaaucaaucauaaauucugcaaccuuucggaugcgcacaagaaaaauuuguacgaccaugcucugaugucaauuaucagcacauuucaccuaaguauuccaaacuucaaucaguaugaggccauguccugugauuuuaacggugggaagaucucugugcaguacaaucucagccacgcauaugccguugacgcugcagaacauugcggaaccauagccaacggcgugcugcaaacguucaugaggauggcuuggggcggguccuacauugcccuugauucaggaugcgguaguugggacugugucaugacuagcuaccaguaucugaucauucagaauaccucuugggaggaucacugccaguuuucccggccgucacccaucggcuacuuggggcuccugagccaacgcacacgagacaucuauauuagucguagacgccggggaacuuucaccuggacacucucugauuccgaaggcaacgagaccccugguggguacugucuuacgagguggaugcugauagaggcggaauugaaaugcuuuggaaacacugcaguggccaaguguaaugagaaacaugacgaagaguucugcgauaugcuacggcuguuugacuucaacaagcaggcuauccgcagacucaaaacacccgcccagaugagcauucagcugaucaauaaggcaguaaacgcucuuauaaaugaucaacugauuaugaagaaccacuugagggacaucaugugcaucccauauugcaauuacucgaaauauugguaccucaaccacaccguuacuggcaagacaucucugccccgguguugguuaguguccaaugggucauaccugaacgagacccauuucagugacgauauugagcagcaggccgacaauaugaucacggaacuacuccaaaaagaguauauugaucgccagggaaagaccccucugggucuugucgacuuguuuguguucagcacauccuuuuaccugauaucuaucuuccuccaccuggugaaaauuccaacucaucgacacgucaucggcaagcccugcccuaaaccacauagacuuaaccacauggggaucuguagcugcggacuguauaagcacccgggcguucccgugaaguggaaaagguga

SEQ ID NO: 4966 - RNA, 1473 nt, Artificial Sequence
  derived and/or modified protein sequence (opt3) from LASV(LASV229-NIG-2010;Clade II)__AIT17634__GPCstabilized
augggccagaucauuaccuucuuucaagaggugccccacgucauagaagagguuaugaacaucgugcugauugcccucagccuucuggcuaucuugaaggggauuuacaauguagcaacaugcggauuauucggucugguguccuuucuacuccuguguggcagaucuugcucaacuaucuauaaagacgucuacgaacuucagacgcuggaguuggauauggccagucucaacaugaccaugccucugagcuguacaaagaauaacucccaucacuauauaaugguggggaaugaaacuggacuggagcucaccuuaacaaacaccucuaucauuaaucauaaauucugcaaccugucggacgcgcacaagaaaaaucuuuacgaucaugcuuugaugucaaucauuagcacuuuucaccugaguaucccaaacuucaaucaguaugaggccauguccugugacuuuaacggcgguaagauaucuguucaguacaaucuaagccacacauaugcaauugaugccgcuaaccauugcgggaccaucgcaaauggagugcuccaaacguucaugaggauggccuggggcggcuccuacauugcucuggacucagggugcggaaguugggauuguaucaugacuagcuaccaguaucuuaucauucagaacaccacaugggaagaccacugccaguuuucucggccgucccccauagguuaccugggcuugcucucacaacgcacucgagauaucuauauuagccguagacgccgggggaccuucacauggacccugagugacucugagggaaacgaaacgccuggcgguuacugucucacuagguggaugcuuaucgaggccgagcugaaaugcuuugggaauacagcggucgcaaaguguaacgaaaaacaugaugaggaguucugcgacauguugcggcuauuugauuucaauaagcaggccauacgcagacugaaaacccccgcucagauguccauucagcucaucaacaaggccgugaaugcacugaucaacgaccaacuuauuaugaagaaucaccugagggacaucaugugcauuccauauugcaacuacagccgguauugguacuugaaucacacuguaacaggacgcaccucgcucccccgauguuggcugguuucuaacggcuccuacuuaaaugaaacgcauuucucagaugacauagagcagcaggcugauaacaugaucaccgagcugcuacaaaaagaauauauggacagacaggggaagacaccucucggacugguggaucuuuuugucuucaguacuagcuuuuacuugauuuccaucuuccugcaccucgugaaaaucccaacccauaggcacgugauugguaagcccugcccuaaaccacaucggcugaaucacaugggcauauguucuugcgggcuuuauaaccacccgggaguccccguuaaguggaaacguuga

SEQ ID NO: 4967 - RNA, 1473 nt, Artificial Sequence
  derived and/or modified protein sequence (opt3) from LASV(LASV237-NIG-2010;Clade II)__AIT17638__GPCstabilized
augggccagaucauuaccuucuuucaagaggugccccacgucauagaagagguuaugaacaucgugcugauugcccucagccuucuggcuaucuugaaggggauuuacaauguagcaacaugcggauuauucggucugguguccuuucuacuccuguguggcagaucuugcucaacuacguauaaaggggucuacgaacuucagacccuggaguuggacauggccagucucaacaugacaaugccucugagcuguacuaagaauaacucccaucacuauaucauggugggaaaugaaaccggccuggagcucacauuaaccaacacuucuauaaucaaucauaaauucugcaaccugucggaugcgcacaagaaagaccuuuacgaucaugcuuugaugucaauuaucagcacauuucaccugaguauuccaaauuucaaccaguaugaggccauguccugugacuuuaauggugggaagaucucuguucaguacaaccuaagccacaccuaugcaguggaugccgcuaaucauugcggaacgauagcaaacggcguccuccaaacuuucaugaggauggccuggggcggguccuacauugcucuggacucaggaugcgguaguugggauuguaucaugaccagcuaccaguaucuuauuauccagaauacaacuugggaagaccacugccaguuuucucggccgucccccaucggcuaccugggguugcucucacaacgcacccgagauauuuauauaagccguagacgccggggaacauucaccuggacgcugagugacucugagggcaacgaaacuccugguggguacugucucacaagguggaugcuuaucgaggccgagcugaaaugcuuuggaaacaccgcgguggcaaaguguaaugaaaaacaugaugaggaguucugcgacauguugcggcuauuugauuucaacaagcaggccauucgcagacugaaaacucccgcucagauguccauccagcucauaaauaaggccguaaacgcacugauuaaugaccaacuuaucaugaagaaccaccugagggacaucaugugcauuccauauugcaauuacagcaaauauugguacuugaaccacacaguuaccggcaagacgucgcucccccgguguuggcuggugucuaauggguccuacuuaaacgaaacccauuucucagaugacaucgagcagcaggcugauaauaugauuacagagcugcuacaaaaagaauauauggaccgccagggaaagacuccucucggucuggucgaucuuuuuguguucaguaccagcuuuuacuugauauccaucuuccugcaccucauuaaaaucccaacacaucgacacaucacuggcaagcccugcccuaaaccacauagacugaaccacauggggauuuguucuugcggacuuuauaagcacccgggcgugcccgucaaguggaaaagguga

SEQ ID NO: 4968 - RNA, 1473 nt, Artificial Sequence
  derived and/or modified protein sequence (opt3) from LASV(LASV239-NIG-2010;Clade II)__AIT17642__GPCstabilized
augggccagaucauuaccuucuuucaagaggugccccacgucauagaagagguuaugaacaucgugcugauugcccucagccuucuggcuaucuugaaggggguauacaauguggcaacaugcggauuauucggucuggucuccuuucuacuccuguguggcagaucuugcucaacuacguauaaagggguguacgaacuucagacccuggaguuggacauggccagucucaacaugacaaugccucugagcuguacuaagaauaacucccaucacuauauuaugguuggaaaugauaccggccuggaacucacauuaaccaacacuucuaucauaaaucauaaauucugcaaccugucggacgcgcacaagaaaaaucuuuacgaucaugcuuugaugucaaucauuagcacauuucaccugaguaucccaaacuucaaucaguaugaggccauguccugugacuuuaacggugggaagauuucugugcaguacaaucuaagccacgcauaugccgucgaugcugcaucccauugcggaaccaucgccaacggcgugcuccaaacguucaugaggauggcuuggggcgggucauacauagcccuggacaguggaugcgguagcugggauuguauuaugacuucuuaccaguaucuuaucauucagaauaccacaugggaggaccacugccaguuuucccggccgucacccaucggcuaccugggguugcucagccaacgcacucgagauaucuauauuagucguagacgccggggaaccuucacauggacccugucugacuccgaaggcaacgagacgccugguggguacugucucacuagguggaugcuuauagaagcggagcugaaaugcuuuggaaacacagcaguagccaaguguaaugagaaacaugaugaagaguucugcgacauguugcggcuauuugauuucaacaagcaggcuauccgcagacugaaaacccccgcccagaugagcauucagcucaucaauaaggcaguuaacgcucugauaaaugaccaacuuauuaugaagaaccaccugagggacaucaugugcaucccauauugcaauuacucgaaauauugguacuugaaccacacugugacaggcaagaccucucucccccgguguuggcuggucuccaaugggucauacuuaaacgagacgcauuucagugaugacauugaacagcaggccgauaauaugaucaccgagcugcuacaaaaagaguauauggaccgccagggaaagacaccucucggucugguggaucuuuuuguguucagcacuuccuuuuacuugauuucuauauuccugcaccucgucaaaaucccaacccaucgacacauuaucggcaagcccugcccuaaaccacauagacugaaccacauggggaucuguagcugcggacuuuauaagcacccgggcguucccgugaaguggaaaagguga

SEQ ID NO: 4969 - RNA, 1473 nt, Artificial Sequence
  derived and/or modified protein sequence (opt3) from LASV(LASV241-NIG-2011;Clade II)__AIT17646__GPCstabilized
augggccagaucauuaccuucuuucaagaggugccccacgucauagaagagguuaugaacaucgugcugauugcccucagccuucuggcuaucuugaaggggauuuacaauguagcaacaugcggauuauucggucugguguccuuucuacuccuguguggcagaucuugcucaacuacguauaaaggggucuacgaacuucagacccuggaguuggacauggccagucucaacaugacaaugccucugagcuguacuaagaauaacucccaucacuauaucauggugggaaaugaaaccggccuggagcucacauuaaccaacacuucuauaaucaaucauaaauucugcaaccugucggaugcgcacaagaaaaaucuuuacgaccaugcuuugaugucaauuaucagcacauuucaccugaguauuccaaacuucaaucaguaugaggccauguccugugauuuuaacggugggaagaucucuguucaguacaaucuaagccacgcauaugccguggacgcugcaucccauugcggaaccgucgccaacggcgugcuccaaacguucaugaggauggcuuggggcgggucauacauagcccuggauaguggaugcgguagcugggacuguauuaugacuucuuaccaguaucuuaucauucagaauaccacaugggaagaucacugccaguuuucccggccgucacccaucggcuaccugggguugcucagccaacgcacucgagacaucuauauuagucguagacgccggggaaccuucacauggacccugucugauuccgagggcaacgaaacgccugguggguacugucucacuagguggaugcuuauagaggcggagcugaaaugcuuuggaaacacagcaguagccaaguguaaugaaaaacaugacgaggaguucugcgauauguugcggcuauuugacuucaacaagcaggcuauccgcagacugaaaacccccgcccagaugagcauucagcucaucaauaaggcaguuaacgcucugauaaaugaucaacuuauuaugaagaaccaccugagggacaucaugugcaucccauauugcaauuacucgaaauauugguacuugaaccacacugugacaggcaagaccucucucccccgguguuggcuggucuccaaugggucauacuuaaacgaaacgcauuucagugacgauauugagcagcaggccgacaauaugaucaccgagcugcuacaaaaagaauauauggaucgccagggaaagacaccucucggucugguggaccuuuuuguguucagcacuuccuuuuacuugauuucuauauuccugcaccucgucaaaaucccaacccaucgacacguuauuggcaagcccugcccuaaaccacauagacugaaccacauggggaucuguagcugcggacuuuauaagcacccgggcgugcccguaaaguggaaaagguga

SEQ ID NO: 4970 - RNA, 1473 nt, Artificial Sequence
  derived and/or modified protein sequence (opt3) from LASV(LASV242-NIG-2010;Clade II)__AIT17650__GPCstabilized
augggccagaucauuaccuucuuucaagaggugccccacgucauagaagagguuaugaacaucgugcugauugcccucagccuucuggcuaucuugaaggggauuuacaauguagcaacaugcggauuauucggucugguguccuuucuacuccuguguggcagaucuugcucaacuacguauaaaggggucuacgaacuucagacccuggaguuggacauggccagucucaacaugacaaugccucugagcuguacuaagaauaacucccaucacuauaucauggugggaaaugaaaccggccuggagcucacauuaaccaacauaucuaucauuaaucauaaauucugcaaccugucggaugcgcacaagaaaaaucuuuacgaccaugcuuugaugucaaucauuagcacuuuucaccugaguaucccaaacuucaaucaguaugaggccauguccugugauuuuaacggugggaagauaucuguucaguacaaucuaagccacacauaugcaguggacgccgcuaaccauugcggaaccauugcaaauggcguccuccaaacguucaugaggauggccuggggcggguccuacaucgcucuggauucaggaugcgguaguugggacuguauuaugacuagcuaccaguaucuuaucauccagaacaccacaugggaagaucacugccaguuuucucggccgucccccauuggcuaccugggguugcucucacaacgcacucgagacauauauaucagccguagacgccggggaaccuucacauggacccugagugauucugagggcaacgaaacgccugguggguacugucucacuagguggaugcuuauugaggccgagcugaaaugcuuuggaaauacagcgguggcaaaguguaacgaaaaacaugacgaggaguucugcgauauguugcggcuauuugacuucaauaagcaggccauccgcagacugaaagcucccgcccagauguccauacagcucauuaacaaggcaguaaaugcucugaucaacgaucaacuuaucaugaagaaucaccugagggacauuaugugcaucccauauugcaacuacagcaaauauugguacuugaaucacaccguuacuggccggacaucgcucccccgcuguuggcuggugucuaacggguccuacuuaaaugaaacccauuucucagacgauauugagcagcaggccgacaacaugauaacggagcugcuacaaaaggaauauaucgaucgacagggaaaaaccccucucggucuggucgaccuuuuuguguucaguacuagcuuuuacuugauuuccaucuuccugcaccucgugaagaucccaacacauagacacauuauaggcaaacccugcccuaagccacauaggcugaaucacauggggaucuguucuugcggacuuuauaaacacccgggcguccccguuaaguggaagcgguga

SEQ ID NO: 4971 - RNA, 1473 nt, Artificial Sequence
  derived and/or modified protein sequence (opt3) from LASV(LASV246-NIG-2010;Clade II)__AIT17658__GPCstabilized
augggccagaucauuaccuucuuucaagaggugccccacgucauagaagagguuaugaacaucgugcugauugcccucagccuucuggcuaucuugaaggggguauacaauguggcaacaugcggauuauucggucuggucuccuuucuacuccuguguggcagaucuugcucaauuacuuauaaagggguguacgaacuucagacgcuggaguuggacauggccaaccucaauaugaccaugccucugaguuguacaaagaacaauagccaucacuauaucaugguuggaaacgaaacuggccuggagcucaccuuaacaaauaccuccauaaucaaccauaaauucugcaaucugucugaugcgcacaagaaaaaccuuuacgaccaugcuuugaugucgauuaucucaacuuuucaccugagcauuccaaauuucaaccaguaugaggccaugaguugugauuuuaauggugggaagaucuccgugcaguacaaccuaucucacacauaugcaggagacgccgcugaucauugcggcaccauagcaaauggcguccuccaaacguucaugaggauggccuggggagggagcuacauugcucuggacuccgguugcggcucaugggauuguaucaugaccaguuaccaguaucuuauuauccagaacacuacaugggaagaccacugccaguuuagccggccgucucccaugggguaccugggauugcucucccaacgcacucgagauaucuauauuucacguagacgccggggcaccuucacauggacccugagcgacagugaggguaacgaaacgccugggggauacugucucacuagguggaugcuuauagaggccgagcugaaaugcuuuggcaauacagcgguggcaaaguguaacgaaaaacaugaugaggaguucugcgacauguugcggcuauuugauuucaauaagcaggccauccgcagacugaaaacccccgcucagaugucuauucagcucaucaacaaggccguaaaugcacugauaaacgaccaacuuauuaugaagaaucaccugagggacaucaugugcaucccauauugcaacuacuccaaauauugguacuugaaucacacuauuacagggaagaccagccucccccgguguuggcugguuucgaacggaucuuacuuaaaugaaacgcauuucuccgaugacaucgagcagcaggcugauaacaugauuaccgagcugcuacaaaaagaauauauagaccgccaggguaagacaccucucggccugguggaucuuuuugucuucucaaccaguuuuuacuugaucagcauuuuccugcaccucgugaaaaucccaacucaucgacacaucacagggaagcccugcccuaaaccacauagacugaaucacaugggaauuuguuccugcggccuuuauaagcacccgggugugcccgucagguggaagcgguga

SEQ ID NO: 4972 - RNA, 1473 nt, Artificial Sequence
  derived and/or modified protein sequence (opt3) from LASV(LASV251-NIG-2010;Clade II)__AIT17666__GPCstabilized
augggccagaucgugaccuucuuucaagaggucccccacguuauugaagaggugaugaacauaguacugaucgcccucagccuucuggcuauuuugaaggggaucuacaauguggcaacaugcggauuauucggucuggucuccuuucuacuccuguguggcagaucuugcucaacuacguauaaagggguguacgaacuucagacccuggaguuggacauggccagucucaacaugacaaugccucugagcuguacuaagaauaacucccaucacuauauuaugguuggaaaugaaaccggccuggagcucacauuaaccaacacuucuaucauaaaucauaaauucugcaaccugucggaugcgcacaagaaaaaucuuuacgaccaugcuuugaugucaaucauuagcacauuucaccugaguaucccaaacuucaaucaguaugaggccauguccugugauuuuaacggugggaagauuucugugcaguacaaucuaagccacaccuaugcagucgacgccgcuaaccauugcggaacgaucgcaaauggcgugcuccaaacuuucaugaggauggccuggggcggguccuacauagcucuggauucaggaugcgguaguugggacuguauuaugaccagcuaccaguaucuuaucauucagaacacaacuugggaagaucacugccaguuuucucggccgucccccaucggcuaccugggguugcucucacaacgcacccgagacaucuauauuagccguagacgccggggaacauucaccuggacgcugagugauucugagggcaacgaaacuccugguggguacugucucacaagguggaugcuuauagaggccgagcugaaaugcuuuggaaauaccgcgguagcaaaguguaacgaaaaacaugacgaggaguucugcgauauguugcggcuauuugacuucaauaagcaggccauccgcagacugaaaacucccgcucagauguccauucagcucaucaacaaggccguuaaugcacugauaaacgaucaacuuauuaugaagaaucaccugagggacaucaugugcaucccauauugcaacuacagcaaauauugguacuugaaucacacagugaccggcaagacgucgcucccccgguguuggcuggucucuaacggguccuacuuaaaugaaacccauuucucagacgauauugagcagcaggcugacaacaugaucacagagcugcuacaaaaagaauauauggaucgccagggaaagacuccucucggucugguggaccuuuuuguguucaguaccagcuuuuacuugauuuccauauuccugcaccucgucaaaaucccaacacaucgacacauuacuggcaagcccugcccuaaaccacauagacugaaucacauggggaucuguucuugcggacuuuauaagcacccgggcguucccgugaaguggaaaagguga

SEQ ID NO: 4973 - RNA, 1473 nt, Artificial Sequence
  derived and/or modified protein sequence (opt3) from LASV(LASV253-NIG-2011;Clade II)__AIT17670__GPCstabilized
augggccagaucauuaccuucuuucaagaggugccccacgucauagaagagguuaugaacaucgugcugauugcccucagccuucuggcuaucuugaaggggauuuacaauguagcaacaugcggauuauucggucugguguccuuucuacuccuguguggcagaucuugcucaacuacguauaaaggggucuacgaacuucagacccuggaguuggacauggccagucucaacaugacaaugccucugagcuguacuaagaauaacucccaucacuauaucauggugggaaaugaaaccggccuggagcucacauuaaccaacacuucuauaaucaaucauaaauucugcaaccugucggaugcgcacaagaaaaaucuuuacgaccaugcuuugaugucaauuaucagcacauuucaccugaguauuccaaacuucaaucaguaugaggccauguccugugauuuuaacggugggaagaucucuguucaguacaaucuaagccacaccuaugcaguggacgccgcuaaccauugcggaacgauagcaaauggcguccuccaaacuuucaugaggauggccuggggcggguccuacauugcucuggauucaggaugcgguaguugggacuguaucaugaccagcuaccaguaucuuauuauccagaacacaacuugggaagaucacugccaguuuucucggccgucccccaucggcuaccugggguugcucucacaacgcacccgagacauuuauauaagccguagacgccggggaacauucaccuggacgcugagugauucugagggcaacgaaacuccugguggguacugucucacaagguggaugcuuaucgaggccgagcugaaaugcuuuggaaauaccgcgguggcaaaguguaacgaaaaacaugacgaggaguucugcgauauguugcggcuauuugacuucaauaagcaggccauucgcagacugaaagcucccgcccagauguccauccagcucauaaacaaggcaguaaaugcucugauuaacgaucaacuuaucaugaagaaucaccugagggacaucaugugcauuccauauugcaacuacagcaaauauugguacuugaaucacacuguuacaggccggaccucgcucccccgcuguuggcuggugucuaacggguccuacuuaaaugaaacgcauuucucagacgauaucgagcagcaggccgacaacaugauuaccgagcugcuacaaaaggaauauauagaucgacagggaaaaacaccucucggucuggucgaccuuuuuguguucaguacuagcuuuuacuugaucuccauuuuccugcaccucgugaagaucccaacccauagacacaucauuggcaaacccugcccuaagccacauaggcugaaucacauggggauauguucuugcggacuuuauaaacacccgggcguccccguuaaguggaagcgguga

SEQ ID NO: 4974 - RNA, 1473 nt, Artificial Sequence
  derived and/or modified protein sequence (opt3) from LASV(LASV254-NIG-2011;Clade II)__AIT17674__GPCstabilized
augggccagaucauuaccuucuuucaagaggugccccacgucauagaagagguuaugaacaucgugcugauugcccucagccuucuggcuaucuugaaggggauuuacaauguagcaacaugcggauuauucggucugguguccuuucuacuccuguguggcagaucuugcucaacuacguauaaaggggucuacgaacuucagacccuggaguuggacaugacaaaccucaauaugacuaugccucugaguuguaccaagaacaauagccaucacuauaucauggugggaaacgaaacaggccuggagcucaccuuaacuaauacauccauaaucaaccauaaauucugcaaucugucugaugcccacaagaaaaaccuuuacaaucaugcguugaugucgauuaucucaaccuuucaccugagcauuccaaacuucaaucaguaugaggcuaugaguugugacuuuaacggugggaagaucuccguucaguacaaucuaucucacagcuaugccguggaugcagccaaccauugcggaacgauagcuaacggcguccuccaaacuuucaugaggauggcauggggcggguccuacauugcccuggacucaggaugcgguaauugggauuguaucaugaccaguuaccaguaucuuauuauccagaacacaacuugggaagaccacugccaguuuagccggccgucucccaucggcuaccugggguugcucucccaacgcacccgagauauuuauauaucacguagacgccggggaacauucaccuggacgcugagcgacagugagggcaaugaaacuccugguggguacugucucacaagguggaugcuuaucgaggcugagcugaaaugcuuuggaaacaccgccguggcgaaguguaaugaaaaacaugaugaggaguucugcgacauguugcggcuauuugauuucaacaagcaggcaauucgcagacugaaaacucccgcccaggcuaauauccagcucauaaacaaggccguaaaugcacugauuaacgaccaacuuaucaugaagaaucaccugagggauaucaugugcauuccauauugcaacuacucuaaauauugguacuugaaucacacaguuaccggcaagacgucccucccccgguguuggcuggugagcaacgggucguacuuaaaugaaacccauuucucugacgacaucgagcagcaggcugauaacaugauuacagagcugcuacaaaaagaauauauggaccgccagggaaagacuccucucggucuggucgaucuuuuuguguucuccaccucauuuuacuugauaaguaucuuccugcaccucgugaaaauuccaacacaucgacacgucaucggcaagcccugcccuaaaccacauagacugaaccacauggggaucuguagcugcggacuuuauaagcacccgggcguucccgugaaguggaaaagguga

SEQ ID NO: 4975 - RNA, 1473 nt, Artificial Sequence
  derived and/or modified protein sequence (opt3) from LASV(LASV256-NIG-2010;Clade II)__AIT17678__GPCstabilized
augggccagaucauuaccuucuuucaagaggugccccacgucauagaagagguuaugaacaucgugcugauuacacucagccuucuggccaucuugaaggggauuuacaauaucgcuacuugcggauuauucggucugguauccuuucuacuccuguguggcagaucuugcucaacgaccuauaaagggguguacgaacuucagacacuggaguuggacaugaccagucucaacaugacuaugccucugagcuguacaaagaauaacucccaucacuauauaauggucggaaaugaaaccggccuggagcucacuuuaacaaacaccucuaucauuaaucauaaauucugcaaccugucggaugcacacaagaaaaaucuuuacgaccaugccuugaugucaaucauuagcacguuucaccugaguaucccaaacuucaaucaguaugaggcgauguccugugauuuuaacggugggaagauaucugugcaguacaaucuaagccacacuuaugcuguugacgccgcaaaccauugcggaaccauugccaauggcgugcuccaaacauucaugaggauggcuuggggcggguccuacaucgcacuggauucaggaugcgguaguugggacuguauuaugacuagcuaccaguaucuuaucauccagaacaccacaugggaagaucacugccaguuuucucggccgucccccauuggcuaccugggguugcucucacaacgcacccgagacauauauaucagccguagacgccggggaacguucacuuggacacugagugauucugagggcaacgaaaccccugguggguacugucucacuagguggaugcuuauugaggccgagcugaaaugcuuuggaaauacagcugucgccaaguguaacgaaaaacaugacgaggaguucugcgauauguugcggcuauuugacuucaauaagcaggcgauccgcagacugaaaacccccgcacagauguccauacagcucauuaacaaggccgugaaugcucugaucaacgaucaacuuaucaugaagaaucaccugagggacauuaugugcaucccauauugcaacuacagcaaauauugguacuugaaucacacgguaaccggcaagacaucgcucccccgguguuggcugguuucuaacggguccuacuuaaaugaaacucauuucucagacgauauugagcagcaggccgacaacaugauaaccgagcugcuacaaaaagaauauaucgaucgccagggaaagacaccucucggucugguggaccuuuuugucuucaguacuagcuuuuacuugauuuccaucuuccugcaccucgugaaaaucccaacccaucgacacauuauaggcaagcccugcccuaaaccacauagacugaaucacauggggaucuguucuugcggacuuuauaagcacccgggcauucccgugaaguggaaaagguga

SEQ ID NO: 4976 - RNA, 1473 nt, Artificial Sequence
  derived and/or modified protein sequence (opt3) from LASV(LASV267-NIG-2010;Clade II)__AIT17686__GPCstabilized
augggccagaucauuaccuucuuucaagaggugccccacgucauagaagagguuaugaacaucgugcugauugcccucagccuucuggcuaucuugaaggggauuuacaauguagcaacaugcggauuauucggucugguguccuuucuacuccuguguggcagaucuugcucaacuacguauaaaggggucuacgaacuucagacccuggaguuggacauggccagucucaacaugacaaugccucugagcuguacuaagaauaacucccaucacuauaucauggugggaaaugaaaccggccuggagcucacauuaaccaacacuucuauaaucaaucauaaauucugcaaccugucggaugcgcacaagaaaaaucuuuacgaccaugcuuugaugucaauuaucagcacauuucaccugaguauuccaaacuucaaucaguaugaggccauguccugugauuuuaacggugggaagaucucuguucaguacaaucuaagccacaccuaugcaguggacgccgcuaaccauugcggaacgauagcaaauggcguccuccaaacuuucaugaggauggccuggggcggguccuacauugcucuggauucacggugcggaaguugggacuguaucaugaccagcuaccaguaucuuauuauccagaacacaacuugggaagaucacugccaguuuucucgcccgucccccaucgguuaccugggcuugcucucacaacgaacccgugacauuuauauaagcagaaggcgccgggggacauucaccuggacgcugagugauucugagggaaacgaaacuccuggcgguuacugucucacacgguggaugcuuaucgaggccgagcugaaaugcuuugggaauaccgcgguggcaaaguguaacgaaaaacaugacgaggaguucugcgauauguugcgccuauuugacuucaauaagcaggccauuagaaggcugaaaacucccgcucagauguccauccagcucauaaacaaggccguaaaugcacugauuaacgaucaacuuaucaugaagaaucaucugcgggacaucaugugcauuccauauugcaacuacagcaaauauugguacuugaaucacacaguuaccggaaagacgucgcucccccgcuguuggcuggugucuaacggcuccuacuuaaaugaaacccacuucucagacgauaucgagcagcaggcugacaacaugauuacagagcugcuacaaaaagaauauauggaucgacaggggaagacuccucucggacuggucgaccuuuuuguguucaguaccagcuuuuacuugauauccaucuuccugcaccucauuaaaaucccaacacauagacacgugaucgguaagcccugcccuaaaccacauaggcugaaucacaugggcauuuguucuugcgggcuuuauaagcacccgggaguccccguuaaguggaaacgguga

SEQ ID NO: 4977 - RNA, 1473 nt, Artificial Sequence
  derived and/or modified protein sequence (opt3) from LASV(LASV271-NIG-2010;Clade II)__AIT17690__GPCstabilized
augggccagaucauuaccuucuuucaagaggugccccacgucauagaagagguuaugaacaucgugcugauugcccucagccuucuggcuaucuugaaggggauuuacaauguagcaacaugcggauuauucggucugguguccuuucuacuccuguguggcagaucuugcucaacuacguauaaaggggucuacgaacuucagacccuggaguuggacauggccagucucaacaugacaaugccucugagcuguacuaagaauaacucccaucacuauaucauggugggaaaugaaaccggccuggagcucacauuaaccaacacuucuauaaucaaucauaaauucugcaaccugucggaugcgcacaagaaaaaucuuuacgaccaugcuuugaugucaauuaucagcacauuucaccugaguauuccaaacuucaaucaguaugaggccauguccugugauuuuaacggugggaagaucucuguucaguacaaucuaagccacgcauaugccguggacgcugcaucccauugcggaaccgucgccaacggcgugcuccaaacguucaugaggauggcuuggggcgggucauacauagcccuggauaguggaugcgguagcugggacuguauuaugacuucuuaccaguaucuuaucauucagaauaccacaugggaagaucacugccaguuuucccggccgucacccaucggcuaccugggguugcucagccaacgcacucgagacaucuauauuagucguagacgccggggaaccuucacauggacccugucugauuccgagggcaacgaaacgccugguggguacugucucacuagguggaugcuuauagaggcggagcugaaaugcuuuggaaacacagcaguagccaaguguaaugaaaaacaugacgaggaguucugcgauauguugcggcuauuugacuucaacaagcaggcuauccgcagacugaaaacccccgcccagaugagcauucagcucaucaauaaggcaguuaacgcucugauaaaugaucaacuuauuaugaagaaccaccugagggacaucaugugcaucccauauugcaauuacucgaaauauugguacuugaaccacacugugacaggccggaccucucucccccgcuguuggcuggucuccaaugggucauacuuaaacgaaacgcauuucagugacgauauugagcagcaggccgacaauaugaucaccgagcugcuacaaaaggaauauauggaucgacagggaaaaacaccucucggucugguggaccuuuuuguguucagcacuuccuuuuacuugauuucuauauuccugcaccucgucaagaucccaacccauagacacguuauuggcaaacccugcccuaagccacauaggcugaaccacauggggaucuguagcugcggacuuuauaaacacccgggcgugcccguaaaguggaagcgguga

SEQ ID NO: 4978 - RNA, 1473 nt, Artificial Sequence
  derived and/or modified protein sequence (opt3) from LASV(LASV274-NIG-2010;Clade II)__AIT17694__GPCstabilized
augggccagaucauuaccuucuuucaagaggugccccacgucauagaagagguuaugaacaucgugcugauugcccucagccuucuggcuaucuugaaggggauuuacaauguagcaacaugcggauuauucggucugguguccuuucuacuccuguguggcagaucuugcucaacuaucuauaaaggggucuacgaacuucagacgcuggaguuggacauggccagucucaacaugaccaugccucugagcuguacaaagaauaacucccaucacuauauaauggugggaaaugaaacuggccuggagcucaccuuaacaaacaccucuaucauuaaucauaaauucugcaaccugucggaugcgcacaagaaaaaucuuuacgaccaugcuuugaugucaaucauuagcacuuuucaccugaguaucccaaacuucaaucaguaugaggccauguccugugauuuuaacggugggaagauaucuguucaguacaaucuaagccacacauaugcaguggacgccgcuaaccauugcggaaccauugcaaauggcguccuccaaacguucaugaggauggccuggggcggguccuacaucgcucuggauucaggaugcgguaguugggacuguauuaugacuagcuaccaguaucuuaucauccagaacaccacaugggaagaucacugccaguuuucucggccgucccccauuggcuaccugggguugcucucacaacgcacucgagacauauauaucagccguagacgccggggaaccuucacauggacccugagugauucugagggcaacgaaacgccugguggguacugucucacuagguggaugcuuauugaggccgagcugaaaugcuuuggaaauacagcgguggcaaaguguaacgaaaaacaugacgaggaguucugcgauauguugcggcuauuugacuucaauaagcaggccauccgcagacugaaaacccccgcucagauguccauacagcucauuaacaaggccguaaaugcacugaucaacgaucaacuuaucaugaagaaucaccugagggacauuaugugcaucccauauugcaacuacagcaaauauugguacuugaaucacacuguuacaggcaagaccucgcucccccgguguuggcuggugucuaacggguccuacuuaaaugaaacgcauuucucagacgauauugagcagcaggcugacaacaugauaaccgagcugcuacaaaaagaauauaucgaucgccagggaaagacaccucucggucuggucgaccuuuuuguguucaguacuagcuuuuacuugauuuccaucuuccugcaccucgugaaaaucccaacccaucgacacgucguuggcaagcccugcccuaaaccacauagacugaaucacauggggauuuguucuugcggacuuuauaagcacccgggcgugcccguaaaguggaaaagguga

SEQ ID NO: 4979 - RNA, 1473 nt, Artificial Sequence
  derived and/or modified protein sequence (opt3) from LASV(LASV719-NIG-2009;Clade II)__AIT17704__GPCstabilized
augggccagaucauuaccuucuuucaagaggugccccacgucauagaagagguuaugaacaucgugcugauugcccucagccuucuggcuaucuugaaggggauuuacaauguagcaacaugcggauuauucggucugguguccuuucuacuccuguguggcagaucuugcucaacuacguauaaaggggucuacgaacuucagacccuggaguuggacauggccagucucaacaugacaaugccucugagcuguacuaagaauaacucccaucacuauaucauggugggaaaugaaaccggccuggagcucacauuaaccaacacuucuauaaucaaucauaaauucugcaaccugucggaugcgcacaagaaaaaucuuuacgaccaugcuuugaugucaauuaucagcacauuucaccugaguauuccaaacuucaaucaguaugaggccauguccugugauuuuaacggugggaagaucucuguucaguacaaucuaagccacaccuaugcaguggacgccgcuaaccauugcggaacgauagcaaauggcguccuccaaacuuucaugaggauggccuggggcggguccuacauugcucuggauucaggaugcgguaguugggacuguaucaugaccagcuaccaguaucuuauuauccagaacacaacuugggaagaucacugccaguuuucucggccgucccccaucggcuaccugggguugcucucacaacgcacccgagacauuuauauaagccguagacgccggggaacauucaccuggacgcugagugauucugagggcaacgaaacuccugguggguacugucucacaagguggaugcuuaucgaggccgagcugaaaugcuuuggaaauaccgcgguggcaaaguguaacgaaaaacaugacgaggaguucugcgauauguugcggcuauuugacuucaauaagcaggccauucgcagacugaaaacucccgcucagauguccauccagcucauaaacaaggccguaaaugcacugauuaacgaucaacuuaucaugaagaaucaccugagggacaucaugugcauuccauauugcaacuacagcaaauauugguacuugaaucacacaguuaccggcaagacgucgcucccccgguguuggcuggugucuaacggguccuacuuaaaugaaacccauuucucagacgauaucgagcagcaggcugacaacaugauuacagagcugcuacaaaaagaauauauagaucgccagggaaagacuccucucggucuggucgaccuuuuuguguucaguaccagcuuuuacuugaucuccauuuuccugcaccucgugaaaaucccaacacaucgacacgucaucggcaagcccugcccuaaaccacauagacugaaucacauggggauuuguucuugcggacuuuauaagcacccgggcguucccgugaaguggaaaagguga

SEQ ID NO: 4980 - RNA, 1473 nt, Artificial Sequence
  derived and/or modified protein sequence (opt3) from LASV(LASV738-NIG-2009;Clade II)__AIT17712__GPCstabilized
augggccagaucauuaccuucuuucaagaggugccccacgucauagaagagguuaugaacaucgugcugauugcccucagccuucuggcuaucuugaaggggauuuacaauguagcaacaugcggauuauucggucugguguccuuucuacuccuguguggcagaucuugcucaacuacguauaaaggggucuacgaacuucagacccuggaguuggacauggccagucucaacaugacaaugccucugagcuguacuaagaauaacucccaucacuauaucauggugggaaaugaaaccggccuggagcucacauuaaccaacacuucuauaaucaaucauaaauucugcaaccugucggaugcgcacaagaaaaaucuuuacgaccaugcuuugaugucaauuaucagcacauuucaccugaguauuccaaacuucaaucaguaugaggccauguccugugauuuuaacggugggaagaucucuguucaguacaaucuaagccacaccuaugcaguggacgccgcuaaccauugcggaacgauagcaaauggcguccuccaaacuuucaugaggauggccuggggcggguccuacauugcucuggauucaggaugcggugccugggacuguaucaugaccaguuaccaguaucuuauuauccagaacacaacuugggaagaucacugccaguuuagccggccgucucccaucggcuaccugggguugcucucccaacgcacccgagacauuuauauaucacguagacgccggggaacauucaccuggacgcugagcgauagugagggcaacgaaacuccugguggguacugucucacaagguggaugcuuaucgaggcggagcugaaaugcuuuggaaauaccgcaguggccaaguguaacgaaaaacaugacgaggaguucugcgauauguugcggcuauuugacuucaauaagcaggcuauuaugcgccugaaaacucccgcccagaugucuauccagcucauaaacaaggcaguaaaugcucugauuaacgaucaacuuaucaugaagaaucaccugagagacaucaugugcauuccauauugcaacuacuccaaauauugguacuugaaucacacaguuaccggcaagacgagccuccccagguguuggcuggugucgaacgggucuuacuuaaaugaaacccauuucuccgacgauaucgagcagcaggccgacaacaugauuacagagaugcugcaaaaagaauauauagaucggcagggaaagacuccucuaggucucgucgaccuguuuguguucucaaccaguuuuuaccuuaucagcauuuucuugcaccuggugaaaaucccaacacaucgccacgucaucggcaagcccugcccuaaaccacaucgacucaaucacauggggauuuguuccugcggacuguauaagcacccgggcguucccgugagauggaagagguga

SEQ ID NO: 4981 - RNA, 1473 nt, Artificial Sequence
  derived and/or modified protein sequence (opt3) from LASV(LASV966-NIG-2009;Clade II)__AIT17718__GPCstabilized
augggccagaucauuaccuucuuucaagaggugccccacgucauagaagagguuaugaacaucgugcugauugcccucagccuucuggcuaucuugaaggggauuuacaauguagcaacaugcggauuauucggucugguguccuuucuacuccuguguggcagaucuugcucaacuacguauaaaggggucuacgaacuucagacccuggaguuggacauggccagucucaacaugacaaugccucugagcuguacuaagaauaacucccaucacuauaucagggugggaaaugaaaccggccuggagcucacauuaaccaacgcgucuauaaucaaucauaaauucugcaaccugucggaugcucacaagaaaaaucuuuacgaccaugccuugaugucaauuaucagcacuuuucaccugaguauuccaaacuucaaucaguaugaggcaauguccugugauuuuaacggugggaagaucucuguucaguacaaucuaagccacgccuaugcuauagacgcagccaaccauugcggaacaguggcuaauggcguccuccaaaccuucaugcggauggccuggggcggguccuacauugcgcuggauucaggaugcgguaacugggacuguaucaugacgaguuaccaguaucuuauuauccagaacacuaccugggaagaucacugccaguuuagccgaccgucucccaucggcuaccugggguugcucucccaacguacaagagacauuuauauaucaaggcggcgccggggaacuuucaccuggacacugagcgauagugagggcaaugaaaccccugguggguacugucucacgcgcuggaugcuuaucgaggcagagcugaagugcuuuggaaacacugccguggcuaaauguaaugaaaagcaugacgaggaguucugcgauauguugagacuauuugacuucaacaaacaggccauuaggcggcugaagacacccgcacagaugucuauccagcucauaaauaaagcuguaaacgcccugauuaaugaucaacuuaucaugaagaaccaucugcgcgacaucaugugcauuccauauugcaauuacuccaaguauugguacuugaaccacaccguuacuggcaaaacaagccucccccgauguuggcuggugucgaaugggucuuacuuaaacgaaacccacuucuccgacgauaucgagcagcaggcggacaauaugauuacggagcugcuacaaaaggaauauauggauagacagggaaaaaccccucucggucuggucgaccuuuuuguguucucaacaaguuuuuacuugauaagcaucuuccugcaccucgugaagauuccaacucauaggcacgucaucggcaaacccugcccuaagccacaucggcugaaccacauggggaucuguuccugcggauuuuauaaacacccgggcguucccgugaaguggaagcguuga

SEQ ID NO: 4982 - RNA, 1473 nt, Artificial Sequence
  derived and/or modified protein sequence (opt3) from LASV(LASV969-NIG-2009;Clade II)__AIT17724__GPCstabilized
augggccagaucauuaccuucuuucaagaggugccccacgucauagaagagguuaugaacaucgugcugauugcccucagccuucuggcuaucuugaaggggauuuacaauguagcaacaugcggauuauucggucugguguccuuucuacuccuguguggcagaucuugcucaacuacguauaaaggggucuacgaacuucagacccuggaguuggacauggccaaccucaauaugacaaugccucugaguuguacuaagaacaauagccaucacuauaucauggugggaaacgaaaccggccuggagcucacauuaaccaauacuuccauaaucaaccauaaauucugcaaucugucugaugcgcacaagaaaaaccuuuacgaccaugcuuugaugucgauuaucucaacauuucaccugagcauuccaaauuucaaccaguaugaggccaugaguugugauuuuaauggugggaagaucuccguucaguacaaccuaucucacaccuaugcaguggacgccgcuaaucauugcggaacggucgcaaacggcgugcuccaaacuuucaugaggauggccuggggcgggagcuacauagcucuggauuccggaugcgguucaugggacuguauuaugaccaguuaccaguaucuuaucauucagaacacaacuugggaagaucacugccaguuuagccggccgucucccaucggcuaccugggguugcucucccaacgcacccgagacaucuauauuucacguagacgccggggaacauucaccuggacgcugagcgauagugagggcaaugaaacuccugguggguacugucucacaagguggaugcuuauagaggccgagcugaaaugcuuuggaaacaccgcgguagcaaaguguaaugaaaaacaugacgaggaguucugcgauauguugcggcuauuugacuucaacaagcaggccauccgcagacugaaaacucccgcucagaugucuauucagcucaucaauaaggccguuaacgcacugauaaaugaucaacuuauuaugaagaaccaccugagggacaucaugugcaucccauauugcaauuacuccaaauauugguacuugaaccacacagugaccggcaagacgagccucccccgguguuggcuggucucgaaugggucuuacuuaaacgaaacccauuucuccgacgauauugagcagcaggcugacaauaugaucacagagcugcuacaaaaagaauauauggaucgccagggaaagacuccucucggucugguggaccuuuuuguguucucaaccaguuuuuacuugauuagcauauuccugcaccucgucaaaaucccaacacaucgacacauuaugggcaagcccugcccuaaaccacauagacugaaccacauggggaucuguuccugcggacuuuauaagcacccgggcguucccgugaaguggaaaagguga

SEQ ID NO: 4983 - RNA, 1473 nt, Artificial Sequence
  derived and/or modified protein sequence (opt3) from LASV(LASV971-NIG-2009;Clade II)__AIT17728__GPCstabilized
augggccagaucauuaccuucuuucaagaggugccccacgucauagaagagguuaugaacaucgugcugauugcccucagccuucuggcuaucuugaaggggauuuacaauguagcaacaugcggauuauucggucugguguccuuucuacuccuguguggcagaucuugcucaacuacguauaaaggggucuacgaacuucagacccuggaguuggacaugggaagucucaacaugacaaugccucugagcuguacuaagaauaacucccaucacuauaucauggugggcaaugaaaccggucuggagcucacauuaaccaacacuucuauaaucaaucauaaauucugcaaccugucggaugcccacaagaaaaaucuuuacgaccaugcguugaugucaauuaucagcacauuucaccugaguauuccaaacuucaaucaguaugaggcuauguccugugauuuuaacgggggaaagaucucuguucaguacaaucuaagccacaccuaugccguggacgcagccaaccauugcggcacgauagcuaauggcguccuccaaacuuucaugaggauggcauggggaggguccuacauugcccuggauucagguugcggcaguugggacuguaucaugaccagcuaccaguaucuuauuauccagaacacaacuugggaagaucacugccaguuuucucggccgucccccaucggguaccugggauugcucucacaacgcacccgagacauuuauauaagccguagacgccggggcacauucaccuggacgcugagugauucugaggguaacgaaacuccugggggauacugucucacaagguggaugcuuaucgaggcugagcugaaaugcuuuggcaauaccgccguggcgaaguguaacgaaaaacaugacgaggaguucugcgauauguugcggcuauuugacuucaauaagcaggcaauucgcagacugaaaacucccgcccagauguccauccagcucauaaacaaggcuguaaaugcccugauuaacgaucaacuuaucaugaagaaucaccugagggacaucaugugcauuccauauugcaacuacagcaaauauugguacuugaaucacacaguuaccgggaagacgucgcucccccgguguuggcuggugucuaacggauccuacuuaaaugaaacccauuucucagacgauaucgagcagcaggcagacaacaugauuacagagcugcuacaaaaagaauauauggaucgccaggguaagacuccucucggccuggucgaccuuuuuguguucaguaccagcuuuuacuugauauccaucuuccugcaccucgugaaaauuccaacacaucgacacgucaucgggaagcccugcccuaaaccacauagacugaaucacaugggaaucuguucuugcggccuuuauaagcacccggguguucccgugaaguggaaaagguga

SEQ ID NO: 4984 - RNA, 1473 nt, Artificial Sequence
  derived and/or modified protein sequence (opt3) from LASV(LASV975-NIG-2009;Clade II)__AIT17732__GPCstabilized
augggccagaucauuaccuucuuucaagaggugccccacgucauagaagagguuaugaacaucgugcugauugcccucagccuucuggcuaucuugaaggggauuuacaauguagcaacaugcggauuauucggucugguguccuuucuacuccuguguggcagaucuugcucaacuacguauaaaggggucuacgaacuucagacccuggaguuggacauggccagucucaacaugacaaugccucugagcuguacuaagaauaacucccaucacuauaucauggugggaaaugaaaccggccuggagcucacauuaaccaacacuucuauaaucaaucauaaauucugcaaccugucggaugcgcacaagaaaaaucuuuacgaccaugcuuugaugucaauuaucagcacauuucaccugaguauuccaaacuucaaucaguaugaggccauguccugugauuuuaacggugggaagaucucuguucaguacaaucuaagccacaccuaugcaguggacgccgcuaaccauugcggaacgauagcaaauggcguccuccaaacuuucaugaggauggccuggggcggguccuacauugcucuggauucaggaugcgguaguugggacuguaucaugaccagcuaccaguaucuuauuauccagaacacaacuugggaagaucacugccaguuuucucggccgucccccaucggcuaccugggguugcucucacaacgcacccgagacauuuauauaagccguagacgccggggaacauucaccuggacgcugagugauucugagggcaacgaaacuccugguggguacugucucacaagguggaugcuuaucgaggccgagcugaaaugcuuuggaaauaccgcgguggcaaaguguaacgaaaaacaugacgaggaguucugcgauauguugcggcuauuugacuucaauaagcaggccauucgcagacugaaaacucccgcucagauguccauccagcucauaaacaaggccguaaaugcacugauuaacgaucaacuuaucaugaagaaucaccugagggacaucaugugcauuccauauugcaacuacagcaaauauugguacuugaaucacacaguuaccggcaagacgucgcucccccgguguuggcuggugucuaacggguccuacuuaaaugaaacccauuucucagacgauaucgagcagcaggcugacaacaugauuacagagcugcuacaaaaagaauauauagaucgccagggaaagacuccucucggucuggucgaccuuuuuguguucaguaccagcuuuuacuugaucuccauuuuccugcaccucgugaaaaucccaacacaucgacacaucgucggcaagcccugcccuaaaccacauagacugaaucacauggggauuuguucuugcggacuuuauaagcacccgggcguucccgugaaguggaaaagguga

SEQ ID NO: 4985 - RNA, 1473 nt, Artificial Sequence
  derived and/or modified protein sequence (opt3) from LASV(LASV976-NIG-2009;Clade II)__AIT17736__GPCstabilized
augggccagaucgugaccuucuuucaagaggucccccacguuauugaagaggugaugaacauaguacugaucgcccucagccuucuggcuauuuugaaggggaucuacaauguggcaacaugcggauuauucggucuggucuccuuucuacuccuguguggcagaucuugcucaacuacguauaaagggguguacgaacuucagacccuggaguuggacauggccagucucaacaugacaaugccucugagcuguacuaagaauaacucccaucacuauauuaugguuggaaaugaaaccggccuggagcucacauuaaccaacacuucuaucauaaaucauaaauucugcaaccugucggaugcgcacaagaaagaccuuuacgaucaugcuuugaugucaaucauuagcacauuucaccugaguaucccaaauuucaaccaguaugaggccauguccugugacuuuaauggugggaagauuucugugcaguacaaccuaagccacaccuaugcagucgaugccgcuaaucauugcggaacgaucgcaaacggcgugcuccaaacuuucaugaggauggccuggggcggguccuacauagcucuggacucaggaugcgguaguugggauuguauuaugaccagcuaccaguaucuuaucauucagaauacaacuugggaagaccacugccaguuuucucggccgucccccaucggcuaccugggguugcucucacaacgcacccgagauaucuauauuagccguagacgccggggaacauucaccuggacgcugagugacucugagggcaacgaaacuccugguggguacugucucacaagguggaugcuuauagaggccgagcugaaaugcuuuggaaacaccgcgguagcaaaguguaaugaaaaacaugaugaggaguucugcgacauguugcggcuauuugauuucaacaagcaggccaucaugcgccugaaaacucccgcucagauguccauucagcucaucaauaaggccguuaacgcacugauaaaugaccaacuuauuaugaagaaccaccugagagacaucaugugcaucccauauugcaauuacagcaaauauugguacuugaaccacacagugaccggcaagacgucgcuccccagguguuggcuggucucuaauggguccuacuuaaacgaaacccgguucucagaugacauugagcagcaggcugauaauaugaucacagagaugcugcaaaaagaauaucuagaccgccagggaaagacuccucucggucugguggaucuuuuuguguucaguaccagcuuuuacuugauuuccauauuccugcaucucgucaaaaucccaacacaccgacauauuaucggcaagcccugcccuaaaccacacagacugaaccauauggggaucuguucuugcggacuuuauaagcacccgggcguucccgugaaguggaaaagguga

SEQ ID NO: 4986 - RNA, 1473 nt, Artificial Sequence
  derived and/or modified protein sequence (opt3) from LASV(LASV978-NIG-2009;Clade II)__AIT17744__GPCstabilized
augggccagaucauuaccuucuuucaagaggugccccacgucauagaagagguuaugaacaucgugcugauugcccucagccuucuggcuaucuugaaggggauuuacaauguagcaacaugcggauuauucggucugauguccuuucuacuccuguguggcagaucuugcucaacuacguauaaagggguguacgaacuucagacccuggaguuggacauggccaaccucaauaugacaaugccucugaguuguacuaagaacaauagccaucacuauaucauggucggaaacgaaaccggccuggagcucacauuaaccaauacuuccauaaucaaccauaaauucugcaaucugucugaugcgcacaagaaaaaccuuuacgaccaugcuuugaugucgauuaucucaacauuucaccugagcauuccaaauuucaaccaguaugaggccaugaguugugauuuuaauggugggaagaucuccgugcaguacaaccuaucucacgcauaugccguugacgcugcaaaucauugcggaaccauagccaacggcgugcuccaaacguucaugaggauggcuuggggcgggagcuacauugcccuggauuccggaugcgguucaugggacuguaucaugacaaguuaccaguaucuuauuauccagaacaccagcugggaagaucacugccaguuuucucggccgucccccaucggcuaccugggguugcucucacaacgcacacgagacauuuauauaagccguagacgccggggaacuuucaccuggacacugagugauucugagggcaaugaaaccccugguggguacugucucacgagguggaugcuuaucgaggcggagcugaaaugcuuuggaaacacugcagucgccaaguguaaugaaaaacaugacgaggaguucugcgauauguugcggcuauuugacuucaacaagcaggcuauucgcagacugaaaacacccgcccagauguccauccagcucauaaauaaggcagugaacgcucugauuaaugaucaacuuaucaugaagaaccaccugagggacaucaugugcauuccauauugcaauuacagcaaauauugguacuugaaccacaccguaacuggcaagacaucgcucccccgguguuggcugguuucuaauggguccuacuuaaacgaaacccauuucucagacgauaucgagcagcaggccgacaauaugauuacggagcugcuacaaaaagaauauauagaucgccagggaaagaccccucucggucugguggaccuuuuugucuucaguacuagcuuuuacuugaucuccauuuuccugcaccucgugaaaaucccaacucaucgacacgugaucggcaagcccugcccuaaaccacauagacugaaccacauggggauuuguucuugcggacuuuauaagcacccgggcguccccguuaaguggaaaagguga

SEQ ID NO: 4987 - RNA, 1473 nt, Artificial Sequence
  derived and/or modified protein sequence (opt3) from LASV(LASV981-NIG-2009;Clade II)__AIT17752__GPCstabilized
augggccagaucauuaccuucuuucacgaggugccccaugucauagaagagguuaugaacaucgugcugauugcccucagccuucuggcuaucuugaaggggauuuacaauguagcaacaugcggauuauucggucugguguccuuucuacuccuguguggcagaucuugcucaacuacguauaaaggggucuacgaacuucaaacccuggaguuggacauggccagucucaacaugacaaugccucugagcuguacuaagaauaacucccaccauuauaucauggugggaaaugaaaccggccuggagcucacauuaaccaacacuucuauaaucaaucacaaauucugcaaccugucggaugcgcauaagaaaaaucuuuacgaccacgcuuugaugucaauuaucagcacauuucaccugaguauuccaaacuucaaucaguaugaggccauguccugugauuuuaacggugggaagaucucuguucaguacaaucuaagccauaccuaugcaauagacgccgcuaaccacugcggaacgauugcaaauggcgugcuccagacuuucaugaggauggccuggggcggguccuacaucgcucuggauucaggaugcgguaguugggacuguauuaugaccagcuaccaauaucuuaucauccagaacacaacuugggaagaucauugccaguuuucucgcccgucccccauuggcuaccugggguugcucucacagcgaacccgugacauauauaucagcagaaggcgccggggaacauucaccuggacgcugagugauucugagggcaacgaaacuccugguggguacugucucacacgguggaugcuuauugaggccgagcugaagugcuuuggaaauaccgcggucgcaaaauguaacgaaaagcacgacgaggaguucugcgauauguugcgccuauuugacuucaauaaacaagccaucagaaggcugaagacucccgcucagauguccauacagcucauuaacaaagccgugaaugcacugaucaacgaucagcuuaucaugaagaaucaucugcgggacauuaugugcaucccauauugcaacuacagcaaguauugguacuugaaucacacaguaaccggcaaaacgucgcucccccgcuguuggcugguuucuaacggguccuacuuaaaugaaacccacuucucagacgauauugagcaacaggcugacaacaugauaacagagcugcuacagaaggaauauaucgaucgacaaggaaaaacuccucucggucugguggaccuuuuugucuucaguaccagcuuuuacuugauuuccaucuuccugcaucucgugaagaucccaacacacagacaugugauuggcaaacccugcccuaagccacacaggcugaaucacauggggauauguucuugcggacuuuauaaacauccgggcguccccguuaaguggaagcgguga

SEQ ID NO: 4988 - RNA, 1473 nt, Artificial Sequence
  derived and/or modified protein sequence (opt3) from LASV(LASV982-NIG-2009;Clade II)__AIT17756__GPCstabilized
augggccagaucauuaccuucuuucaagaggugccccacgucauagaagagguuaugaacaucgugcugauugcccucagccuucuggcuaucuugaaggggauuuacaauguagcaacaugcggauuauucggucugguguccuuucuacuccuguguggcagaucuugcucaaucacuuauaaaggggucuacgaacuucagacgcuggaguuggacauggccagucucaacaugaccaugccucugagcuguacaaagaauaacucccaucacuauauaauggugggaaaugaaacuggccuggagcucaccuuaacaaacaccucuaucauuaaucauaaauucugcaaccugucggaugcgcacaagaaaaaucuuuacgaccaugcuuugaugucaaucauuagcacuuuucaccugaguaucccaaacuucaaucaguaugaggccauguccugugauuuuaacggugggaagauaucuguucaguacaaucuaagccacacauaugcaguggacgccgcuaaccauugcggaaccauugcaaauggcguccuccaaacguucaugaggauggccuggggcggguccuacaucgcucuggauucaggaugcgguaguugggacuguauuaugacuagcuaccaguaucuuaucauccagaacaccacaugggaagaucacugccaguuuucucgcccgucccccauuggcuaccugggguugcucucacaacgaacucgugacauauauaucagcagaaggcgccggggaaccuucacauggacccugagugauucugagggcaacgaaacgccugguggguacugucucacucgguggaugcuuauugaggccgagcugaagugcuuuggaaauacagcgguggcaaaauguaacgaaaagcaugacgaggaguucugcgauauguugcgccuauuugacuucaauaaacaggccaucagaaggcugaaggcucccgcccagauguccauacagcucauuaacaaagcaguaaaugcucugaucaacgaucaacuuaucaugaagaaucaucugcgggacauuaugugcaucccauauugcaacuacagcaaguauugguacuugaaucacaccguuacuggccgcacaucgcucccccgauguuggcuggugucuaacggguccuacuuaaaugaaacccacuucucagacgauauugagcagcaggccgacaacaugauaacggagcugcuacaaaaagaauauaucgauagacagggaaagaccccucucggucuggucgaccuuuuuguguucaguacuagcuuuuacuugauuuccaucuuccugcaccucgugaaaaucccaacacauaggcacauuauaggcaagcccugcccuaaaccacaucggcugaaucacauggggaucuguucuugcggacuuuauaagcacccgggcguccccguuaaauggaagcguuga

SEQ ID NO: 4989 - RNA, 1473 nt, Artificial Sequence
  derived and/or modified protein sequence (opt3) from LASV(LASV988-NIG-2009;Clade II)__AIT17758__GPCstabilized
augggccagaucauuaccuucuuucaagaggugccccacgucauagaagagguuaugaacaucgugcugauugcccucagccuucuggcuaucuugaaggggauuuacaauguagcaacaugcggauuauucggucugguguccuuucuacuccuguguggcagaucuugcucaacuacguauaaaggggucuacgaacuucagacccuggaguugaacauggccagucucaauaugacaaugccucugagcuguacuaagaacaauucccaucacuauaucauggugggaaacgaaaccggccuggagcucacauuaaccaauacuucuauaaucaaccauaaauucugcaaucugucggacgcgcacaagaggaaccuuuacgaucaugcuuugaugucaauuaucagcacauuucaccugaguauuccaaauuucaaccaguaugaggccauguccugugacuuuaauggugggaaaaucucuguucaguacaaccuaagccacaccuaugcaguggaugccgcuaagcauugcggaacgauagcaaauggcguccuccaaacuuucaugcggauggccuggggcggguccuacauugcucuggacucaggaugcgguaguugggauuguaucaugaccagcuaccaguaucuuauuauccagaacacaacuugggaagaccacugcgaguuuucucgcccgucccccaucggcuaccugggguugcucucacagcgaacccgugauauuuauauaagcagaaggcgccggggaacauucaccuggacgcugagugacucugaaggcaacgagacuccugguggguacugucucacacgguggaugcuuaucgaggccgaacugaaaugcuuuggaaauaccgcgguggcaaaguguaacgagaaacaugaugaagaguucugcgacauguugcgccuauuugauuucaauaagcaagccauuagaaggcugaaagcucccgcccagauguccauccagcucauaaacaaggcaguaaaugcucugauuaacgaccagcuuaucaugaagaaucaucugcgggauaucaugugcauuccauauugcaacuacagcaaauauugguacuugaaucacacuguuacaggcaagaccucgcucccccgcuguuggcuggugucuaacggguccuacuuaaaugagacgcacuucucagacgacaucgagcaacaggccgauaacaugauuaccgaacugcuacagaaagaguauauagaccgacaaggaaagacaccucucggucuggucgaucuuuuuguguucaguacuagcuuuuacuugaucuccauuuuccugcaccucgugaaaaucccaacccauagacacgucaucggcaagcccugcccuaaaccacauaggcugaaucacauggggauuuguucuugcggacuuuauaagcacccgggcguucccgugaaguggaaacgguga

SEQ ID NO: 4990 - RNA, 1473 nt, Artificial Sequence
  derived and/or modified protein sequence (opt3) from LASV(LASV989-NIG-2009;Clade II)__AIT17762__GPCstabilized
augggccagaucauuaccuucuuucaagaggugccccacgucauagaagagguuaugaacaucgugcugauugcccucagccuucuggcuaucuugaaggggauuuacaauguagcaacaugcggauuauucggucugguguccuuucuacuccuguguggcagaucuugcucaacuacguauaaaggggucuacgaacuucagacccuggaguuggacauggccagucucaacaugacaaugccucugagcuguacuaagaauaacucccaucacuauaucauggugggaaaugaaaccggccuggagcucacauuaaccaacacuucuauaaucucgcauaaauucugcaaucugucagaugcgcacaagaaaaaccuuuacgaccaugcuuugaugagcauuaucaguacauuucaccuguccauuccaaauuucaaccaguaugaggccaugucuugugauuuuaauggugggaagaucagcguucaguacaaccuaucccacaccuaugcaguggacgccgcuaaucauugcggaacgauagcaaacggcguccuccaaacuuucaugaggauggccuggggcgggucauacauugcucuggauaguggaugcgguagcugggacuguaucaugaccucuuaccaguaucuuauuauccagaauacaacuugggaagaucacugccaguuuucccggccgucacccaucggcuaccugggguugcucagccaacgcacccgagacauuuauauaagucguagacgccggggaacauucaccuggacgcugucugauuccgagggcaacgaagccccugguggguacugucucacuagguggaugcuuaucgaggcggagcugaaaugcuuuggaaacacagcaguggccaaguguaaugaaaaacaugacgaggaguucugcgauauguugcggcuauuugacuucaacaagcaggcuauucgcagacugaaaacccccgcccagaugagcauccagcucauaaauaaggcaguaaacgcucugauuaaugaucaacuuaucaugaagaaccaccugagggacaucaugugcauuccauauugcaauuacucgcgguauugguacuugaaccacacuguuacaggcaaaaccucucucccccgcuguuggcugguguccaaugggucauacuuaaacgaaacgcauuucagugacgauaucgagcagcaggccgacaauaugauuaccgagcugcuacaaaaggaauauauggaucgacagggaaaaacaccucucggucuggucgaccuuuuuguguucagcacuuccuuuuacuugauaucuaucuuccugcaccucgugaagauuccaacccauagacacgucaucggcaaacccugcccuaagccacauaggcugaaccacauggggaucuguagcugcggacuuuauaaacacccgggcguucccgugaaguggaagcgguga

SEQ ID NO: 4991 - RNA, 1473 nt, Artificial Sequence
  derived and/or modified protein sequence (opt3) from LASV(LASV991-NIG-2009;Clade II)__AIT17770__GPCstabilized
augggccagaucgugaccuucuuucaagaggucccccacguuauugaagaggugaugaacauaguacugaucgcccucagccuucuggcuauuuugaaggggaucuacaauguggcaacaugcggauuauucggucuggucuccuuucuacuccuguguggcagaucuugcucaacuacguauaaagggguguacgaacuucaggcccuggaguuggacaugaguagccucaacaugaccaugccucuguccuguacaaagaauaacucucaucacuauauuaugguuggaaaugaaacuggccuggagcucaccuuaacaaacaccucgaucauacaucacaaauucugcaaucugucagaugcgcauaagaaagaccuuuacgaucacgcuuugaugagcaucauuaguacuuuucaccuguccaucccaaacuucaaucaguaugaggccaugucuugugacuuuaacggugggaagauuagcgugcaguacaaucuaucccauacauaugcagucgaugccgcuaaccacugcggaaccaucgcaaauggcgugcuccaaacguucaugaggauggccuggggcgggucauacauagcucuggacaguggaugcgguggcugggauuguauuaugacuagcuaccaguuucuuaucauucagaacaccacaugggaagaccauugccaguucucucggccgucccccaucggguaucugggauugcucucacaacgcacucgagauaucuacauuagccguagacgccggggcaccuuuacauggacccugagugacucugaggguaaugaaacgccugggggauauugucucacuagguggaugcuuauagaggccgagcugaaaugcuucggcaacacagcgguagcaaaguguaacgaaaaacacgaugaggaauuuugcgacauguugcggcuauucgauuucaauaagcaggccaucaaacgccugaagacccccgcucagauguccauucaccucaucaacaaggccguuaaugcacugauaaacgaccagcuuauuaugaaaaaucaucugagagacaucaugugcaucccauacugcaacuauagcaaguacugguauuugaaucacacugugacagggaaaaccucgcuccccagguguuggcuggucucuaacggauccuacuuaaaugaaacgcauuuuucagaugacauugagcaacaggcugauaacaugaucaccgagcugcuacagaaggaauacauugaccggcaagguaaaacaccucucggccugguggaucuuuucguguuuaguacuagcuucuauuugauauccaucuuucugcaccucgucaagauuccaacccaucgccacguuaucgggaaacccugcccuaagccacaccgacugaaucauaugggaaucuguucuugcggccuuuacaagcacccgggugugcccguaagauggaaaagguga

SEQ ID NO: 4992 - RNA, 1473 nt, Artificial Sequence
  derived and/or modified protein sequence (opt3) from LASV(LASV993-NIG-2009;Clade II)__AIT17778__GPCstabilized
augggccagaucauuaccuucuuucaagaggugccccacgucauagaagagguuaugaacaucgugcugauugcccucagccuucuggcuaucuugaaggggauuuacaauguagcaacaugcggauuauucggucugguguccuuucuacuccuguguggcagaucuugcucaacuacguauaaaggggucuacgaacuucagacccuggaguuggacauggccaaccucaauaugacaaugccucugaguuguacuaagaacaauagccaucacuauaucauggugggaaacgaaaccggccuggagcucacauuaaccaauacuuccauaaucaaccauaaauucugcaaucugucugaugcgcacaagaaaaaccuuuacgaccaugcuuugaugucgauuaucucaacauuucaccugagcauuccaaauuucaaccaguaugaggccaugaguugugauuuuaauggugggaagaucuccguucaguacaaccuaucucacaccuaugcaagggacgccgcuaaucauugcggaacgauagcaaacggcgugcuccaaacuuucaugcggauggccuggggcgggagcuacauugcucuggauuccggaugcgguucaugggacuguaucaugaccaguuaccaguaucuuauuauccagaacacaacuugggaagaucacugccaguuuagccgcccgucucccaucggcuaccugggguugcucucccaacgaacccgugacauuuauauaucaagaaggcgccggggaacauucaccuggacgcugagcgauagugagggcaaugaaacuccugguggguacugucucacacgguggaugcuuaucgaggccgagcugaaaugcuuuggaaacaccgcggucgcaaaguguaaugaaaaacaugacgaggaguucugcgauauguugcgccuauuugacuucaacaagcaggccauuagaaggcugaaaacucccgcucagaugaauauccagcucauaaacaaggccgugaaugcacugauuaacgaucaacuuaucaugaagaaucaucugcgggacaucaugugcauuccauauugcaacuacucuaaauauugguacuugaaucacacaguaaccggcaagacgucccucccccgcuguuggcugguuagcaacgggucguacuuaaaugaaacccacuucucugacgauaucgagcagcaggcugacaacaugauuacagagcugcuacaaaaagaauauauggaucgacagggaaagacuccucucggucugguggaccuuuuugucuucuccaccucauuuuacuugauaaguaucuuccugcaccucgugaaaauuccaacacauagacacgugaucggcaagcccugcccuaaaccacauaggcugaaucacauggggaucuguagcugcggacuuuauaagcacccgggcguccccguuaaguggaaacgguga

SEQ ID NO: 4993 - RNA, 1473 nt, Artificial Sequence
  derived and/or modified protein sequence (opt3) from LASV(Nig08-04;Clade II)__ADU56610__GPCstabilized
augggccagaucgugaccuucuuucaagaggucccccacguuauugaagaggugaugaacauaguacugaucgcccucagccuucuggcuauuuugaaggggaucuacaauguggcaacaugcggauuauucggucugauuuccuuucuacuccuguguggcagaucuugcucaacuacguauaaaggggucuacgaacuucagacccuggaguuggacauggccaaccucaauaugacaaugccucugaguuguacuaagaacagcucccaucacuauaucauggugggaaaugaaaccggccuggagcucacauuaaccaacacuucuauaaucaaucauaaauucugcaaccugucggaugcgcacaagaaaaaucuuuacgaccaugcuuugaugucaauuaucagcacauuucaccugaguauuccaaacuucaaucaguaugaggccauguccugugauuuuaacggugggaagaucucuguucaguacaaucuaagccacgcauaugccguggacgcugcaaaccauugcggaaccauagccaauggcguccuccaaacguucaugaggauggcuuggggcggguccuacauugcccuggauucaggaugcgguaacugggacuguaucaugaccaguuaccaguaucuuauuauccagaacacuacaugggaagaucacugccaguuuagccggccgucucccaucggcuaccugggguugcucucccaacgcacucgagacauuuauauaucacguagacgccggggaaccuucacauggacccugagcgauagugagggcaaugaagcgccugguggguacugucucacgagguggaugcuuaucgaggcagagcugaaaugcuuuggaaacacugccauugcuaaguguaaugaaaaacaugacgaggaguucugcgauauguugcggcuauuugacuucaacaagcaggccaucaaacgccugaaggcacccgcucagaugucuauacagcucauuaauaaggccgugaacgcgcugaucaaugaucaacuuaucaugaaaaaccaccugagagacauuaugugcaucccauauugcaauuacuccaaguauugguacuugaaccacacaguaaccggcaaaacuagccuccccagguguuggcugauuucgaaugggucuuacuuaaacgaaacacauuucuccgacgauauagagcagcaggccgacaauaugaucaccgagcugcuacaaaaggaauauauggaucggcagggaaaaacgccucucggucugguugaccuuuuuguguucucaaccaguuuuuacuugauuagcaucuuccugcaccucgucaagaucccaacacaucgccacauugugggccgacccugcccuaaaccacauagacugaaccacauggggauauguuccugcggacuuuauaagcacccgggcgugcccgucaaguggaaaagguga

SEQ ID NO: 4994 - RNA, 1473 nt, Artificial Sequence
  derived and/or modified protein sequence (opt3) from LASV(Nig08-A41;Clade II)__ADU56626__GPCstabilized
augggccagaucauuaccuucuuucaagaggugccccacgucauagaagagguuaugaacaucgugcugauugcccucagccuucuggcuaucuugaaggggauuuacaauguagcaacaugcggauuauucggucugguguccuuucuacuccuguguggcagaucuugcucaacuacguauaaaggggucuacgaacuucagacccuggaguugaacauggccagucucaauaugacaaugccucugagcuguacuaagaacaauucccaucacuauaucauggugggaaacgaaaccggccuggagcucacauuaaccaauacuucuauaaucaaccauaaauucugcaaucugucggacgcgcacaagaggaaccuuuacgaucaugcuuugaugucaauuaucagcacauuucaccugaguauuccaaauuucaaccaguaugaggccauguccugugacuuuaauggugggaaaaucucuguucaguacaaccuaagccacaccuaugcaguggaugccgcuaagcauugcggaacgauagcaaauggcguccuccaaacuuucaugcggauggccuggggcggguccuacauugcucuggacucaggaugcgguaguugggauuguaucaugaccagcuaccaguaucuuauuauccagaacacaacuugggaagaccacugccaguuuucucgcccgucccccaucggcuaccugggguugcucucacaacgaacccgugauauuuauauaagcagaaggcgccggggaacauucaccuggacgcugagugacucugagggcaacgaaacuccugguggguacugucucacacgguggaugcuuaucgaggccgagcugaaaugcuuuggaaauaccgcgguggcaaaguguaacgaaaaacaugaugaggaguucugcgacauguugcgccuauuugauuucaauaagcaggccauuagaaggcugaaagcucccgcccagauguccauccagcucauaaacaaggcaguaaaugcucugauuaacgaccaacuuaucaugaagaaucaucugcgggauaucaugugcauuccauauugcaacuacagcaaauauugguacuugaaucacacuguuacaggcaagaccucgcucccccgcuguuggcuggugucuaacggguccuacuuaaaugaaacgcacuucucagacgacaucgagcagcaggccgauaacaugauuaccgagcugcuacaaaaagaauauauagaccgacagggaaagacaccucucggucuggucgaucuuuuuguguucaguacuagcuuuuacuugaucuccauuuuccugcaccucgugaaaaucccaacccauagacacgucaucggcaagcccugcccuaaaccacauaggcugaaucacauggggauuuguucuugcggacuuuauaagcacccgggcguucccgugaaguggaaacgguga

SEQ ID NO: 4995 - RNA, 1473 nt, Artificial Sequence
  derived and/or modified protein sequence (opt3) from LASV(Nig08-A47;Clade II)__ADU56630__GPCstabilized
augggccagaucauuaccuucuuucaagaggugccccacgucauagaagagguuaugaacaucgugcugauugcccucagccuucuggcuaucuugaaggggauuuacaauguagcaacaugcggauuauucggucugguguccuuucuacuccuguguggcagaucuugcucaacuacguauaaaggggucuacgaacuucagacccuggaguuggacauggccagucucaacaugacaaugccucugagcuguacuaagaauaacucccaucacuauaucauggugggaaaugaaaccggccuggagcucacauuaaccaacacuucuauaaucaaucauaaauucugcaaccugucggaugcgcacaagaaaaaucuuuacgaccaugcuuugaugucaauuaucagcacauuucaccugaguauuccaaacuucaaucaguaugaggccauguccugugauuuuaacggugggaagaucucuguucaguacaaucuaagccacgcauaugccguggacgcugcaaaccauugcggaaccauagccaauggcguccuccaaacguucaugaggauggcuuggggcggguccuacauugcccuggauucaggaugcgguaguugggacuguaucaugacuagcuaccaguaucuuauuauccagaacaccacaugggaagaucacugccaguuuucucggccgucccccaucggcuaccugggguugcucucacaacgcacucgagacauuuauauaagccguagacgccggggaaccuucacauggacccugagugauucugagggcaacgaaacgccugguggguacugucucacuagguggaugcuuaucgaggcggagcugaaaugcuuuggaaauacagcaguggccaaguguaacgaaaaacaugacgaggaguucugcgauauguugcggcuauuugacuucaauaagcaggcuauucgcagacugaaaacccccgcccagauguccauccagcucauaaacaaggcaguaaaugcucugauuaacgaucaacuuaucaugaagaaucaccugagggacaucaugugcauuccauauugcaacuacagcaaauauugguacuugaaucacacuguuacaggcaagaccucgcucccccgguguuggcuggugucuaacggguccuacuuaaaugaaacgcauuucucagacgauaucgagcagcaggccgacaacaugauuaccgagcugcuacaaaaagaauauauggaucgccagggaaagacaccucucggucuggucgaccuuuuuguguucaguacuagcuuuuacuugauauccaucuuccugcaccucgugcgaaucccaacccauagacacgucauuggcaaacccugcccuaagccacauaggcugaaucacauggggaucuguucuugcggacuuuauaaacacccgggcguucccgugaaguggaagcgguga

SEQ ID NO: 4996 - RNA, 1473 nt, Artificial Sequence
  derived and/or modified protein sequence (opt3) from LASV(CSF;Clade III)__AAL13212__GPCstabilized
augggccagaucgugaccuucuuucaagaggucccccacguuauugaagagauaaugaacaucgugcugauuacacucagccuucuggccaucuugaaggggguauacaauuuagcuacuugcggacugauuggucuaaucacguuccucuuucuguguggcagauccugcucuaugaccuauaaagggucauaccagcuugaaacacuggaguugaacauggaaacucucaauaugaccaugccucugaguuguacaaagaacaccagccaucacuauauaagggugggaaaugagacuggccuggagcucacauuaaccaacacguccaucauuaaucauaaauucugcaaccugucugacgcacacaagaaaaaucuuuacgaucauucguugaugucaaucauuagcacuuuucaccugaguaucccaaacuucaaucaguaugaagccauguccugugacuuuaacggugggaagauaucuauucaguacaaucuaagccacaccuaugcgggagaugcugccaagcauugcggcacacucgcaaacggcauccugcaaacuuucaugcggauggccuggggaggguccuacauugcucuugacucagguugcggcaauugggauuguaucaugaccaguuaccaguaucugaucauucagaacacaaccugggaggaccacugccaguuuagccgaccgucucccauaggguacuugggacuccugucccaacguacgagagaaaucuauauuucaaggcggcgccggggcacuuucacauggacccucagcgauagugaggguaacgagaauccugggggauacugucuuacucgcuggaugcugaucgaagcagaguugaaaugcuuuggcaacacagccgucgcuaaguguaaugaaaaacaugacgaggaguucugcgauaugcuaagacuguuugacuucaacaagcaggccauacagaggcucaaagcgcccgcacagaugucuauucaacugaucaauaaggccgugaacgcucuuaucaaugaucagcugauuaugaagaaccacuugcgggacaucaugugcauuccauauugcaauuacuccaaauauugguaccucaaccacaccacgaccgggcgcacaagccugccccgauguugguuaguuucgaauggaucuuaccugaacgagacuagauucuccgaugacauagaacagcaagccgacaauaugaucaccgagaugcuacagaaggaauauauugauaggcaggguaaaacaccucucggccugguggaccuuuuugucuucucaaccaguuuuuacuugaucagcaucuuccugcaucucauuaagauaccaacucaccggcauaucguagggggacccugcccuaaaccacaccgucugaaccauaagggcauuuguuccugcggucuuuauaaacgcccgggggugucuguuagauggaagagguga

SEQ ID NO: 4997 - RNA, 1473 nt, Artificial Sequence
  derived and/or modified protein sequence (opt3) from LASV(ISTH2121-NIG-2012;Clade III)__AIT17540__GPCstabilized
augggccagaucgugaccuucuuucaagaggucccccacguuauugaagagauaaugaacaucgugcugauuacacucagccuucuggccaucuugaaggggauuuacaauuucgcuacuugcggauuaaucggucugauaacguuucuauuccucuguggcagauccugcucuaccaucuauaaagggucauaccagcugcagacacuugaacugaacauggagacuuugaauaugaccaugccucucaguuguacaaagaacaauagccaucacuauauuaggguaggaaacgaaaccggccuggagcugacucucacaaauaccuccaucauuaaccauaaauuuugcaauuuaucugaggcacacaagaaaaaccuguacgaccaugcccuuaugucgaucauaucaacguuccacuugagcauuccaaauuuuaaccaguaugaagcgaugaguugugauuucaauggugggaagaucuccgugcaauacaaccugucucacagcuaugcugucgacgccgcaaaucauugcggaacuguggccaacggcguucuacagaccuuuaugcggauggcuuggggcggguccuacauugcacucgauucaggaugcgguaacugggacuguaucaugacaaguuaccaguaucugaucauucagaauacuaccugggaggaucacugccaauucagccgaccgucucccauaggcuaccuugggcuguugucccagcguacaagagacaucuauauuucaaggcggcgccggggaaccuuuacguggacuuuaagcgauagugaaggcaaggagacaccugguggguacugucugacccgcuggaugcucaucgaggccgaacuuaaaugcuucggaaacacugcuguggccaaguguaaugagaaacaugacgaagaguuuugcgauaugcugagauuguucgacuucaacaagcaggcgauacagaggcuaaaaacacccgcacaaaugucuauucagcugaucaauaaggccgucaacgcucucaucaaugaucagcugauuaugaagaaccaccuucgggacaucaugugcauuccauauugcaauuacuccaaauauugguaccugaaccacaccagcacgggccgcaccucguugcccaaguguuggcucgugucuaauggguccuaccugaacgagacacauuuuucagaugacauagagcaacaggccgacaauaugaucacugaaauguuacagaaagaguauauugaucgacagggaaagaccccucugggucuaguagaccucuucguuuuuaguacuagcuucuaccugaucuccaucuuucuucacuuggugaaaauuccaacacauagacacauagucggcaagucuugccccaaaccucauaggcugaaccacauggggaucuguagcugcggacucuauaagcaaccaggcgugccggugaaguggaaacgguga

SEQ ID NO: 4998 - RNA, 1473 nt, Artificial Sequence
  derived and/or modified protein sequence (opt3) from LASV(Nig08-A19;Clade III)__ADU56618__GPCstabilized
augggccagaucgugaccuucuuucaagaggucccccacguuauugaagaggugaugaacauaguacugaucgcccucagcauucuugcuauccugaagggguuguacaauauugcaacaugcggauuaaucggucuggugacuuuccuacuccuguccggcagaucuuguucaaugacguauaaaggggucuacgaacuucagacccuggaguugaacaugaauacacucaacaugacuaugccucugaguugcaccaagaauaacagccaucacuauauaauggugggaaaugaaacaggccuggagcucaccuuaacuaacacaucccugcuucaucacaaauuuuguaauuugucugacgcccauaagaaaaaccuguacgaucacacccuaaugucgaucauuucaacguuccaccucagcaucccaaauuuuaaccaguaugaggcgaugaguugcgacuucaauggugggaagauuacuguucaguacaaccugucccauucuuaugcuaucgaugccgcaaaucacuguggaaccguggccaacggcguccuucaaacauuuaugaggauggcuuggggcgggagcuacauagcacuggacuccggaugcgguaagugggauugcauuaugacuucauaccaguauuugaucauucagaacaccacaugggaagaccauugucaguucagucgcccgagccccaucggcuaccucgggcuguuaucucaacgaacccgugauaucuauauuuccagaaggcgccggggaacguuuacuuggacacuuucagacagcgagggcaaugaaaccccugguggguacugccugacucgguggauguugauagaggccgagcuaaaauguuucggaaacacagcuguggccaagugcaaugaaaaacacgaugaggaauuuugugacaugcugcgccucuucgauuuuaacaagcaggcgaucagaaggcugaaagcacccgcccagaugaguauucagcuuaucaauaaggcuguaaacgcccugauaaaugaccaauugauuaugaagaaccaccuccgggauaucaugugcaucccauauugcaauuacucuaaauauugguaccugaaccauaccuccacgggccgcaccagcuuaccccgaugcuggcugguuucgaaugggucuuaccuaaacgaaacacacuucuccgacgacauugagcagcaggcagauaauaugaucacugagaugcuccaaaaggaauaucuggacagacagggaaaaaccccucuugguuugguggaucuguucgucuuuucaacaaguuucuaccucauuagcauauuucugcaucuugugaagaucccaacucacaggcauauugugggcaaacccuguccuaagccacaccggcugaaccacauggggaucugcuccuguggauuguauaaacagccgggcguccccguucguuggaagcgcuga

SEQ ID NO: 4999 - RNA, 1473 nt, Artificial Sequence
  derived and/or modified protein sequence (opt3) from LASV(ONM-299;Clade III)__ANH09734__GPCstabilized
augggccagaucgugaccuucuuucaagaggucccccacguuauugaagagauaaugaacaucgugcugauuacacucagccuucuggccaucuugaagggguuauacaauuucgcuacuugcggacugauuggucuaaucacguuucucuuccuguguggcagauccugcucuaugauauauaaagggucauaccagcuugaaacccuggaguugaacauggaaacacucaauaugacuaugccucugaguuguaccaagaacaauagccaucacuauaucaggguaggaaacgagacaggccuggagcucaccuuaacuaauacauccauuaucggucauaaauuuugcaaccugucugacgcacacaagaaaaaucuuuacgaucauucguugaugucaauuaucagcaccuuccaccugaguauaccaaacuuuaaucaguaugaagccauguccugugacuucaacgggggaaagauuucuauccaguacaaucuaagccacacguaugcgggcgaugcugccaagcauugcggcacuguggcaaacgggguccuccaaaccuuuaugcggauggccuggggagguuccuacauugcucuggacucaggcugcgggaauugggauuguaucaugacaaguuaccaguaucuuaucauucagaacacuaccugggaggaccacugccaguucagccgaccgucucccauaggauaccugggcuugcucucccaacguacaagagauaucuauauuucaaggcggcgccgggguaccuuuacguggacucugagcgacagugaagggaaagagacaccuggaggcuacugucucacccgcuggaugcuuaucgaggcagaacugaagugcuucggcaacacugccguggcuaaauguaaugagaagcaugaugaagaguuuugcgacauguugagacuauucgauuucaacaaacaggccauacagaggcugaagacacccgcgcagaugucuauucaacucaucaauaaggcaguuaacgcccugaucaaugaccagcuuauuaugaaaaaccaucugcgggauaucaugugcauuccauauugcaauuacuccaaguauugguacuugaaccacaccagcacgggacgcaccucgcuccccaaauguuggcuggugucuaaugguuccuacuuaaacgagacacacuuuucagacgacauagagcagcaagcugauaauaugaucacugaaaugcugcagaaggaguauauugaccgacagggcaaaaccccucuagggcucgucgauguguucguauuuaguacuagcuucuaccugaucuccaucuuucuucacuugguuaagauuccaacacauagacacauagugggaaaaucuugccccaagccucauaggcugaaccacaugggcaucuguagcugcggucucuauaagcagccaggggucccggugcgguggaaacguuga

SEQ ID NO: 5000 - RNA, 1473 nt, Artificial Sequence
  derived and/or modified protein sequence (opt3) from LASV(ONM-700;Clade III)__ANH09738__GPCstabilized
augggccagaucgugaccuucuuucaagaggucccccacguuauugaagagauaaugaacaucgugcugauuacacucagccuucuggccaucuugaagggguuauacaauuucgcuacuugcggacugauuggucuaaucacguuucucuuccuguguggcagauccugcucuaugauauauaaagggucauaccagcuugaaacccuggaguugaacauggaaacacucaauaugacuaugccucugaguuguaccaagaacaauagccaucacuauaucaggguaggaaacgagacaggccuggagcucaccuuaacuaauacauccauuaucaaccauaaauuuugcaaucugucugacgcacacaagcggaaccuuuacgaucauucguugaugucaauuaucagcaccuuccaccugaguauaccaaauuuuaaccaguaugaagccauguccugugacuucaauggugggaaaauuucuauccaguacaaccuaagccacacguaugcgggagaugcugccaagcauugcggcacuguggcaaauggcguccuccaaaccuuuaugcgcauggccuggggaggguccuacauugcucuggacucagguugcggcaacugggauuguaucaugacaaguuaccaguaucuuaucauucagaacacuaccugggaggaccacugccaguucagccguccgucucccauaggguaccugggauugcucucccaaagaacaagggauaucuauauuucacggcgccgccggggcaccuuuacguggacucugagcgacagugaagguaaggagacaccugggggauacugucucaccagauggaugcuuaucgaggcagaacugaaaugcuucggcaauacugccguggcuaaguguaacgagaaacaugaugaagaguuuugcgacauguugaggcuauucgauuucaauaagcaggccauacagcggcugaaaacacccgcgcagaugucuauucaacucaucaacaaggcaguuaaugcccugaucaacgaccagcuuauuaugaagaaucaucugcgcgauaucaugugcauuccauauugcaacuacuccaaauauugguacuugaaucacaccagcacggggcgaaccucgcuccccaaguguuggcuggugucuaacggauccuacuuaaaugagacacacuuuucagacgacauagagcagcaagcugauaacaugaucacugaaaugcugcagaaagaguauauugacagacaggguaagaccccucuaggccucgucgauguguucauguuuaguacuagcuucuaccugaucuccaucuuucuucacuugguaaaaauuccaacacauaggcacauaguugggaagucuugccccaaaccucaucggcugaaucacaugggaaucuguagcugcggccucuauaagcagccaggugugccgguccguuggaagcgcuga

SEQ ID NO: 5001 - RNA, 1473 nt, Artificial Sequence
  derived and/or modified protein sequence (opt3) from LASV(Weller;Clade III)__AAT49010__GPCstabilized
augggccagaucgugaccuucuuucaagaggucccccacguuauugaagaggugaugaacauaguacugaucgcccucagcgugcuugcuauucugaagggguuguacaauuucgcaacaugcggauuaaucggucuggucacuuuucuacuccuguccggcagaucuuguucaaugauuuauaaagggguguacgaacuucagacgcuggaguugaacauggaaacccucaauaugacaaugccucugaguugcacuaagaacaccagccaucacuauaucaggguuggaaaugacacaggccuggagcucaccuuaacuaacgagacacugcuucaucacaaauucuguaauuuguccgaugcccauaagcggaaccuguacgaccacgcgcuaaugucuauaaucucgaccuuucaccucucaauuccaaauuucaaccaguaugaagcuaugagcugcgauuuuaauggugggaaaaucacggugcaguacaaccugagucauuccuaugccgucgacgcagccaagcacuguggaacuguggcuaauggcguacuucaaaccuucaugcgcauggcauggggcgggucuuacauugcccuggauagccgaugcggaaacugggacugcaucaugacauccuaccaguauuugauaauucagaauacuaccugggaggaucacugucaguuuucacguccgagucccaucgguuaccucggccuguuaagccaaagaacaagggacauuuauaucucucggcgccgccgggggaccuucacguggacucuuuccgauucagaaggaaacgagacaccuggcgguuacugccugaccagauggauguugaucgaggcugaacuaaaguguuuugggaacacugccguugcgaaaugcaaugagaagcacgacgaagaguucugugauaugcugaggcucuuugacuucaacaaacaggcaauucggcgccugaagacacccgcccagaugagcauacagcuuaucaauaaagcugugaacgcccugauuaaugaucaauugaucaugaagaaccaucuccgagacauaaugugcauuccauauugcaauuacaguaaguauugguaccugaaccacaccucuacgggaaaaaccuccuuacccagaugcuggcuggucagcaauggcucguaccuaaacgagacacauuucucugacgauaucgagcagcaggcagacaauaugaucacugaaaugcuccaaaaggaguaucuggauaggcaggggaaaaccccucuuggauugguggaccuguuuguguucuccacaucauuuuaccucauuaguaucuuccugcaccuuauuaagauaccaacucaucggcacaucgucgguaaacccuguccuaagccacaccgucugaaccauaugggcauuugcagcuguggguuguauaaacagccgggaguucccgugcgcuggaagagauga

SEQ ID NO: 5002 - RNA, 1476 nt, Artificial Sequence
  derived and/or modified protein sequence (opt3) from LASV(BA366;Clade IV)__ADI39451__GPCstabilized
augggccagaucgugaccuucuuucaagaggucccccacguuauugaagaggugaugaacauaguacugaucgcccucagcgugcuugcuguccugaagggguuguacaauguggcaacaugcggauuaauuggucugaucgccuuccuacuccuguguggcagauccugcacuacgacccuuuauaaagggguuuacgaacugcaggcguuggagcucaacauggaaacacugaauaugacuaugccucugucuuguaccaagaacaauucacaucacuauauuauggugggaaacgagacaggccucgaguuaacccugacuaauacaaguaucauaaaccauaaauuuugcaaucuuagcgacgcucacaagaaaaacuuguacgaucaugcccugauguccaucauuucuaccuuccaccuaucgaucccaaauuuuaaccaguaugaagcaaugucaugugacuucaauggugggaagauuagcguccaguacaaccucagucacacguaugccguggaugcugcaaaucauugcggaacuguagccaacggcguucugcaaaccuuuaugaggauggcuuggggcggguccuacaucgcccuugacucuggaugcgguagcugggauuguauaaugacauccuaccaguaucugauuauccagaacacuaccugggaggaccacugccaguucucacgcccgagucccauuggcuacuuggggcuccugagccaacgaacacgugauaucuauaucucuagaaggcgccggggaaccuuuacguggacucucuccgacucagaaggcaaggauacaccugguggguacugucuuacccgguggaugcugauugaggcggaguugaaaugcuucggaaauacugcaguggccaaguguaacgaaaaacaugacgaggaauuuugcgauaugcuacgccuguucgacuuuaauaagcaggcuauacagagacucaaagcccccgcacagaugagcauccaacugauuaacaaggcugucaaugcccuuaucaacgaucagcugauaaugaagaaucacuugagggacauuaugugcaucccauauugcaacuacaguaaauauugguaccucaaucacacaaucaccggccggacgucucugcccaaguguugguuaguguccaacgggagcuaccugaaugaaacccauuucucggacgauauugagcagcaagcggacaacaugaucacagagaugcuacagaaagaauauauugagcgccagggaaagacuccucucggucugguggaucuuuucgucuuuucuaccuccuucuacuugauaucaaucuuucugcaccucauuaaaaucccaacacaucgacacaucguuaauaagcccugcccuaaaccacauagacugaaccacaugggcguguguaguugcgggcuuuauaagcagccgggaguacccgugagguggaagcgguga

SEQ ID NO: 5003 - RNA, 1476 nt, Artificial Sequence
  derived and/or modified protein sequence (opt3) from LASV(G1180-SLE-2010;Clade IV)__AIT17168__GPCstabilized
augggccagaucgugaccuucuuucaagaggucccccacguuauugaagaggugaugaacauaguacugaucgcccucagcauucuugcugugcugaagggguuguacaauuucgcaacaugcggauuagucggucugcuaacuuuucuccugcuuuguggcagauccugcacggccucuagguauaaagggguguacgaacugcagaccuuggagcucaacauggaaacacugaauaugacuaugccucugucauguaccaagaacaauagucaucacuauaucaugguuggaaacgagacaggccucgaguuaacccugacuaauacaagcauuaucaaccauaaauucugcaaucuuuccgacgcgcacaagaaaaacuuguacgaucaugcucugaugucuauaaucucgaccuuucaccuaucaauuccaaauuucaaccaguaugaagccaugagcugugacuuuaauggugggaagaucagugugcaguacaaccucucccacucuuaugcaggagaugccgcuaaucauugcggcacggucgcaaacggcgugcugcaaacuuucaugcggauggccuggggagggagcuacauugcucuugacuccgguugcggcucaugggauuguaucaugaccaguuaccaguaucugauaauucagaacacaacuugggaggaccauugccaguuuagccgcccgucucccaucggguacuugggacuccugucccaacgaacccgugauauuuauaucucaagaaggcgccggggcacauucaccuggacgcucagcgacagugaagguaaggauacuccugggggauacugucuuacacgguggaugcugaucgaggccgaguugaaaugcuuuggcaauaccgcgguagcaaaguguaacgaaaaacacgacgaggaguucugcgauaugcuacgccuguuugacuucaauaagcaggccauucagagacucaaagcucccgcccagaugucuauacaacugaucaacaaggcaguuaaugcucuuauuaacgaucagcugaucaugaagaaucacuugagggacauaaugugcauuccauauugcaacuacuccaaauauugguaccucaaucauacuacaaccgggaagacgagccugcccaaauguugguuagugucgaacggaucuuaccugaaugaaacccacuucuccgacgauaucgagcagcaagccgacaacaugaucacagagaugcuacagaaggaauauauggagcggcaggguaaaacuccucucggccuggucgaucuuuuuguguucucaaccaguuuuuacuugauuagcaucuuccugcaucucgugaagauuccaacacaccgccauauagucgggaaauccugccccaagccucaccgacugaaucacaugggaaucuguucuugcggccuuuauaagcagccagguguuccggugaaauggaagagauga

SEQ ID NO: 5004 - RNA, 1476 nt, Artificial Sequence
  derived and/or modified protein sequence (opt3) from LASV(G1190-SLE-2010;Clade IV)__AIT17172__GPCstabilized
augggccagaucgugaccuucuuucaagaggucccccacguuauugaagaggugaugaacauaguacugaucgcccucagcauucuugcugugcugaagggguuguacaauuucgcaacaugcggauuagucggucuggugacuuuucuacuccuguguggcagauccugcacgaccucucuuuauaaagggguuuacgaacugcagacauuggagcucaacauggaaacucugaauaugaccaugccucugucauguacaaagaacaauagucaucacuauaucauggugggaaacgagaccggccucgaguuaacucugacaaauaccagcauuaucaaccauaaauucugcaaucuuuccgacgcccacaagaaaaacuuguacgaucaugcgcugaugucuauaaucucgacguuucaccuaucaauuccaaauuucaaccaguaugaagcuaugagcugugacuuuaauggugggaagaucaguguccaguacaaccucucccacucuuaugccggagaugcagccaaucauugcggcacuguggcuaacggcguacugcaaaccuucaugaggauggcauggggagggagcuacauugcccuugacuccgguugcggccgcugggauuguaucaugacaucauaccaguaucugauaauucagaacacuaccugggaggaccacugccaguuuagucgaccgagccccaucggguacuugggacuccugucucaacguacaagagauauuuauaucuccaggcggcgccggggcaccuucacguggacucucucagacagcgaagguaaggauacaccugggggauacugucuuacccgcuggaugcugaucgaggcugaguugaaaugcuuuggcaauacugccguugcgaaguguaacgaaaaacaugacgaggaguucugcgauaugcuaagacuguuugacuucaauaagcaggcaauucagaggcucaaagcccccgcucagaugaguauacaacugaucaacaaggccgugaaugcacuuauuaacgaucagcugaucaugaagaaucacuugcgggacauaaugugcauuccauauugcaacuacucuaaauauugguaccucaaucacacaaccacggggaagaccucccugcccaaauguugguuagucagcaacggaucguaccugaaugaaacacauuucucugacgauaucgagcagcaagcugacaacaugaucacugagaugcuacagaaggaauauauggagcgccaggguaaaaccccucucggccugguggaucuuuuuguguucuccacaucauuuuacuugauuaguaucuuccugcaccucgucaagauuccaacucaucgacacauaguugggaaacccugcccuagaccacauaggcugaaucacaugggaaucuguagcugcggccuuuauaagcagccgggugugcccguaaaguggaaacgguga

SEQ ID NO: 5005 - RNA, 1476 nt, Artificial Sequence
  derived and/or modified protein sequence (opt3) from LASV(G1200-LIB-2010;Clade IV)__AIT17176__GPCstabilized
augggccagaucgugaccuucuuucaagaggucccccacguuauugaagaggugaugaacauaguacugaucgcccucagccuucuggcuguguugaagggguuauacaaugucgcaacaugcggacugauuggucuaaucacuuuccuccugcuuuguggcagauccugcacgaccaaccuguauaaagggguguacgaauugcaggcccucgagcugaauauggaaacacugaacaugacuaugccucucucuuguaccaagaauaacucacaucacuauauuaugguuggaaaugagacaggcuuagagcugacccuuacuaacacaaguaucauaaaucauaaauuuugcaacuugagcgacgcgcacaagaaaaaucuguacgaucaugcucuaauguccaucauuucuaccuuccaccucucgaucccaaacuuuaaucaguaugaagccaugucaugugacuucaacggugggaggauuagcgugcaguacaaucugagucacuccuaugcaggagaugccgcuucucauugcggcacgaucgcaaacggcguccuucaaacuuuuaugcggauggccuggggagggagcuacauagcucuggacuccgguugcggcgggugggauuguauuaugaccucauaccaguauuugaucauucagaacacaacuugggaggaccauugccaguucagucgcccgagccccaucggauaccucggccuguuaucucaacgaacccgugauaucuauauuuccagaaggcgccgggguacauuuaccuggacgcuuucagacagcgaagggaaggauacuccuggaggcuacugucugacacgguggauguugauagaggccgagcuaaagugcuucggcaauaccgcgguggcaaaauguaacgaaaagcacgacgaggaauuuugcgauaugcugcgccucuucgacuuuaauaaacaggccauccagagacugaaggcucccgcccagaugaguauucaacuuaucaacaaagcaguaaaugcucugauaaacgaucaguugauuaugaagaaucaccucagggacaucaugugcaucccauauugcaacuacucuaaguauugguaccugaaucauacuguuacaggaaaaaccuccuuacccaaguguuggcuggugagcaacgguucguaccuaaaugaaacgcacuucucugacgauauugagcagcaagccgacaacaugaucaccgagaugcuccagaaagaauauauggagcggcagggcaagacaccucuggggcuugucgauuuguucguguuuuccacuucauucuaccugauuaguauauuucuccaucuggugaaaaucccaacccaccgccaugucguuggaaagcccugcccuaaaccacaccgacuuaaucacaugggcauuuguagcugcggucuguauaagcagccgggggugcccguaagauggaagagguga

SEQ ID NO: 5006 - RNA, 1476 nt, Artificial Sequence
  derived and/or modified protein sequence (opt3) from LASV(G1442-SLE-2011;Clade IV)__AIT17180__GPCstabilized
augggccagaucgugaccuucuuucaagaggucccccacguuauugaagaggugaugaacauaguacugaucgcccucagcauucuugcugugcugaagggguuguacaaugucgcaacaugcggauuaaucggucuggugacuuuccuacuccuguguggcagauccugcacgaccacacuuuauaaagggguuuacgaacugcagacuuuggagcucaacauggaaacccugaauaugacaaugccucugucuuguaccaagaacaauucacaucacuauauuagggugggaaacgagacuggccucgaguuaacacugaccaauacgaguaucauaaaccauaaauuuugcaaucuuagcgacgcccacaagaaaaacuuguacgaucaugcgcugauguccaucauuucuacuuuccaccuaucgaucccaaauuuuaaccaguaugaagcuaugucaugugacuucaauggugggaagauuagcguccaguacaaccucagucacuccuaugccggagaugcagccaaucauugcggcaccguggcuaacggcguacugcaaacauuuaugcggauggcauggggagggucuuacaucgcccuugacagcgguugcggcaacugggauuguauaaugacuuccuaccaguaucugauuauccagaauaccacaugggacgaucacugccaguucucacgaccgagucccauuggguacuugggacuccugagccaacguaccagagacguuuauaucucuaggcggcgccggggcacguuuacuuggacacucuccgauucagaggguaaggacaccccugggggauacugucuuacucgcuggaugcugaucgaagcugaguugaaaugcuucggcaacacagccguggcgaaguguaaugagaaacaugaugaagaguuuugcgacaugcuaagacuguucgauuuuaacaagcaggcaauucagaggcucaaagcccccgcucagaugagcauacaacugaucaauaaggccgucaacgcacuuauuaaugaccagcugaucaugaagaaccacuugcgggacauaaugugcauuccauauugcaauuacaguaaauauugguaccucaacaauaccgcuacggggaagaccucucugcccaaauguugguuaaucuccaacggaagcuaccugaaugagacacacuucucggaugacaucgaacaggaggccgauaacaugauuacugagaugcuacaaaaggaauauauggagcgccaggguaaaaccccucucggccugguggaccuuuucguguuuucuacauccuucuacuugaucucaauuuuucugcaucucgucaagauaccaacucaccgacauaucguugggaaaaguugccccaagccucacagacugaaucauaugggaauuuguagcugcggccuuuauaagcagccaggugugccgguaagguggaaacgguga

SEQ ID NO: 5007 - RNA, 1476 nt, Artificial Sequence
  derived and/or modified protein sequence (opt3) from LASV(G1529-SLE-2011;Clade IV)__AIT17184__GPCstabilized
augggccagaucgugaccuucuuucaagaggucccccacguuauugaagaggugaugaacauaguacugaucgcccucagcauucuugcugugcugaagggguuguacaaugucgcaacaugcggauuaaucggucuggugacuuuccuacuccuguguggcagauccugcacgaccacacuuuauaaagggguuuacgaacugcaggccuuggagcucaacauggaaacucugaauaugaccaugccucugucuuguacaaagaacaauucacaucacuauauuagggugggaaacgagaccggccucgaguuaacucugacaaauaccaguaucauagaccauaaauuuugcaaccuuagcgaugcgcacaagaaaaauuuguacgaccaugcucugauguccaucauuucuacguuccaccuaucgaucccaaacuuuaaucaguaugaagccaugucaugugauuucaacggugggaagauuagcguccaguacaaucucagucacuccuaugcaggagacgccgcuaaccauugcggcacuguggcaaauggcguacugcaaaccuuuaugcggauggccuggggagggucuuacaucgcucuugauagcgguugcaacggcugggacuguauaaugacauccuaccaguaucugauuauccagaacacuaccugggaugaccacugccaguucucacgaccgagucccauuggguacuugggacuccugagccaacguacaagagauaucuauaucucuaggcggcgccggggcaccuuuacguggacucucuccgacucagaggguaaggauacaccugggggauacugucuuacccgcuggaugcugauugaagccgaguugaaaugcuucggcaauacugcgguugcaaaguguaacgagaaacaugacgaagaguuuugcgauaugcuaagacuguucgacuuuaauaagcaggccauaaggcggcucaaagcucccgcccagaugagcauccagcugauuaacaaggcagugaaugcucuuaucaacgaccaacugauaaugaagaaucacuugcgcgauauuaugugcaucccauauugcaacuacaguaaauauugguaccucaauaacacagccaccgggaagacgucucugccccgauguugguuagucuccaauggaagcuaccugaacgagacccacuucucggacgauaucgaacagcaggcggacaauaugauuacagagaugcuacaaagagaguauauggaaaggcaggguaaaacuccucucggccugguggaucuuuucguguuuucuaccuccuucuacuugaucucaauuuuucugcaucucgucaagauaccaacacaccggcauaucguugggaaacccugcccuaagccacaccgucugaaccauaugggaauuuguaguugcggccuuuauaaacagccgggugugcccguaaaguggaagcgcuga

SEQ ID NO: 5008 - RNA, 1476 nt, Artificial Sequence
  derived and/or modified protein sequence (opt3) from LASV(G1618-SLE-2011;Clade IV)__AIT17188__GPCstabilized
augggccagaucgugaccuucuuucaagaggucccccacguuauugaagaggugaugaacauaguacugaucgcccucagcauucuugcugugcugaagggguuguacaauuucgcaacaugcggauuugucgguuuaguguccuuccugcuacucuguggcagaucuugcacuacgucacuguauaaagggguuuacgaacuucagacccuggaguugaacauggaaacacucaauaugacuaugccucugaguuguaccaagaacaauagccaucacuauaucauggugggaaacgagacaggccuggagcucaccuuaacuaauacauccauuaucaaccauaaauuuugcaaucugucugacgcccacaagaaaaaccuuuacgaucaugcguugaugucgauaaucucaaccuuccaccugagcauuccaaauuuuaaccaguaugaagcuaugaguugugacuucaauggugggaagaucuccguccaguacaaccuaucucacagcuaugccguggaugcagccaaucauugcggaacgguagcuaacggcguucuccaaacuuuuaugaggauggcauggggcggguccuacauugcccuggacucaggaugcgguaguugggauuguaucaugaccagcuaccaguaucuuauaauucagaacacaacuugggaggaccauugccaguucucucggccgucccccaucggcuaccugggguugcucucacaacgcacccgagauauuuauaucagccguagacgccggggaacauuuaccuggacgcugagugacucugaaggcaaggauacuccugguggguacugucucacaagguggaugcuuaucgaggcugagcugaaaugcuucggaaauaccgccguggcgaaguguaacgaaaaacacgacgaggaauuuugcgauauguugcggcuauucgacuucaauaagcaggcaauucagcgccugagagcccccgcucagauguccauacaacucaucaacaaagccgucaaugcacugauuaacgaucagcuuaucaugaagaaucaccugagggacauaaugugcauuccauauugcaacuacagcaaguauugguacuugaaucauacuacaaccggccggacgucgcuccccaaauguuggcuggugucuaacggguccuacuuaaaugaaacccacuuuucagacgauaucgagcagcaagcugacaacaugaucacagagaugcugcagaaggaauauauggagcgccagggaaaaacuccucuaggucucguggaucuguucgucuuuaguaccagcuucuaccuuauuuccaucuuuuugcaucugguuaagauuccaacacaccgacauauagugggcaaaucuugccccaagccucacagacucaaucacauggggaucuguagcugcggacuguauggccagccagguguaccggugaaauggaagagguga

SEQ ID NO: 5009 - RNA, 1476 nt, Artificial Sequence
  derived and/or modified protein sequence (opt3) from LASV(G1646-SLE-2011;Clade IV)__AIT17192__GPCstabilized
augggccagaucgugaccuucuuucaagaggucccccacguuauugaagaggugaugaacauaguacugaucgcccucagcauucuugcugugcugaagggguuguacaauuucgcaacaugcggauuuaucgguuuagucuccuuccugcuacucuguggcagaucuugcacuacgucacuguauaaagggguguacgaacuucagacccuggaguugaacauggaaacacucaauaugacuaugccucugaguuguaccaagaacaauagccaucacuauauuaugguuggaaacgagacaggccuggagcucaccuuaacuaauacauccaucauaaaccauaaauuuugcaaucugucugacgcccacaagaaaaaccuuuacgaucaugcguugaugucgaucauuucaaccuuccaccugagcaucccaaauuuuaaccaguucgaagcuaugaguugugacuuuaauggugggaagauuuccgugcaguauaaccuaucucacagcuacgccgucgaugcagccaaucauugcggaacgguggcuaacggcguacuccaaacuuucaugaggauggcauggggcggguccuauaucgcccuggacucaggaugcgguaguugggauuguauaaugaccagcuaccaguaccuuauuauccagaacacaacuugggaggaccauugccaguuuucucggccgucccccauuggcuaucugggguugcucucacaacgcacccgagauaucuacaucagccguagacgccggggaacauucaccuggacgcugagugacucugaaggcaaggauacuccugguggguauugucucacaagguggaugcuuauugaggcugagcugaaaugcuuuggaaauaccgccguugcgaaguguaacgaaaaacacgacgaggaguucugcgauauguugcggcuauucgacuuuaauaagcaggcaauacagcgccugaaagcccccgcucagauguccauccaacucauuaacaaggccgugaaugcacugaucaacgaucagcuuauaaugaagaaucaccugagagacauuaugugcaucccauacugcaacuauagcaaauacugguauuugaaucauacuacaaccggcaggacgucgcuccccaaguguuggcuggucucuaacggguccuacuuaaaugaaacccacuucucagacgauaucgagcagcaagcugacaacaugauuacagagaugcugcagaaagaauacauggagcggcagggaaagacuccucuaggucucguggaucuguuuguguucaguaccagcuuuuaucuuaucuccauuuucuugcaucuggucaaaauaccaacacaccgccauaucguuggcaagucuugccccaaaccucaccgacucaaucacauggggauuuguagcugcggacuguacggccagccaggugugccgguaaaguggaagagauga

SEQ ID NO: 5010 - RNA, 1476 nt, Artificial Sequence
  derived and/or modified protein sequence (opt3) from LASV(G1647-SLE-2011;Clade IV)__AIT17196__GPCstabilized
augggccagaucgugaccuucuuucaagaggucccccacguuauugaagaggugaugaacauaguacugaucgcccucagcauucuugcugugcugaagggguuguacaauuuagcaacaugcggacuggucggucuagugacuuuccuccugcuuuguggcagauccugcacgaccucucuguauaaagggguuuacgaauugcagacacucgagcugaacauggaaacucugaauaugaccaugccucucucauguacaaagaacaauagucaucacuauaucauggugggaaacgagaccggcuuagagcugacucuuacaaauaccagcauuaucaaccauaaauuuugcaauuuguccgacgcccacaagaaaaaccuguacgaucaugcgcuaaugucuauaaucucgacguuccaccucucaauuccaaauuuuaaccaguaugaagcuaugagcugugacuucaauggugggaagaucaguguccaguacaaccugucccacucuuaugccggagaugcagccaaucauugcggcacuguggcuaacggcguacuucaaaccuuuaugaggauggcauggggagggagcuacauugcccuggacuccgguugcggccgcugggauuguaucaugacaucauaccaguauuugauaauucagaacacuaccugggaggaccacugccaguucagucgaccgagccccaucggguaccucggacuguuaucucaacguacaagagauauuuauaucuccaggcggcgccggggcaccuuuacguggacucuuucagacagcgaagguaaggauacaccugggggauacugucugacccgcuggauguugaucgaggcugagcuaaaaugcuucggcaauacugccguugcgaaguguaacgaaaaacaugacgaggaauuuugcgauaugcugagacucuucgacuuuaauaagcaggcaauucagaggcugaaagcccccgcucagaugaacauacaacuuaucaauaaggccgugaacgcacugauuaaugaucaguugaucaugaagaaccaccuccgggacauaaugugcauuccauauugcaauuacaguaaauauugguaccugaaccacacaaccacggggaagaccucuuuaccccgcuguuggcuggucuccaauggaagcuaccuaaacgaaacacauuucucggacgauaucgagcagcaagcugacaauaugaucacugagaugcuccagaaagaauauauggagcgacaggguaagaccccucugggccuuguggauuuguucguguuuucuacauccuucuaccugauuucaaucuuucuccaccuggucaaaauuccaacucauagacacauaguugggaagcccugcccuaaaccacauaggcuuaaccacaugggaaucuguaguugcggcuucuauaagcagccgggugugcccguaaaguggaaacgguga

SEQ ID NO: 5011 - RNA, 1476 nt, Artificial Sequence
  derived and/or modified protein sequence (opt3) from LASV(G1774-SLE-2011;Clade IV)__AIT17204__GPCstabilized
augggccagaucgugaccuucuuucaagaggucccccacguuauugaagaggugaugaacauaguacugaucgcccucagcauucuugcugugcugaagggguuguacaauuuagcaacaugcggacuggucggucuagugacuuuccuccugcuuuguggcagauccugcacgucuucacuguauaaagggguuuacgaauugcagacccucgagcugaacauggaaacacugaauaugacuaugccucucaguuguaccaagaacagcucccaucacuauaucagggugggaaaugagacaggcuuagagcugacccuuacuaacacaucuauuaucaaucauaaauuuugcaacuugucggacgcccacaagaaaaaucuguacgaucaugcgcuaaugucaauaaucagcaccuuccaccucaguauuccaaacuuuaaucaguaugaagcuauguccugugacuucaacggugggaagaucucuguccaguacaaucugagccacuccuaugccggagaugcagccaaccauugcggcacgguggcuaauggcguacuucaaacuuuuaugcggauggcauggggagggucauacauugcccuggacagugguugcgaucgcugggacuguaucaugaccagcuaccaguauuugauaauucagaacacaacuugggaggaucauugccaguucucucgaccgucccccaucggcuaccucgggcuguuaucacaacguaccagagacauuuauaucagcaggcggcgccggggaacauuuaccuggacgcuuagugauucugaaggcaaggacacuccugguggguacugucugacacgcuggauguugaucgaggcugagcuaaaaugcuucggaaacaccgccguugcgaaguguaaugaaaaacacgaugaggaauuuugcgacaugcugagacucuucgauuuuaacaagcaggcaauucagaggcugaaagcccccgcucagauguccauacaacuuaucaauaaggccgugaacgcacugauuaaugaccaguugaucaugaagaaccaccuccgggacauaaugugcauuccauauugcaauuacagcaaauauugguaccugaaccauacuaucacaggcaagaccucguuacccaaauguuggcuggucucuaauggguccuaccuaaacaagacgcacuucucagaugacaucgaacagcaagcugauaauaugauuaccgagaugcuccagaaagaguauauggaacgccagggaaagacaccucugggucuuguggacuuguucguguuuaguacuagcuucuaccugaucuccauuuuucuccaucugauaaaaaucccaacccaccgacauauugucggcaagcccugcccuaagccacacagacuuaaccacauggggaucuguucuugcggacuguauaaacagccgggcguucccgugaaguggaaaagguga

SEQ ID NO: 5012 - RNA, 1476 nt, Artificial Sequence
  derived and/or modified protein sequence (opt3) from LASV(G1792-SLE-2011;Clade IV)__AIT17208__GPCstabilized
augggccagaucgugaccuucuuucaagaggucccccacguuauugaagaggugaugaacauaguacugaucgcccucagcauucuugcugugcugaagggguuguacaauuucgcaacaugcggauuaaucggucuggucacuuuucuacuccuguguggcagauccugcacgaccucucuuuauaaagggguguacgaacugcagacauuggagcucaacauggaaacucugaauaugaccaugccucugucauguacaaagaacaauagucaucacuauauuaugguuggaaacgagaccggccucgaguuaacucugacaaauaccagcaucauaaaccauaaauucugcaaucuuuccgacgcccacaagaaaaacuuguacgaucaugcgcugaugucuaucauuucgacguuucaccuaucaaucccaaauuucaaccaguaugaagcuaugagcugugacuuuaauggugggaagauuagugugcaguacaaccucucccacucuuaugccggagaugcagccaaucauugcggcacugucgcuaacggcgugcugcaaaccuucaugaggauggcauggggagggagcuacaucgcccuugacuccgguugcggccagugggauuguauaaugacaucauaccaguaucugauuauccagaacacuaccugggaggaccacugccaauuuagucgcccgagccccauuggguacuugggacuccugucucagcgaacacgugauaucuauaucuccagaaggcgccggggcaccuucacguggacucucucagacagcgaagguaaggauacaccugggggauacugucuuacccgguggaugcugauugaggcugaguugaaaugcuuuggcaauacugccguagcgaaguguaacgaaaaacaugacgaggaguucugcgauaugcuacgccuguuugacuucaauaagcaggcaauacagagacucaaagcccccgcucaaaugaguauccagcugauuaacaaggccguuaaugcacuuaucaacgaucagcugauaaugaagaaucacuugagggacauuaugugcaucccauauugcaacuacucuaaauauugguaccucaaucacacaaccacggggaagaccucccugcccaaauguugguuagugagcaacggaucguaccugaaugaaacacauuucucugacgauaucgagcaacaggcugacaacaugauuacugagaugcuacagaaggaauauauggagcggcaggguaaaaccccucucggccuggucgaucuuuuuguguucuccacaucauuuuacuugaucaguauuuuccugcaccucgugaagauaccaacucaucgccacaucgucgggaaaagcugccccaagccucaucgacugaaucacaugggaauuuguuccugcggccuuuauaagcaaccagguguuccggugaaauggaagagauga

SEQ ID NO: 5013 - RNA, 1476 nt, Artificial Sequence
  derived and/or modified protein sequence (opt3) from LASV(G1897-SLE-2011;Clade IV)__AIT17210__GPCstabilized
augggccagaucgugaccuucuuucaagaggucccccacguuauugaagaggugaugaacauaguacugaucgcccucagcauucuugcugugcugaagggguuguacaauuuagcaacaugcggacuggucggucuagugacuuuccuccugcuuuguggcagauccugcacgaccucucuguauaaagggguuuacgaauugcagacacucgagcugaacauggaaacucugaauaugaccaugccucucucauguacaaagaacaauagucaucacuauaucauggugggaaacgagaccggcuuagagcugacucuuacaaauaccagcauuaucaaccauaaauuuugcaauuuguccgacgcccacaagaaaaaccuguacgaucaugcgcuaaugucuauaaucucgacguuccaccucucaauuccaaauuuuaaccaguaugaagcuaugagcugugacuucaauggugggaagaucaguguccaguacaaccugucccacucuuaugccggagaugcagccaaucauugcggcacuguggcuaacggcguacuucaaaccuuuaugaggauggcauggggagggagcuacauugcccuggacuccgguugcgaucgcugggacuguaucaugacaucauaccaguauuugauaauucagaacacuaccugggaggaucacugccaguucagucgaccgagccccaucggcuaccucgggcuguuaucucaacguacaagagacauuuauaucuccaggcggcgccggggaaccuuuacguggacucuuucagauagcgaaggcaaggacacaccugguggguacugucugacccgcuggauguugaucgaggcugagcuaaaaugcuucggaaauacugccguugcgaaguguaacgaaaaacaugaugaggaauuuugcgacaugcugagacucuucgauuuuaauaagcaggcaauucagaggcugaaagcccccgcucagaugaguauacaacuuaucaacaaggccgugaaugcacugauuaacgaccaguugaucaugaagaaucaccuccgggacauaaugugcauuccauauugcaacuacucuaaauauugguaccugaaucacacaaccacgggcaagaccuccuuacccaaauguuggcuggucagcaacgggucguaccuaaaugaaacacauuucucugaugacaucgagcagcaagcugauaacaugaucacugagaugcuccagaaggaauauauggagcgccagggaaaaaccccucugggucuuguggacuuguucguguuuuccacaucauucuaccugauuaguaucuuucuccgacuggucaagauuccaacucacagacauauaguuggcaaacccugcccuaagccacacaggcuuaaucauauggggaucuguagcugcggacuguauaagcagccgggcgugcccguaaaauggaagcgguga

SEQ ID NO: 5014 - RNA, 1476 nt, Artificial Sequence
  derived and/or modified protein sequence (opt3) from LASV(G1932-SLE-2011;Clade IV)__AIT17212__GPCstabilized
augggccagaucgugaccuucuuucaagaggucccccacguuauugaagaggugaugaacauaguacugaucgcccucagcauucuugcugugcugaagggguuguacaauuuagcaacaugcggacuggucggucuagugacuuuccuccugcuuuguggcagauccugcacgaccucucuguauaaagggguuuacgaauugcagacacucgagcugaacauggaaacucugaauaugaccaugccucucucauguacaaagaacaauagucaucacuauaucauggugggaaacgagaccggcuuagagcugacucuuacaaauaccagcauuaucaaccauaaauuuugcaauuuguccgacgcccacaggaagaaccuguacgaucaugcgcuaaugucuauaaucucgacguuccaccucucaauuccaaauuuuaaccaguaugaagcuaugagcugugacuucaauggugggaaaaucaguguccaguacaaccugucccacucuuaugccggagaugcagccaaucauugcggcacuguggcuaacggcguacuucaaaccuuuaugcggauggcauggggagggagcuacauugcccuggacuccgguugcggcaagugggauuguaucaugacaucauaccaguauuugauaauucagaacacuaccugggaggaccacugccaguucagucgaccgagccccaucggguaccucggacuguuaucucaacguacaagagauauuuauaucuccaggcggcgccggggcaccuuuacguggacucuuucagacagcgaagguaaggauacaccugggggauacugucugacccgcuggauguugaucgaggcugagcuaaaaugcuucggcaauacugccguugcgaaguguaacgaaaaacaugacgaggaauuuugcgauaugcugagacucuucgacuuuaauaagcaggcaauucagaggcugaaagcccccgcucagaugaguauacaacuuaucaacaaggccgugaaugcacugauuaacgaucaguugaucaugaagaaucaccuccgggacauaaugugcauuccauauugcaacuacucuaaauauugguaccugaaucacacaaccacggggaagaccuccuuaccccgcuguuggcuggucagcaacggaucguaccuaaaugaaacacauuucucugacgauaucgagcagcaagcugacaacaugaucacugagaugcuccagaaagaauauauggagcgacaggguaagaccccucugggccuuguggauuuguucguguuuuccacaucauucuaccugauuaguaucuuucuccaccuggucaaaauuccaacucauagacacauaguugggaagcccugcccuaaaccacauaggcuuaaucacaugggaaucuguagcugcggccuguauaagcagccgggugugcccguaaaguggaaacgguga

SEQ ID NO: 5015 - RNA, 1476 nt, Artificial Sequence
  derived and/or modified protein sequence (opt3) from LASV(G1959-SLE-2011;Clade IV)__AIT17216__GPCstabilized
augggccagaucgugaccuucuuucaagaggucccccacguuauugaagaggugaugaacauaguacugaucgcccucagcauucuugcugugcugaagggguuguacaauuucgcaacaugcggauuagucggucuggugacuuuucuacuccuguguggcagauccugcacgaccucucuuuauaaagggguuuacgaacugcagacauuggagcucaacauggaaacucugaauaugaccaugccucugucauguacaaagaacaauagucaucacuauaucauggugggaaacgagaccggccucgaguuaacucugacaaauaccagcauuaucaaccauaaauucugcaaucuuuccgacgcccacaagaaaaacuuguacgaucaugcgcugaugucuauaaucucgacguuucaccuaucaauuccaaauuucaaccaguaugaagcuaugagcugugacuuuaauggugggaagaucaguguccaguacaaccucucccacucuuaugccggagaugcagccaaucauugcggcacuguggcuaacggcguacugcaaaccuucaugaggauggcauggggagggagcuacauugcccuugacuccgguugcggccggugggauuguaucaugacaucauaccaguaucugauaauucagaacacuaccugggaggaccauugccaguuuagucgcccgagccccaucggguacuugggacuccugucucaacgaacacgugauauuuauaucuccagaaggcgccggggcaccuucacguggacucucucagacagcgaagguaaggauacaccugggggauacugucuuacccgguggaugcugaucgaggcugaguugaaaugcuuuggcaauacugccguugcgaaguguaacgaaaaacacgacgaggaguucugcgauaugcuacgccuguuugacuucaauaagcaggcaauucagagacucaaagcccccgcucagaugaguauacaacugaucaacaaggccgugaaugcacuuauuaacgaucagcugaucaugaagaaucacuugagggacauaaugugcauuccauauugcaacuacucuaaauauugguaccucaaucauacaaccacggggaagaccucccugcccaaauguugguuagucagcaacggaucguaccugaaugaaacacacuucucugacgauaucgagcagcaagcugacaacaugaucacugagaugcuacagaaggaauauauggagcggcaggguaaaaccccucucggccugguggaucuuuuuguguucuccacaucauuuuacuugauuaguaucuuccugcaucucgucaagauuccaacucaccgccauauaguugggaaacccugcccuaagccacaccgacugaauuauaugggaaucuguagcugcggccuuuacaagcagccgggugugcccguaagauggaaaagguga

SEQ ID NO: 5016 - RNA, 1476 nt, Artificial Sequence
  derived and/or modified protein sequence (opt3) from LASV(G2141-SLE-2011;Clade IV)__AIT17224__GPCstabilized
augggccagaucgugaccuucuuucaagaggucccccacguuauugaagaggugaugaacauaguacugaucgcccucagcauucuugcugugcugaagggguuguacaaugucgcaacaugcggauuaaucggucuggugacuuuccuacuccuguguggcagauccugcacgaccacacuuuauaaagggguuuacgaacugcaggccuuggagcucaacauggaaacucugaauaugaccaugccucugucuuguacaaagaacaauucacaucacuauauuagggugggaaacgacaccggccucgaguuaacucugacaaauaccaguaucauacagcauaaauuuugcaaccuuagcgaugcgcacaagaaaaauuuguacgaccauacgcugauguccaucauuucuacuuuccaccuaucgaucccaaacuuuaaucaguaugaggcuaugucaugugauuucaacggugggaagauuagcguccaauacaaucucagucacuccuaugccggagacgcagccucucauugcggcaccguggcuaacggcguacugcagacauuuaugcggauggcauggggagggagcuacaucgcccuugauuccgguugcggcaauugggacuguauaaugacuucauaccaguaucugauuauccagaacaccacaugggaagaucacugccaauucagucgaccgagccccauuggguacuugggacuccugucucagcguaccagagacaucuauaucuccaggcggcgccggggcacguuuacuuggacacucucagauagcgagggucgcgacaccccugggggauacugucuuacuagauggaugcugauugaagcugaguugaagugcuucggcaacacagccguugcgaaauguaaugagaagcaugaugaagaguuuugcgacaugcuaaggcuguucgauuuuaacaaacaggcaauacagcggcucaagacccccgcccaaaugaguauccagcugauuaauaaagcugugaacgcccuuaucaaugaccagcugauaaugaagaaccacuugcgcgacauuaugugcaucccauauugcaauuacucuaaguauugguaccucaacaauacgaucaccgggaaauccagccugcccaaguguugguuagucucgaacggaucuuaccugaaugagacacacuucuccgaugacauugaacaagaggcagauaacaugaucacugagaugcuacagaaagaauauauggagcgacaggguaagaccccucucggccugguggaccuuuucguguuuucaacaaguuucuacuugauuagcauauuucugcaucucgucaaaaucccaacucacagacauauuguugggaagcccugcccuaaaccacacaggcugaaucauaugggaguguguuccugcggccuuuauaagcagccggguguacccgugcgguggaagcguuga

SEQ ID NO: 5017 - RNA, 1476 nt, Artificial Sequence
  derived and/or modified protein sequence (opt3) from LASV(G2147-SLE-2011;Clade IV)__AIT17228__GPCstabilized
augggccagaucgugaccuucuuucaagaggucccccacguuauugaagaggugaugaacauaguacugaucgcccucagcauucuugcugugcugaagggguuguacaauuucgcaacaugcggauuagucggucugcuaacuuuucuccugcuuuguggcagauccugcacgaccucucuguauaaagggguguacgaauugcagacacucgagcugaacauggaaacucugaauaugaccaugccucucucauguacaaagaacaauagucaucacuauaucaugguuggaaacgagaccggcuuagagcugacucuuacaaauaccagcauuaucgaccauaaauucugcaacuuguccgaugcccacaagaaaaaucuguacgaccaugcgcuaaugucuauaaucucgacguuucaccucucaauuccaaacuucaaucaguaugaagcuaugagcugugauuuuaacggugggaagaucagugugcaguacaaucugucccacucuuaugccggagacgcagccaaccauugcggcacugucgcuaauggcgugcuucaaaccuucaugaggauggcauggggagggagcuacauugcccuggauuccgguugcggcgggugggacuguaucaugacaucauaccaguauuugauaauucagaacacuaccugggaggaucacugccaguuuagucgcccgagccccaucggauaccucggccuguuaucucaacgaacacgugacauuuauaucuccagaaggcgccgggguaccuucacguggacucuuucagauagcgaagggaaggacacaccuggaggcuacugucugacccgguggauguugaucgaggcugagcuaaaaugcuuuggcaacacugccguagcgaaguguaaugaaaaacaugaugaggaguucugcgacaugcugcgccucuuugauuucaacaagcaggcaauucagagacugaaagcccccgcucagaugaguauacaacuuaucaauaaggccguuaacgcacugauuaaugaccaguugaucaugaagaaccaccucagggacauaaugugcauuccauauugcaauuacucuaaauauugguaccugaaccacacaaccacgggaaagaccuccuuacccaaauguuggcuggugagcaaugguucguaccuaaacgaaacacauuucucugaugacaucgagcagcaagcugauaauaugaucacugagaugcuccagaaggaauauauggagcggcagggcaaaaccccucuggggcuugucgacuuguuuguguucuccacaucauuuuaccugauuaguaucuuccuccaccuggugaagauuccaacucaucgccacauagucggaaaaagcugccccaagccucaucgacuuaaccacaugggcaucuguuccugcggucuguauaagcagccagggguuccggugaaauggaagagauga

SEQ ID NO: 5018 - RNA, 1476 nt, Artificial Sequence
  derived and/or modified protein sequence (opt3) from LASV(G2165-SLE-2011;Clade IV)__AIT17232__GPCstabilized
augggccagaucgugaccuucuuucaagaggucccccacguuauugaagaggugaugaacauaguacugaucgcccucagcauucuugcugugcugaagggguuguacaauuucgcaacaugcggauuagucggucuggugacuuuucuacuccuguguggcagauccugcacgaccucucuuuauaaagggguuuacgaacugcagacauuggagcucaacauggaaacucugaauaugaccaugccucugucauguacaaagaacaauagucaucacuauaucagggugggaaacgagaccggccucgaguuaacucugacaaauaccagcauuaucaaccauaaauucugcaaucuuuccgacgcccacaagaaaaacuuguacgaucaugcgcugaugucuauaaucucgacguuucaccuaucaauuccaaauuucaaccaguaugaagcuaugagcugugacuuuaaugaggguaagaucaguguccaguacaaccucucccacucuuaugccggggaugcagccaaucauugcggaacuguggcuaacggcguacugcaaaccuucaugcggauggcauggggcgggagcuacauugcccuugacuccggaugcgguaagugggauuguaucaugacaucauaccaguaucugauaauucagaacacuaccugggaagaccacugccaguuuagucgaccgagccccaucggcuacuuggggcuccugucucaacguacaagagauauuuauaucuccaggcggcgccggggaaccuucacguggacucucucagacagcgagggcaaagauacaccugguggguacugucuuacccgcuggaugcugaucgaggcugaauugaagugcuuuggaaauacugccguugcgaaauguaacgagaagcaugacgaagaguucugcgauaugcuaagacuguuugacuucaauaaacaggcaauugaaaggcucaaggcccccgcucagaugaguauacagcugaucaacaaggccgugaaugcacuuauuaacgaucaacugaucaugaaaaaucacuugcgggacauaaugugcauuccauauugcaacuacucuaaguauugguaccucaaucacacaaccacgggcaaaaccucccugcccaaguguugguuagucagcaacgggucguaccugaaugagacacauuucucugacgauaucgaacagcaggcugacaacaugaucacugagaugcuacaaaaagaauauauggagcgccagggaaagaccccucucggucugguggaucuuuuuguguucuccacaucauuuuacuugauuaguaucuuccugcaccucgucaaaauuccaacucaucgacacauaguuggcaagagcugccccaagccucauagacugaaucacauggggaucuguuccugcggacuuuauaaacagccaggcgugccgguaaaguggaaaagguga

SEQ ID NO: 5019 - RNA, 1476 nt, Artificial Sequence
  derived and/or modified protein sequence (opt3) from LASV(G2184-SLE-2011;Clade IV)__AIT17236__GPCstabilized
augggccagaucgugaccuucuuucaagaggucccccacguuauugaagaggugaugaacauaguacugaucgcccucagcauucuugcugugcugaagggguuguacaauuucgcaacaugcggauuagucggucuggugacuuuucuacuccuguguggcagauccugcacgaccucucuuuauaaagggguuuacgaacugcagacauuggagcucaacauggaaacucugaauaugaccaugccucugucauguacaaagaacaauagucaucacuauaucauggugggaaacgagaccggccucgaguuaacucugacaaauaccagcauuaucaaccauaaauucugcaaucuuuccgacgcccacaagaaaaacuuguacgaucaugcgcugaugucuauaaucucgacguuucaccuaucaauuccaaauuucaaccaguaugaagcuaugagcugugacuuuaauggugggaggaucaguguccaguacaaccucucccacucuuaugccggagaggcagccaaucauugcggcacuguggcuaacggcguacugcaaaccuucaugcggauggcauggggagggagcuacauugcccuugauuccgguugcggcaagugggacuguaucaugacaucauaccaguaucugauaauucagaacacuaccugggaagaucacugccaguuuagucgaccgagccccaucggguacuugggacuccugucucaacguacaagagacauuuauaucuccaggcggcgccggggcaccuucacguggacucucucagauagcgaggguaaggacacaccugggggauacugucuuacccgcuggaugcugaucgaggcugaauugaaaugcuuuggcaauacugccguugcgaaguguaacgagaaacaugaugaagaguucugcgacaugcuaagacuguuugauuucaauaagcaggcaauucagaggcucaaagcccccgcucagaugaguauacaacugaucaacaaggccgugaaugcacuuauuaacgaccagcugaucaugaagaaucacuugcgggauauaaugugcauuccauauugcaacuacucucgcuauugguaccucaaucacacaaccacggggaaaaccucccugcccaaguguugguuagucagcaacggaucguaccugaaugagacacauuucucugacgacaucgagcagcaagcugauaacaugaucacugaaaugcuacagaaagaguauauggaacgacaggguaagaccccucucggccugguggaccuuuuuguguucuccacaucauuuuacuugauuaguaucuuccugcaccucgucaaaauuccaacucauagacacauaguuggaaagagcugccccaaaccucauaggcugaaucacauggggaucuguuccugcggccuuuauaagcagccaggugugccgguaaaguggaaacgguga

SEQ ID NO: 5020 - RNA, 1476 nt, Artificial Sequence
  derived and/or modified protein sequence (opt3) from LASV(G2197-SLE-2011;Clade IV)__AIT17240__GPCstabilized
augggccagaucgugaccuucuuucaagaggucccccacguuauugaagaggugaugaacauaguacugaucgcccucagcauucuugcugugcugaagggguuguacaauuuagcaacaugcggacuggucggucuagugacuuuccuccugcuuuguggcagauccugcacgaccucucuguauaaaggguuuuacgaauugcagacacucgagcugaacauggaaacucugaauaugaccaugccucucucauguacaaagaacaauagucaucacuauaucaggguuggaaacgagaccggcuuagagcugacucuuacaaauaccagcauuaucgaccauaaauucugcaacuuguccgaugcccacaagaaaaaucuguacgaccaugcgcuaaugucuauaaucucgacguuucaccucucaauuccaaacuucaaucaguaugaagcuaugagcugugauuuuaacggugggaagaucagugugcaguacaaucugucccacucuuaugccggagacgcagccaaccauugcggcacugucgcuaauggcgugcuucaaaccuucaugcggauggcauggggagggagcuacauugcccuggauuccgguugcggccgaugggacuguaucaugacaucauaccaguauuugauaauucagaacacuaccugggaggaucacugccaguuuagucguccgagccccaucggguaccucggacuguuaucucaaaagacaagagacauuuauaucuccaggcggcgccggggcaccuucacguggacucuuucagauagcgaagguaaagacacaccugggggauacugucugacccgcuggauguugaucgaggcugagcuaaagugcuuuggcaacacugccguagcgaaauguaaugaaaagcaugaugaggaguucugcgacaugcugagacucuuugauuucaacaaacaggcaauucagaggcugaaggcccccgcucagaugaguauacaacuuaucaauaaggccguuaacgcacugauuaaugaccaguugaucaugaaaaaccaccuccgggacauaaugugcauuccauauugcaauuacucuaaguauugguaccugaaccacacaaccacggggaaaaccuccuuacccaaguguuggcuggugagcaauggaucguaccuaaacgaaacacauuucucugaugacaucgagcagcaagcugauaauaugaucacugagaugcuccagaaagaauauauggagcgccaggguaagaccccucugggccuugucgacuuguuuguguucuccacaucauuuuaccugauuaguaucuuccuccaccuggugaaaauuccaacucaucgacacauagucggaaagagcugccccaagccucauagacuuaaccacauggggaucuguuccugcggccuguauaaacagccagguguuccggugaaguggaaaagguga

SEQ ID NO: 5021 - RNA, 1476 nt, Artificial Sequence
  derived and/or modified protein sequence (opt3) from LASV(G2222-SLE-2011;Clade IV)__AIT17244__GPCstabilized
augggccagaucgugaccuucuuucaagaggucccccacguuauugaagaggugaugaacauaguacugaucgcccucagcauucuugcugugcugaagggguuguacaauuuagcaacaugcggacuggucggucuagugacuuuccuccugcuuuguggcagauccugcacgaccaaccuguauaaagggguuuacgaauugcagacacucgagcugaauauggaaacucugaacaugaccaugccucucucuuguacaaagaacucaagucaucacuauaucagggugggaaaugagaccggcuuagagcugacucuuacaaauaccagcauuaucgaccauaaauuuugcaacuuguccgaugcccacaagaaaaaucuguacgaccaugcgcuaaugucuauaaucucgacguuccaccucucaauuccaaacuuuaaucaguaugaagcuaugagcugugauuucaacggugggaagaucaguguccaguacaaucugucccacucuuaugugggagacgccgcagaucauugcggcacuguagccaacggcguucuucaaaccuuuaugcggauggcuuggggagggagcuacauugcacuggacuccgguugcggcaagugggauuguaucauaacaucauaccaguauuugauuauccagaauacuaccugggaggaccacugccaguucagucgaccgagccccauuggguaccucggacuguuaucucaacguacaagagauaucuauaucuccaggcggcgccggggcaccuuuacguggacucuuucagacagcgaagguaaagauacaccugggggauacugucugacccgcuggauguugauugaggccgagcuaaagugcuucggcaacacugcuguggccaaauguaacgaaaagcaugacgaggaauuuugcgauaugcugagacucuucgacuuuaauaaacaggcgauacagaggcugaaggcacccgcccagaugaguauccaacuuauuaacaaggcugucaaugcccugaucaacgaccaguugauaaugaaaaaucaccuccgggauauuaugugcaucccauauugcaacuacucuaaguauugguaccugaaucacacaaucaccgggaaaacguccuuaccccgcuguuggcuggugagcaacggaucguaccuaaaugaaacccgauucucugacgauauugagcagcaagcagacaacaugaucacagagaugcuccagaaggaauauauggagagacaggguaaaacuccucugggccuuguggauuuguucgucuuuuccaccucauucuaccugauuaguauauuucuccaucugguuaagaucccaacacacaggcauauuguggggaaacccugcccuaagccacaccggcuuaaucauaugggaaucuguagcugcggccuguauaagcagccggguguacccgugaaauggaagcguuga

SEQ ID NO: 5022 - RNA, 1476 nt, Artificial Sequence
  derived and/or modified protein sequence (opt3) from LASV(G2230-SLE-2012;Clade IV)__AIT17246__GPCstabilized
augggccagaucgugaccuucuuucaagaggucccccacguuauugaagaggugaugaacauaguacugaucgcccucagccuucuggcuguguugaagggguuauacaaugucgcaacaugcggacugauuggucuaaucacuuuccuccugcuuuguggcagauccugcacgaccaaccuguauaaagggguguacgaauugcagacacucgagcugaauauggaaacucugaacaugaccaugccucucucuuguacaaagaacucaagucaucacuauauuaugguuggaaaugagaccggcuuagagcugacucuuacaaauaccagcaucauaaaccauaaauuuugcaauuuguccgacgcccacaagaaaaaccuguacgaucauacgcuaaugucuaucauuucgacuuuccaccucucaaucccaaauuuuaaccaguaugaagcgaugagcugugacuucaauggugggaagauuagugugcaguacaaccugucccacucuuaugcugucgaugccgcaaaucauugcggaaccguggccaacggcauccuucaaacauuuaugaggauggcuuggggcgggagcuacauagcacuggacuccggaugcgguaacugggauuguauuaugacuucauaccaguauuugaucauucagaauaccacaugggaggaccacugccaguucagucgcccgagccccaucggcuaccucgggcuguuaucucaacgaacccgugauaucuauauuuccagaaggcgccggggaacguuuacuuggacacuuucagacagcgaaggcaacgauaccccugguggguacugucugacucgguggauguugauagaggccgagcuaaagugcuucggaaauacagcuguagccaaauguaacgaaaagcaugacgaggaauuuugcgauaugcugcgccucuucgacuuuaauaaacaggcgauccagagacugaaggcacccgcccagaugaguauucaacuuaucaacaaagcuguuaaugcccugauaaacgaucaguugauuaugaagaaucaccucagggacaucaugugcaucccauauugcaacuacucuaaguauugguaccugaaucacaccacgaccggcaaaacauccuuacccaaguguuggcuggugagcaacgggucguaccuaaaugaaacucauuucucugacgauauugagcagcaagcagacaacaugaucaccgagaugcuccagaaagaauauauggagcggcagggaaagacaccucugggucuugucgauuuguucguguuuuccacuucauucuaccugauuaguauauuucuccaccuggugaaaaucccaacccaucgccacauugucggcaagcccugcccuaaaccacaucgacuuaaucacauggggaucuguagcugcggacuguauaagcagccgggcguucccgugagauggaagagguga

SEQ ID NO: 5023 - RNA, 1476 nt, Artificial Sequence
  derived and/or modified protein sequence (opt3) from LASV(G2259-SLE-2012;Clade IV)__AIT17250__GPCstabilized
augggccagaucgugaccuucuuucaagaggucccccacguuauugaagaggugaugaacauaguacugaucgcccucagccuucuggcuguguugaagggguuauacaaugucgcaacaugcggacugauuggucuagugacuuuccuccugcuuuguggcagauccugcacgaccaaccuguauaaagggguuuacgaauugcagacacucgagcugaauauggaaacucugaacaugaccaugccucucucuuguacaaagaauaacucacaucacuauaucauggugggaaaugagaccggcuuagagcugacucuuacaaacaccaguauuaucaaucauaaauuuugcaacuugagcgacgcccacaagaaaaaucuguacgaucauacgcuaauguccauaaucucuacuuuccaccucucgauuccaaacuuuaaucaguaugaagcgaugucaugugacuucaacggugggaagaucagcguccaguacaaucugagucacuccuaugcuguggaugccgcaaaccauugcggaaccguagccaacggcguucuucaaacauuuaugaggauggcuuggggcgggucuuacauugcacuggacagcggaugcgguaauugggauuguaucaugacuuccuaccaguauuugauaauucagaacaccacaugggaggaccacugccaguucucacgcccgagucccaucggcuaccucgggcuguuaagccaacgaacccgugauauuuauaucucuagaaggcgccggggaacguuuacuuggacacuuuccgacucagaaggcaaugauaccccugguggguacugucugacucgguggauguugaucgaggccgagcuaaagugcuucggaaacacagcuguggccaaauguaaugaaaagcaugacgaggaauuuugcgauaugcugcgccucuucgacuuuaacaaacaggcgauucagagacugaaggcacccgcccagaugagcauacaacuuaucaauaaagcugucaacgcccugauuaaugaucaguugaucaugaagaaccaccucagggacauaaugugcauuccauauugcaauuacaguaaguauugguaccugaaccacaccacgaccggcaaaacaucuuuacccaaguguuggcugguguccaaugggagcuaccuaaacgaaacucauuucucggacgauaucgagcagcaagcagacaauaugaucaccgagaugcuccagaaagaauauauggagcggcagggaaagacaccucugggucuuguggauuuguucgucuuuucuacuuccuucuaccugauuucaaucuuucuccaccugguuaaaauuccaacccaucgccacauagugggcaagcccugcccuaaaccacaucgacuuaaccacauggggaucuguaguugcggacuguauaagcagccgggcguacccgugagauggaagagguga

SEQ ID NO: 5024 - RNA, 1476 nt, Artificial Sequence
  derived and/or modified protein sequence (opt3) from LASV(G2263-SLE-2012;Clade IV)__AIT17254__GPCstabilized
augggccagaucgugaccuucuuucaagaggucccccacguuauugaagaggugaugaacauaguacugaucgcccucagcauucuugcugugcugaagggguuguacaauuucgcaacaugcggaaucgucgguuuagugacuuuucugcuacucuguggcagauccugcacgaccucucuguauaaagggguuuacgaacuucagacacuggaguugaacauggaaacucucaauaugaccaugccucugucauguacaaagaacaauagucaucacuauauuauggugggaaacgagaccggccuggagcucacuuuaacaaauaccagcaucauaaaccauaaauucugcaaucuguccgacgcccacaagaaaaaccuuuacgaucaugcguugaugucuaucauuucgacguuucaccugucaaucccaaauuucaaccaguaugaagcuaugagcugugacuuuaauggugggaagauuaguguccaguacaaccuaucccacucuuaugccggagaugcagccaaucauugcggcacuguggcuaacggcguacuccaaaccuucaugaggauggcauggggagggagcuacaucgcccuggacuccgguugcgaucgcugggacuguauaaugacaucauaccaguaucuuauuauccagaacacuaccugggaggaucacugccaguuuagucgaccgagccccauuggcuaccugggguugcucucucaacguacaagagacaucuauaucuccaggcggcgccggggaaccuucacguggacucugucagauagcgaaggcaagaauacaccugguggguacugucucacccgcuggaugcuuauugaggcugagcugaaaugcuuuggaaacacugccguugcgaaguguaaugaaaaacaugacgaggaguucugcgauauguugagacuauuugacuucaacaagcaggcaauacagaggcugaaagcccccgcucagaugaguaucucucucauuaauaaggccgugaacgcacugaucaaugaucaacuuauaaugaagaaccaucugcgggacauuaugugcaucccauauugcaauuacuccaaauauugguacuugaaccacacaaccacgggcaagaccagccucccccgcuguuggcuggucucgaaugggucuuacuuaaacgaaacacacuucuccgacgauaucgagcagcaggcugacaauaugauuacugagaugcugcaaaaagaauauauggaucgacagggaaagaccccucuaggucucguggaccuguuuguguucucaacaaguuuuuaccuuaucagcauuuucuugcaccuggucaaaauaccaacucauagacacaucguuggcaagaccugccccaaaccucauaggcucaaccacauggggauuuguuccugcggacuguauaagcagccaggcgugccgguaaaguggaaacgguga

SEQ ID NO: 5025 - RNA, 1476 nt, Artificial Sequence
  derived and/or modified protein sequence (opt3) from LASV(G2280-SLE-2012;Clade IV)__AIT17258__GPCstabilized
augggccagaucgugaccuucuuucaagaggucccccacguuauugaagaggugaugaacauaguacugaucgcccucagcauucuugcugugcugaagggguuguacaauaucgcaacaugcggauuagucggucuggugacuuuccuacuccuguguggcagauccugcacgaccucucuuuauaaagggguuuacgaacugcagacauuggagcucaacauggaaacucugaauaugaccaugccucugucauguacaaagaacaauagucaucacuauauuauggugggaaacgagaccggccucgaguuaacucugacaaauaccagcaucauaaaccauaaauuuugcaaucuuuccgacgcccacaagaaaaacuuguacgaucaugcgcugaugucuaucgucucgacguuccaccuaucaauuccaaauuuuaaccaguaugaagcuaugagcugugacuucaauggugggaagaucagugugcaguacaaccucucccacucuuaugccguagaugcagccaaucauugcggaacuguugcuaacggcgugcugcaaaccuuuaugaggauggcauggggcgggagcuacauugcccuugacuccggaugcgguggcugggauuguaucaugacaucauaccaguaucugauaauucagaacgucacuugggaggaccacugccaguucagucgcccgagccccaucggguacuugggacuccugucucaacgaacccgugauguguauauuuccagaaggcgccggggcacauuuaccuggacgcucucagacagcgaagguaaugauacuccugggggauacugucuuacacgguggaugcugaucgaggcugaguugaagugcuucggcaacaccgccguggcgaaauguaaugaaaagcaugacgaggaauuuugcgauaugcuacgccuguucgacuuuaacaaacaggcaauccagagacucaaggcccccgcucagaugaguauucaacugauaaauaaagccgucaacgcacuuaucaaugaucagcugauuaugaagaaccacuugagggacaucaugugcauaccauauugcaauuacucuaaguauugguaccucaaccacacuacaaccgggaaaacgucccugcccaaguguugguuaguuagcaauggaucguaccugaacgaaacccauuucucugacgauauugagcagcaagcugacaauaugaucacagagaugcuacagaaagaauauauggagcggcaggguaagacuccucucggccugguggaucuuuucguauuuuccaccucauucuacuugaucaguauuuuucugcaccucgugaaaaucccaacacaucgccacauugucgggaagcccugcccuaaaccacaucgacugaaccacaugggaauauguagcugcggccuuuauaagcagccgggugugcccguuaaguggaaaagauga

SEQ ID NO: 5026 - RNA, 1476 nt, Artificial Sequence
  derived and/or modified protein sequence (opt3) from LASV(G2295-SLE-2012;Clade IV)__AIT17262__GPCstabilized
augggccagaucgugaccuucuuucaagaggucccccacguuauugaagaggugaugaacauaguacugaucgcccucagcauucuugcugugcugaagggguuguacaauuuagcaacaugcggacuggucggucuagugacuuuccuccugcuuuguggcagauccugcacgaccucucuguauaaagggguuuacgaauugcagacacucgagcugaacauggaaacucugaauaugaccaugccucucucauguacaaagaacaauagucaucacuauaucauggugggaaacgagaccggcuuagagcugacucuuacaaauaccagcauuaucaaccauaaauuuugcaauuuguccgacgcccacaagaaaaaccuguacgaucaugcgcuaaugucuauaaucucgacguuccaccucucaauuccaaauuuuaaccaguaugaagcuaugagcugugacuucaauggugggaagaucaguguccaguacaaccugucccacucuuaugccggagaugcagccacucauugcggcaccguggcuaauggcguacuucaaacauuuaugaggauggcauggggagggagcuacauugcccuggacuccgguugcggcaagugggauuguaucaugacuucauaccaguauuugauaauucagaacaccacaugggaggaccacugccaguucagucgcccgagccccaucggguaccucggacuguuaucucaacgaacccgugauauuuauaucuccagaaggcgccggggcacguuuacuuggacacuuucagacagcgaagguaaagauaccccugggggauacugucugacucgguggauguugaucgaggcugagcuaaagugcuucggcaacacagccguugcgaaauguaaugaaaagcaugacgaggaauuuugcgauaugcugcgccucuucgacuuuaacaaacaggcaauucagagacugaagacccccgcccagaugaguauacaacuuaucaauaaggcugugaacgcccugauuaaugaucaguugaucaugaaaaaccaccucagggacauaaugugcauuccauauugcaauuacucuaaguauugguaccugaaccacacgaccacagggaaaacuuccuuaccccgguguuggcuggucagcaauggaucguaccuaaacgaaacccauuucucugacgauaucgagcagcaagcagacaauaugaucacagagaugcuccagaaggaauauauggagcgccaggguaaaacuccucugggccuuguggauuuguucguguuuuccaccucauucuaccugauuaguaucuuucuccaccuggucaagauuccaacacaucgacacauaguugggaaacccugcccuaagccacauagacuuaaccacaugggaaucuguagcugcggccuguauaagcagccgggugugcccguaaaauggaagagguga

SEQ ID NO: 5027 - RNA, 1476 nt, Artificial Sequence
  derived and/or modified protein sequence (opt3) from LASV(G2315-SLE-2012;Clade IV)__AIT17266__GPCstabilized
augggccagaucgugaccuucuuucaagaggucccccacguuauugaagaggugaugaacauaguacugaucgcccucagcauucuugcugugcugaagggguuguacaauuuagcaacaugcggacuggucggucuagugacuuuccuccugcuuuguggcagauccugcacgaccucucuguauaaagggguuuacgaauugcagacacucgagcugaacauggaaacucugaauaugaccaugccucucucauguacaaagaacaauagucaucacuauaucauggugggaaacgagaccggcuuagagcugacucuuacaaauaccagcuugauuaaccauaaauuuugcaaucuguccgacgcccacaagaaaaaccuauacgaucaugcgcucaugucuaucauaucgacguuccaccugucaaucccaaauuuuaaccaguaugaagcuaugagcugugacuucaauggugggaagauuaguguccaguacaaccuuucccacucuuaugccguggaugcagccaaucauugcggaacuguagcuaacggcguucugcaaaccuuuaugaggauggcauggggcgggagcuacaucgccuuggacuccggaugcgguggcugggauuguauuaugacaucauaccaguaucucaucauacagaacacuaccugggaggaccacugccaguucagucgcccgagccccauuggguaccugggauuacugucucaacgaacacgugauaucuauauuuccagaaggcgccggggcaccuuuacguggacucugucagacagcgaagguaaggauacaccugggggauacuguuugacccgguggaugcuaaucgaggcugagcugaaaugcuucggcaauacugccguggcgaaguguaacgaaaaacaugacgaggaauuuugcgauaugcuccgccuguucgacuuuaauaagcaggcaauccagagacuuaaagcccccgcucagaugaguauucaacugauaaacaaggccgucaaugcauugaucaacgaucagcucauuaugaagaaucaccugagggacaucaugugcauaccauauugcaacuacucuaaauauugguacuuaaaucacacaaccacggggcggaccucccugccccgcuguuggcuagugagcaacggaucguaccucaaugaaacacauuucucugacgauauugagcagcaagcugacaacaugaucacugagaugcugcagaaggaauauauggagcgacaggguaaaaccccucuuggcuugguggaucuguucgucuuuuccacaucauucuaccucaucaguauuuuucugcaccuuguuaagaucccaacucauagacacauuguggggaaaagcugccccaagccucauaggcugaaucacaugggaauauguuccugcggcuuguauaaacagccagguguaccggugaaguggaagcgguga

SEQ ID NO: 5028 - RNA, 1476 nt, Artificial Sequence
  derived and/or modified protein sequence (opt3) from LASV(G2318-SLE-2012;Clade IV)__AIT17270__GPCstabilized
augggccagaucgugaccuucuuucaagaggucccccacguuauugaagaggugaugaacauaguacugaucgcccucagcgugcuugcuguccugaagggguuguacaauuucgcaacaugcggauuagugggucugguuacuuuucuacuccuguguggcagauccugcucuacgucaguguauaaaggggucuacgaacuucagacccuggaguugaacauggaaacacucaauaugacuaugccucugaguuguaccaagaacaauagccaucacuauauuauggugggaaacgagacaggccuggagcucaccuuaacuaauacauccaucauuaaccauaaauucugcaaucugucugacgcccacaagaaaaaccuuuacgaucaugcguugaugucgaucauaucaaccuuucaccugagcaucccaaauuucaaccaguaugaagcuaugaguugugacuuuaauggugggaagauuuccguacaguacaaccuaucucacagcuaugccguugaugcagccaaucauugcggaacgguggcuaacggcguccuccaaacuuucaugaggauggcauggggcggguccuacaucgcccuggacucaggaugcgguggcugggauuguauuaugaccaacuaccaguaucuuaucauacagaauacaacuugggaggaccauugccaguuuagucggccgagccccauuggguaccugggauugcucucucaacgcacccgagauaucuauauuucccguagacgccggggcacauucaccuggacgcugucagacagcgaagguaaggauacuccugggggauacugucucacaagguggaugcuuaucgaggcugagcugaaaugcuuuggcaacaccgccguggcgaaguguaaugaaaaacacgacgaggaguucugcgauauguugcggcuauuugacuucaacaagcaggcaauccagcgccugaaagcccccgcucagaugaguauucaacucauaaauaaggccgugaacgcacugaucaaugaucagcuuauuaugaagaaccaccugagagacaucaugugcauaccauauugcaauuacucuaaauauugguacuugaaccauacuacaaccgggaggacgucccuccccaaguguuggcuggucagcaauggaucguacuuaaacgaaacccacuucucugacgauauugagcagcaagcugacaauaugaucacagagaugcugcagcgggaauauauggagcgccaggguaaaacuccucuaggccucguugaucuguuuguguucuccaccucauuuuaccuuaucaguauuuucuugcaucugguaaagaucccaacacaccgacauauuguggggaaaagcugccccaagccucacagacucaaccacaugggaauauguuccugcggccuguauaaacagccaggugucccggugaaguggaagagguga

SEQ ID NO: 5029 - RNA, 1476 nt, Artificial Sequence
  derived and/or modified protein sequence (opt3) from LASV(G2363-SLE-2012;Clade IV)__AIT17274__GPCstabilized
augggccagaucgugaccuucuuucaagaggucccccacguuauugaagaggugaugaacauaguacugaucgcccucagcauucuugcugugcugaagggguuguacaaugucgcaacaugcggauuaacuggucugguggccuuccuacuccuguguggcagauccugcacgaccacacuuuauaaagggguuuacgaacugcaggcguuggagcucaacauggaaacucugaauaugaccaugccucugucuuguacaaagaacaauucacaucacuauaucagggugggaaacgagaccggccucgaguuaacucugacaaauaccaguauuaucgaacaucgguuuugcaaccuuagcgacgcucacaaaaagaauuuguacgaucaugcccugauguccauaaucucuacguuccaccuaucgauuccaaacuuuaaucaguaugaggcaaugucaugugacuucaacggugggaaaaucagcguccaguacaaucucagucacuccuaugccguggaugcugcaaaccauugcggaacuguagccaauggcguucugcaaaccuuuaugcgcauggcuuggggcgggucuuacauugcccuugacagcggaugcaacgguugggauuguaucaugacauccuaccaguaucugauaauucagaacacuaccugggaagaccacugccaguucucacguccgagucccaucggcuacuuggggcuccugagccaaagaacaagggauauuuauaucucucggcgccgccggggaaccuuuacguggacucucuccgacucagagggcaaggauacaccugguggguacugucuuaccagauggaugcugaucgaggcggaauugaagugcuucggaaauacugcaguggccaaauguaacgagaagcaugacgaagaguuuugcgauaugcuaaggcuguucgacuuuaauaaacaggcuauucagcggcucaaggcccccgcacagaugagcauacaacugaucaacaaagcugucaaugcccuuauuaacgaucagcugaucaugaagaaucacuugcgcgacauaaugugcauuccauauugcaacuacaguaaguauugguaccucaauaacacagcgaccggcaaaacgucucugccccgauguugguuaguguccaaugggagcuaccugaacgagacccacuucucggacgauaucgagcagcaagccgacaauaugaucacagaaaugcuacagaaggaguauauggaaagacagggaaaaacuccucucggucugguggaucuuuucgucuuuucuaccuccuucuacuugauuucaaucuuucugcaucucguuaagauuccaacacacaggcauauagugggcaaacccugcccuaagccacaccggcugaaccauauggggaucuguaguugcggacuuuauaaacagccgggcgcacccguacguuggaagcgcuga

SEQ ID NO: 5030 - RNA, 1476 nt, Artificial Sequence
  derived and/or modified protein sequence (opt3) from LASV(G2384-SLE-2012;Clade IV)__AIT17276__GPCstabilized
augggccagaucgugaccuucuuucaagaggucccccacguuauugaagaggugaugaacauaguacugaucgcccucagcauucuugcugugcugaagggguuguacaauuucgcaacaugcggauuagucggucuggugacuuuucuacuccuguguggcagauccugcacgaccucucuuuauaaagggguuuacgaacugcagacauuggagcucaacauggaaacucugaauaugaccaugccucugucauguacaaagaacaauagucaucacuauaucauggugggaaacgagaccggccucgaguuaacucugacaaauaccagcauuaucaaccauaaauucugcaaucuuuccgacgcccacaagaaaaacuuguacgaucaugcgcugaugucuauaaucucgacguuucaccuaucaauuccaaauuucaaccaguaugaagcuaugagcugugacuuuaauggugggaagaucaguguccaguacaaccucucccacucuuaugccggagaugcagccaaucauugcggcacuguggcuaacggcguacugcaaaccuucaugaggauggcauggggagggagcuacauugcccuugacuccgguugcggcaagugggauuguaucaugacaucauaccaguaucugauaauucagaacacuaccugggaggaccauugccaguuuagucggccgagccccaucggguacuugggacuccugucucaacgcacacgagauauuuauaucucccguagacgccggggcaccuucacguggacucucucagacagcgaagguaaagauacaccugggggauacugucuuaccagguggaugcugaucgaggcugaguugaagugcuuuggcaauacugccguugcgaaauguaacgaaaagcacgacgaggaguucugcgauaugcuacggcuguuugacuucaauaaacaggcaauucagcgccucaaggcccccgcucagaugaguauacaacugaucaacaaggccgugaaugcacuuauuaacgaucagcugaucaugaaaaaucacuugagagacauaaugugcauuccauauugcaacuacucuaaguauugguaccucaaucauacaaccacggggaaaaccucccugcccaaguguugguuagucagcaacggaucguaccugaaugaaacacacuucucugacgauaucgagcagcaagcugacaacaugaucacugagaugcuacagaaagaauauauggagaggcaggguaagaccccucucggccugguggaucuuuuuguguucuccacaucauuuuacuugauuaguaucuuccugcaucucgucaaaauuccaacucaccggcauauaguuggaaagagcugccccaagccucaccgccugaaucacauggggaucuguuccugcggccuuuauaaacagccaggugugccgguacgauggaagagauga

SEQ ID NO: 5031 - RNA, 1473 nt, Artificial Sequence
  derived and/or modified protein sequence (opt3) from LASV(G2392-SLE-2012;Clade IV)__AIT17280__GPCstabilized
augggccagaucgugaccuucuuucaagaggucccccacguuauugaagaggugaugaacauaguacugaucgcccucagcauucuugcugugcugaagggguuguacaauuucgcaacaugcggauuagucggucuggugacuuuucuacuccuguguggcagauccugcacgaccucucuuuauaaagggguuuacgaacugcagacauuggagcucaacauggaaacucugaauaugaccaugccucugucauguacaaagaacaauagucaucacuauaucagggugggaaacgagaccggccucgaguuaacucugacaaauaccagcauuaucgaccauaaauucugcaaccuuuccgaugcccacaagaaaaauuuguacgaccaugcgcugaugucuauaaucucgacguuucaccuaucaauuccaaacuucaaucaguaugaagcuaugagcugugauuuuaacggugggaagaucaguguccaguacaaucucucccacucuuaugccggagacgcagccaaccauugcggcacuguggcuaauggcguacugcaaaccuucaugcggauggcauggggagggagcuacauugcccuugauuccgguugcgagugggacuguaucaugacaucauaccaguaucugauaauucagaacacuaccugggauaaccauugccaguuuagucgcccgagccccaucggcuacuuggggcuccugucucaacgaacacgugacauuuauaucuccagaaggcgccggggaaccuucacguggacucucucagauagcgaaggcaaggacacaccugguggguacugucuuacccgguggaugcugaucgaggcugaguugaaaugcuuuggaaauacugccguugcgaaguguaacgaaaaacacgaugaggaguucugcgacaugcuacgccuguuugauuucaauaagcaggcaauucagagacucaaagugcccgcccagaugaguauacaacugaucaacaaggcugucaaugcccuuauuaacgaccagcugaucaugaagaaucacuugagggacauaaugugcauuccauauugcaacuacucuaaauauugguaccucaaucauacaaccacgggcaagaccucccugcccaaauguugguuagugagcaacgggucguaccugaaugaaacacacuucucugaugacaucgagcagcaagcagauaacaugaucacugagaugcuacagaaggaauauauggagcggcagggaaaaaccccucucggucugguggaccuuuuugucuucuccacaucauuuuacuugauuaguaucuuccugcaucucguuaagauuccaacucaccgccauauagugggcaaaagcugccccaagccucaccgacugaaucacauggggaucuguuccugcggauuuuauaagcagccaggcguaccggugaaauggaagagauga

SEQ ID NO: 5032 - RNA, 1476 nt, Artificial Sequence
  derived and/or modified protein sequence (opt3) from LASV(G2405-SLE-2012;Clade IV)__AIT17284__GPCstabilized
augggccagaucgugaccuucuuucaagaggucccccacguuauugaagaggugaugaacauaguacugaucgcccucagcgugcuugcuguccugaagggguuguacaauuucgcaacaugcggaauuguggguuuaguuacuuuucugcuacucuguggcagauccugcacgaccucucuguauaaagggguguacgaacuucagacacuggaguugaacauggaaacucucaauaugaccaugccucugucauguacaaagaacaauagucaucacuauaucauggucggaaacgacaccggccuggagcucacuuuaacaaauaccagcauuaucaaccauaaauucugcaaucuguccgaugcccacaagaaaaaccuuuacgaccaugcguugaugucuauaaucucgacguuucaccugucaauuccaaauuucaaccaguaugaggcuaugagcugugauuuuaauggugggaagaucagugugcaguacaaccuaucccacucuuaugccggagacgcagccgaucauugcggcacuguagcuaauggcguucuccaaaccuucaugaggauggcauggggagggagcuacauugcccuggacuccgguugcggccgcugggauuguaucaugacaucauaccaguaucuuauaauucagaacacuaccugggaagaccacugccaguuuagucgaccgagccccaucggguaccugggauugcucucucaacguacaagagauauuuauaucuccaggcggcgccggggcaccuucacguggacucugucagacagcgaggguaaggauacaccugggggauacugucucacccgcuggaugcuuaucgaagcugagcugaaaugcuuuggcaacacugccguggcgaaguguaaugagaaacaugacgaagaguucugcgauauguugagacuauuugacuucaacaagcaggcaauucagaggcugaaagcccccgcucagaugaguauacaacucaucaauaaggccgucaacgcacugauuaaugaccagcuuaucaugaagaaccaucugcgggauauaaugugcauuccauauugcaauuacucuaaauauugguacuugaaccacacaaccacggggaagaccucccuccccaaauguuggcuggugagcaauggaucguacuuaaacgagacacacuucucugacgauaucgaacagcaagcugacaauaugaucacugagaugcugcagaaggaguauauggaacgccaggguaaaaccccucuaggccucguggaucuguuugucuucuccacaucauuuuaccuuauuaguaucuucuugcaccugguuaagauuccaacucaucgacacauaguggggaaacccugcccuaagccacauagacucaaccacaugggaaucuguagcugcggccuguauaagcagccggguguacccgugaaauggaagagguga

SEQ ID NO: 5033 - RNA, 1476 nt, Artificial Sequence
  derived and/or modified protein sequence (opt3) from LASV(G2427-SLE-2012;Clade IV)__AIT17288__GPCstabilized
augggccagaucgugaccuucuuucaagaggucccccacguuauugaagaggugaugaacauaguacugaucgcccucagcauucuugcugugcugaagggguuguacaauuucgcaacaugcggauuagucggucuggugacuuuucuacuccuguguggcagauccugcacgaccucucuuuauaaagggguuuacgaacugcagacauuggagcucaacauggaaacucugaauaugaccaugccucugucauguacaaagaacaauagucaucacuauaucauggugggaaacgagaccggccucgaguuaacucugacaaauaccagcauuaucaaccauaaauucugcaaucuuuccgacgcccacaagaaaaacuuguacgaucaugcgcugaugucuauaaucucgacguuucaccuaucaauuccaaauuucaaccaguaugaagcuaugagcugugacuuuaauggugggaagaucaguguccaguacaaccucucccacucuuaugccguggaugcagccaaucauugcggaacuguagcuaacggcguucugcaaaccuucaugaggauggcauggggcgggggauacauugcccuugacagcgguugcggcaacugggauuguaucaugacauccuaccaguaucugauaauucagaauacuaccugggaggaccacugccaguuuucacgcccgagucccaucggguacuugggacuccugagccaacgaacacgugauauuuauaucucuagaaggcgccggggcaccuucacguggacucucuccgacucagaagguaaggauacaccugggggauacugucuuacccgguggaugcugaucgaggcugaguugaaaugcuuuggcaacacugccguggcgaaguguaaugaaaaacaugacgaggaguucugcgauaugcuacgccuguuugacuucaacaagcaggcaauucagagacucaaagcccccgcucagaugagcauacaacugaucaauaaggccgucaacgcacuuauuaaugaucagcugaucaugaagaaccacuugagggacauaaugugcauuccauauugcaauuacaguaaauauugguaccucaaccacacagugaccgggaagacgucucugcccaaauguugguuaguguccaauggaagcuaccugaacgaaacccauuucucggacgauaucgagcagcaagcugacaauaugaucacagagaugcuacagaaggaauauauggagcggcaggguaaaacuccucucggccuggucgaucuuuuuguuuucucuaccuccuuuuacuugauuucaaucuuccugcaccucgugaagauuccaacacaucgccacauaguagggaaaaguugccccaagccucaucgacugaaccacaugggaaucuguagcugcggccuuuauaagcagccaggugugccggucagauggaaaagguga

SEQ ID NO: 5034 - RNA, 1476 nt, Artificial Sequence
  derived and/or modified protein sequence (opt3) from LASV(G2431-SLE-2012;Clade IV)__AIT17292__GPCstabilized
augggccagaucgugaccuucuuucaagaggucccccacguuauugaagaggugaugaacauaguacugaucgcccucagcauuauggcugugcuuaaggggcuguacaauaucgcaacaugcggauuggucgguuuagugacuuuccugcuacucuguggcagauccugcacgaccacacuguauaaagggguuuacgaacuucagacucuggaguugaacauggaaacccucaauaugacaaugccucugucuuguaccaagaacaauucacaucacuauauuauggugggaaacgagacuggccuggagcucacauuaaccaauacgaguaucauaaaccauaaauuuugcaaucugagcgacgcccacaagaaaaaccuuuacgaucaugcguugauguccaucauuucuacuuuccaccugucgaucccaaauuuuaaccaguaugaagcuaugucaugugacuucaauggugggaagauuagcguccaguacaaccuaagucacuccuaugccggagaugcagccaaucauugcggcaccguggcuaacggcguacuccaaacauuuaugaggauggcauggggagggucuuacaucgcccuggacagcgguugcggcgggugggauuguauaaugacuuccuaccaguaucuuauuauccagaacaccacaugggaggaccauugccaguucacccggccgucacccauuggauaccugggcuugcucagucaacgcacgcgagauaucuauaucagccguagacgccgggguacuuuuacauggacccugucugacuccgaagggaaugauacuccuggaggcuacugucucacaagguggaugcuuauugaggcugagcugaagugcuucggcaacaccgccguugcgaaauguaaugaaaagcacgacgaggaauuuugcgauauguugcggcuauucgacuuuaacaaacaggcaauacagcgccugagagcccccgcucagaugucaauccaacucauuaauaaggccgugaacgcacugaucaaugaucagcuuauaaugaaaaaccaccugagggacauuaugugcaucccauauugcaauuacagcaaguauugguacuugaaccauacgaccacaggacggaccagucucccccgcuguuggcuggucucuaaugguuccuacuuaaacgaaacucacuucagcgacgauaucgagcagcaagcugacaauaugauuacagagaugcugcagaaggaauauauggagcgacagggcaaaacuccucuagggcucguggaucuguucguguuuucgaccucuuucuaccuuaucuccauauuuuugcaucugauuaagaucccaacacacagacauauugucggaaaacccugcccuaagccacacaggcucaaccacaugggcguuuguucaugcggucuguauaaacagccgggggugcccguacgguggaagcguuga

SEQ ID NO: 5035 - RNA, 1476 nt, Artificial Sequence
  derived and/or modified protein sequence (opt3) from LASV(G2511-SLE-2012;Clade IV)__AIT17294__GPCstabilized
augggccagaucgugaccuucuuucaagaggucccccacguuauugaagaggugaugaacauaguacugaucgcccucagcauucuugcugugcugaagggguuguacaauuuagcaacaugcggacuggucggucuagugacuuuccuccugcuuuguggcagauccugcacgaccucucuguauaaagggguuuacgaauugcagacacucgagcugaacauggaaacucugaauaugaccaugccucucucauguacaaagaacaauagucaucacuauaucauggugggaaacgagaccggcuuagagcugacucuuacaaauaccagcauuaucgaccauaaauuuugcaacuuguccgaugcccacaagaaaaaucuguacgaccaugcgcuaaugucuauaaucucgacguuccaccucucaauuccaaacuuuaaucaguaugaagcuaugagcugugauuucaacggugggaagaucaguguccaguacaaucugucccacucuuaugccggagacgcagccaaccauugcggcacuguggcuaauggcguacuucaaaccuuuaugaggauggcauggggagggagcuacauugcccuggauuccgguugcggcgggugggacuguaucaugacaucauaccaguauuugauaauucagaacacuaccugggaggaucacugccaguucagucgcccgagccccguuggauaccucggccuguuaucucaacgaacacgugacaucuauauuuccagaaggcgccgggguaccuuuacguggacucuuucagauagcgaagggaaggacacaccuggaggcuacugucugacccgguggauguugaucgaggcugagcuaaaaugcuucggcaacacugccguggcgaaguguaaugaaaaacaugaugaggaauuuugcgacaugcugcgccucuucgauuuuaacaagcaggcaauccagagacugaaaacacccgcccagaugaguauucaacuuauaaauaaggcugucaacgcccugaucaaugaccaguugauuaugaagaaccaccucagggacaucaugugcauaccauauugcaauuacucuaaauauugguaccugaaccacaccacgaccggaaagacauccuuaccccgguguuggcuggugagcaaugguucguaccuaaacgaaacucauuucucugaugacauugagcagcaagcagauaauaugaucaccgagaugcuccagaaagaauauauggagcgccagggcaagacaccucuggggcuuguggacuuguucgucuuuuccacuucauucuaccugaucaguauuuuucuccaccugguuaaaaucccaacccaucgacacauugugggaaagcccugcccuaaaccacauagacuuaaccacaugggcauauguagcugcggucuguauaagcagccggggguacccgugaaguggaaaagguga

SEQ ID NO: 5036 - RNA, 1476 nt, Artificial Sequence
  derived and/or modified protein sequence (opt3) from LASV(G2554-SLE-2012;Clade IV)__AIT17298__GPCstabilized
augggccagaucgugaccuucuuucaagaggucccccacguuauugaagaggugaugaacauaguacugaucgcccucagcauucuugcugugcugaagggguuguacaauaucgcaacaugcggauuacugggucuagucuguuuccuccugcuuugcggcagauccuguacuacgucucuguauaaagggguguacgaauugcagacccucgagcugaacauggaaacacugaauaugacuaugccucucucaugcaccaagaacaauagucaucacuauauuaugguuggaaacgagacaggcuuagagcugacccuuacuaauacaagcaucauaaaccauaaauuuuguaauuuguccgacgcccacaagaaaaaccuguacgaucaugcgcuaaugucuaucauuucgaccuuccaccucucaaucccaaauuuuaaccaguaugaagcuaugagcugcgacuucaauggugggaagauuagugugcaguacaaccugucccacucuuaugccgucgaugcagccagccauuguggaacgaucgcuaauggcgugcuucaaacuuuuaugaggauggcauggggcggguccuacauagcccuggacucaggaugcgguggcugggauugcauuaugaccaguuaccaguauuugaucauucagaacacaacuugggaggaccauugucaguucagccggccgucucccaucggguaccucggacuguuaucccaacgcacccgagauaucuauauuucacguagacgccggggcacauuuaccuggacgcuuagcgacagugaagguaaggauacuccugggggauacugccugacaagguggauguugauagaggcugagcuaaaauguuucggcaacaccgccguagcgaagugcaaugaaaaacacgacgaggaauuuugcgauaugcugcgccucuucgacuuuaacaagcaggcaauccagcggcugaaagcccccgcucagaugucuauucaacuuaucaauaaggccguuaacgcacugauaaaugaucaguugauuaugaagaaccaccucagagacaucaugugcaucccauauuguaauuacuccaaauauugguaccugaaccauacuacaaccgggaagacgagcuuacccaaaugcuggcuggugucgaauggaucuuaccuaaacgaaacccacuucuccgacgauauugagcagcaagcugacaauaugaucacagagaugcuccagaaggaauauauggagaggcaggguaaaacuccucugggccuugucgauuuguucguguuuucaaccaguuucuaccugauuagcauauuucuccaucuggugaagaucccaacacaccggcaugucguugggaaacccuguccuaagccacaccgccuuaaccacaugggaauuugcuccuguggccuguauggucagccgggggugcccguaaaguggaaacgauga

SEQ ID NO: 5037 - RNA, 1476 nt, Artificial Sequence
  derived and/or modified protein sequence (opt3) from LASV(G2557-SLE-2012;Clade IV)__AIT17302__GPCstabilized
augggccagaucgugaccuucuuucaagaggucccccacguuauugaagaggugaugaacauaguacugaucgcccucagccuucuggcuguguugaagggguuauacaaugucgcaacaugcggacugauuggucuagugacuuuccuccugcuuuguggcagauccugcacgaccaaccuguauaaagggguuuacgaauugcagacacucgagcugaauauggaaacucugaacaugaccaugccucucucuuguacaaagaauaacucacaucacuauaucauggugggaaaugagaccggcuuagagcugacucuuacaaacaccaguauuaucagccauaaauuuugcaauuuguccgacgcccacaagaaaaaccuguacgaucauacgcuaaugucuauaaucucgacuuuccaccucucaauuccaaauuuuaaccaguaugaagcgaugagcugugacuucaauggugggaagaucaguguccaguacaaccugucccacucuuaugcuguggaugccgcaaaucauugcggaaccguagccaacggcguucuucaaacauuuaugaggauggcuuggggcgggagcuacauugcacuggacuccggaugcgguaacugggauuguaucaugacuucauaccaguauuugauaauucagaauaccacaugggaggaccacugccaguucagucgcccgagccccaucggcuaccucgggcuguuaucucaacgaacccgugauauuuauaucuccagaaggcgccggggaacguuuacuuggacacuuucagacagcgaaggcaacgauaccccugguggguacugucugacucgguggauguugaucgaggccgagcuaaagugcuucggaaauacagcuguggccaaauguaacgaaaagcaugacgaggaauuuugcgauaugcugcgccucuucgacuuuaauaaacaggcgauucagagacugaaggcacccgcccagaugaguauacaacuuaucaacaaagcugucaaugcccugauuaacgaucaguugaucaugaagaaucaccucagggacauaaugugcauuccauauugcaacuacucuaaguauugguaccugaaucacaccacgaccggcaaaacauccuuacccaaguguuggcuggugagcaacgggucguaccuaaaugaaacucauuucucugacgauaucgagcagcaagcagacaacaugaucaccgagaugcuccagaaagaauauauggagcggcagggaaagacaccucugggucuuguggauuuguucgucuuuuccacuucauucuaccugauuaguaucuuucuccaccugguuaaaauuccaacccaucgccacauagugggcaagcccugcccuaaaccacaucgacuuaaucacauggggaucuguagcugcggacuguauaagcagccgggcguacccgugagauggaagagguga

SEQ ID NO: 5038 - RNA, 1476 nt, Artificial Sequence
  derived and/or modified protein sequence (opt3) from LASV(G2587-SLE-2012;Clade IV)__AIT17310__GPCstabilized
augggccagaucgugaccuucuuucaagaggucccccacguuauugaagaggugaugaacauaguacugaucgcccucagcauucuugcugugcugaagggguuguacaauuuagcaacaugcggacuggucggucuagugacuuuccuccugcuuuguggcagauccugcacgaccucucuguauaaagggguuuacgaauugcagacacucgagcugaacauggaaacucugaauaugaccaugccucucucauguacaaagaacaauagucaucacuauaucauggugggaaacgagaccggcuuagagcugacucuuacaaauaccagcauuaucaaccauaaauuuugcaauuuguccgacgcccacaagaaaaaccuguacgaucaugcgcuaaugucuauaaucucgacguuccaccucucaauuccaaauuuuaaccaguaugaagcuaugagcugugacuucaauggugggaagaucaguguccaguacaaccugucccacucuuaugccggagaugcagccacucauugcggcaccguggcuaauggcguacuucaaacauuuaugaggauggcauggggagggagcuacauugcccuggacuccgguugcggcaagugggauuguaucaugacuucauaccaguauuugauaauucagaacaccacaugggaggaccacugccaguucagucgcccgagccccaucggguaccucggacuguuaucucaacgaacccgugauauuuauaucuccagaaggcgccggggcacguuuacuuggacacuuucagacagcgaagguaaagauaccccugggggauacugucugacucgguggauguugaucgaggcugagcuaaagugcuucggcaacacagccguugcgaaauguaaugaaaagcaugacgaggaauuuugcgauaugcugcgccucuucgacuuuaacaaacaggcaauucagagacugaagacccccgcccagaugaguauacaacuuaucaauaaggcugugaacgcccugauuaaugaucaguugaucaugaaaaaccaccucagggacauaaugugcauuccauauugcaauuacucuaaguauugguaccugaaccacacgaccacagggaaaacuuccuuaccccgguguuggcuggucagcaauggaucguaccuaaacgaaacccauuucucugacgauaucgagcagcaagcagacaauaugaucacagagaugcuccagaaggaauauauggagcgccaggguaaaacuccucugggccuuguggauuuguucguguuuuccaccucauucuaccugauuaguaucuuucuccaccuggucaagauuccaacacaucgacacauaguugggaaacccugcccuaagccacauagacuuaacuauaugggaaucuguagcugcggccuguacaagcagccgggugugcccguaaaauggaagagguga

SEQ ID NO: 5039 - RNA, 1476 nt, Artificial Sequence
  derived and/or modified protein sequence (opt3) from LASV(G2612-SLE-2012;Clade IV)__AIT17314__GPCstabilized
augggccagaucgugaccuucuuucaagaggucccccacguuauugaagaggugaugaacauaguacugaucacacucagcauucuugccgugcugaagggguuguacaaugucgcuacuugcggauuagugggucugguuacguuccuacuccuguguggcagauccugcaccacaucucuuuauaaagggguguacgaacugcagacuuuggagcucaacauggaaacccugaauaugacaaugccucugucauguaccaagaacaauagucaucacuauaucauggucggaaacgagacuggccucgaguuaacacugaccaauacgagcauuaucaaccauaaauuuugcaaucuuuccgacgcacacaagaaagauuuguacgaccaugcccugaugucuauaaucucgacuuuccaccuaucaauuccaaacuuuaaucaguaugaagcgaugagcugugauuucaacggugggaagaucagugugcaguacaaucucucccacucuuaugcuguagacgccgcaaaccauugcggaaccguugccaauggcgugcugcaaacauuuaugaggauggcuuggggcgggagcuacauugcacuugauuccggaugcgguggcugggacuguaucaugacuucauaccaguaucugauaauucagaacaccacaugggaggaucacugccaguucagucgcccgagccccaucggguacuugggacuccugucucaacgaacccgugacauuuauaucuccagaaggcgccggggcacguuuacuuggacacucucagauagcgaagguaacgacaccccugggggauacugucuuacucgguggaugcugaucgaggccgaguugaagugcuucggcaauacagcugucgccaaauguaacgaaaagcaugaugaggaauuuugcgacaugcuacgccuguucgauuuuaauaaacaggcgauucagagacucaaggcacccgcccagaugaguauacaacugaucaacaaagcugugaaugcccuuauuaacgaccagcugaucaugaagaaucacuugagggacauaaugugcauuccauauugcaacuacucuaaguauugguaccucaaucacaccacgaccgggaaaacaucccugcccaaguguugguuagugagcaacggaucguaccugaaugaaacucauuucucugaugacaucgagcagcaagcagauaacaugaucaccgagaugcuacagaaagaauauauggagcggcaggguaagacaccucucggccuggucgaccuuuucguguuuuccacuucauucuacuugauuaguaucuuucugcaccucguuaaaauuccaacccaucgccacauaguagggaagcccugcccuaaaccacaucgacugaaucacaugggaaucuguagcugcggccuuuauaagcagccgggugugcccgucaaguggaaaagauga

SEQ ID NO: 5040 - RNA, 1476 nt, Artificial Sequence
  derived and/or modified protein sequence (opt3) from LASV(G2615-SLE-2012;Clade IV)__AIT17318__GPCstabilized
augggccagaucgugaccuucuuucaagaggucccccacguuauugaagaggugaugaacauaguacugaucgcccucagccuucuggcuguguugaagggguuauacaaugucgcaacaugcggacugauuggucuagugacuuuccuccugcuuuguggcagauccugcacgaccaaccuguauaaagggguuuacgaauugcagacacucgagcugaauauggaaacucugaacaugaccaugccucucucuuguacaaagaauaacucacaucacuauaucauggugggaaaugagaccggcuuagagcugacucuuacaaacaccaguauuaucaaucauaaauuuugcaacuugagcgacgcccacaagaaaaaucuguacgaucaugcgcuaauguccauaaucucuacguuccaccucucgauuccaaacuuuaaucaguaugaagcuaugucaugugacuucaacggugggaagaucagcguccaguacaaucugagucacuccuaugccguggaugcagccaaccauugcggaacuguagcuaacggcguucuucaaaccuuuaugaggauggcauggggcgggucuuacauugcccuggacagcggaugcgguaauugggauuguaucaugacauccuaccaguauuugauaauucagaacaucacuugggaggaccacugccaguucucacgcccgagucccauuggcuaccucgggcuguuaagccaacgaacccgugauaucuauaucucuagaaggcgccggggaacauuuaccuggacgcuuuccgacucagaaggcaaugauacuccugguggguacugucugacacgguggauguugauugaggcugagcuaaagugcuucggaaacaccgccguggcgaaauguaaugaaaagcaugacgaggaauuuugcgauaugcugcgccucuucgacuuuaacaaacaggcaauacagagacugaaggcccccgcucagaugagcauccaacuuauuaauaaagccgucaacgcacugaucaaugaucaguugauaaugaagaaccaccucagggacauuaugugcaucccauauugcaauuacaguaaguauugguaccugaaccacacuacaaccggcaaaacgucuuuacccaaguguuggcugguguccaaugggagcuaccuaaacgaaacccauuucucggacgauaucgagcagcaagcugacaauaugauuacagagaugcuccagaaagaauauauggagcggcagggaaagacuccucugggucuuguggauuuguucgucuuuucuaccuccuucuaccugaucucaauuuuucuccaccugguuaaaauaccaacacaucgccacaucgugggcaagcccugcccuaaaccacaucgacuuaaccacauggggauuuguaguugcggacuguauaagcagccgggcguacccgugagauggaagagguga

SEQ ID NO: 5041 - RNA, 1476 nt, Artificial Sequence
  derived and/or modified protein sequence (opt3) from LASV(G2723-SLE-2012;Clade IV)__AIT17322__GPCstabilized
augggccagaucgugaccuucuuucaagaggucccccacguuauugaagaggugaugaacauaguacugaucgcccucagccuucuggcuguguugaagggguuauacaaugucgcaacaugcggacugauuggucuagugacuuuccuccugcuuuguggcagauccugcacgaccaaccuguauaaaggggccuacgaauugcagacacucgagcugaauauggaaacucugaacaugaccaugccucucucuuguacaaagaauaacucacaucacuauaucaugguuggaaaugagaccggcuuagagcugacucuuacaaacaccaguauuaucaaucauaaauuuugcaacuugagcgacgcgcacaagaaaaaucuguacgaucauacgcuaauguccauaaucucuacuuuccaccucucgauuccaaacuuuaaucaguaugaagcuaugucaugugacuucaacggugggaagaucagcgugcaguacaaucugagucacuccuaugccgucgaugcagccaaccauugcggaaccguggcuaacggcguacuucaaacauuuaugaggauggcauggggcgggucuuacauugcccuggacagcggaugcgguaauugggauuguaucaugacuuccuaccaguauuugauaauucagaacaccacaugggaggaccacugccaguucucacgcccgagucccaucggcuaccucgggcuguuaagccaacgaacccgugauauuuauaucucuagaaggcgccggggaacguuuacuuggacacuuuccgacucagaaggcaaugauaccccugguggguacugucugacucgguggauguugaucgaggcugagcuaaagugcuucggaaacacagccguugcgaaauguaaugaaaagcaugacgaggaauuuugcgauaugcugcgccucuucgacuuuaacaaacaggcaauucagagacugaaggcccccgcucagaugagcauacaacuuaucaauaaagccgugaacgcacugauuaaugaucaguugaucaugaagaaccaccucagggacauaaugugcauuccauauugcaauuacaguaaguauugguaccugaaccacaccacgaccggcaaaacaucuuuacccaaguguuggcuggucuccaaugggagcuaccuaaacgaaacucauuucucggacgauaucgagcagcaagcugacaauaugaucaccgagaugcuccagaaagaauauauggagcggcagggaaagacaccucugggucuuguggauuuguucguguuuucuacuuccuucuaccugauuucaaucuuucuccaccuggucaaaauuccaacccaucgccacauaguuggcaagcccugcccuaaaccacaucgacuuaaccacauggggaucuguaguugcggacuguauaagcagccgggcgugcccguaagauggaagagguga

SEQ ID NO: 5042 - RNA, 1476 nt, Artificial Sequence
  derived and/or modified protein sequence (opt3) from LASV(G2868-SLE-2012;Clade IV)__AIT17328__GPCstabilized
augggccagaucgugaccuucuuucaagaggucccccacguuauugaagaggugaugaacauaguacugaucacacucagcauucuugccgugcugaagggguuguacaauaucgcuacuugcggauuagucggucuggugacguuccuacuccuguguggcaaauccugcaccacaucucuuuauaaggggguuuacgaacugcagacuuuggagcucaacauggaaacccugaauaugacaaugccucugucauguaccaaaaacaauagucaucacuauauuagagugggaaacgagacuggccucgaguuaacacugaccaauacgagcaucauaaaccauaaguuuugcaaucuuuccgacgcacacaaaaagaacuuguacgaucaugcccugaugucuaucauuucgacuuuccaccuaucaaucccaaauuuuaaccaguaugaagcgaugagcugugacuucaauggugggaagauuaguguccaguacaaccucucccacucuuaugcuguggaugccgcaaaucauugcggaaccguagccaacggcguucugcaaacauuuaugaggauggcuuggggcgggagcuacaucgcacuugacuccggaugcgguaacugggauuguauaaugacuucauaccaguaucugauuauccagaauaccacaugggaggaccauugccaguucagucggccgagccccauuggcuacuuggggcuccugucucaacgcacccgagauaucuauaucucccguagacgccggggaacguuuacuuggacacucucagacagcgaaggcaacgaugccccugguggguacugucuuaccagguggaugcugauugaggcugaguugaaaugcuucggaaauacugccguggcgaaguguaacgaaaaacacgacgaggaauuuugcgauaugcuacggcuguucgacuuuaauaagcaggcaauacagcgccucaaagcccccgcucagaugaguauccaacugauuaacaaggccgucaaugcacuuaucaacgaucagcugauaaugaagaaucacuugagagacauuaugugcaucccauauugcaacuacucuaaauauugguaccucaaucauacaaccacgggcaagaccucccugcccaaauguugguuagugagcaacgggucguaccugaaugaaacacacuucucugacgauaucgagcagcaagcugacaacaugauuacugagaugcuacagaaggaauauauggagaggcagggaaaaaccccucucggucugguggaucuuuucgucuuuuccacaucauucuacuugaucaguauuuuucugcaucucguuaagauaccaacucaccggcaugugguaggcaaaagcugccccaagccucaccgccugaaucacauggggaucuguuccugcggacuuuauaagcagccaggcgugccggucaaauggaagcgauga

SEQ ID NO: 5043 - RNA, 1476 nt, Artificial Sequence
  derived and/or modified protein sequence (opt3) from LASV(G2903-SLE-2012;Clade IV)__AIT17332__GPCstabilized
augggccagaucgugaccuucuuucaagaggucccccacguuauugaagaggugaugaacauaguacugaucgcccucagcauucuugcugugcugaagggguuguacaauuuagcaacaugcggacuggucggucuagugacuuuccuccugcuuuguggcagauccugcacgaccucucuguauaaagggguuuacgaauugcagacacucgagcugaacauggaaacucugaauaugaccaugccucucucauguacaaagaacaauagucaucacuauaucagggugggaaacgagaccggcuuagagcugacucuuacaaauaccagcauuaucaaccauaaauuuugcaauuuguccgacgcccacaagaaaaaccuguacgaucaugcgcuaaugucuauaaucucgacguuccaccucucaauuccaaauuuuaaccaguaugaagcuaugagcugugacuucaauggugggaagaucaguguccaguacaaccugucccacucuuaugccguggaugcagccaaucauugcggaacuguagcuaacggcguucuucaaaccuuuaugcggauggcauggggcgggagcuacauugcccuggacuccggaugcggucgcugggauuguaucaugacaucauaccaguauuugauaauucagaacacuaccugggaggaccauugccucuucagucgaccgagccccaucggcuaccugggguuacugucucagcguacaagagauauuuauaucuccaggcggcgccggggaaccuuuacguggacucugucagacagcgaaggccgcgauacaccugguggguacuguuugaccagauggaugcuaaucgaggcugagcugaagugcuucggaaauacugccguggcgaaauguaacgaaaagcacgacgaggaauuuugcgauaugcucaggcuguucgacuuuaauaaacaagcaauucagcggcuuaaggcccccgcucagaugaguauacagcugaucaacaaagccgucaaugcauugauuaacgaucaacucaucaugaagaaucaucugcgcgacauaaugugcauuccauauugcaacuacucuaaguauugguacuuaaaucacacaaccacgggccgaaccucccugcccagauguuggcuagugagcaacgggucguaccucaaugaaacacacuucucugacgauaucgagcagcaggcugacaacaugaucacugagaugcugcaaaaagaauauauggagaggcagggaaagaccccucuugguuugguggaucuguucgucuuuuccacaucauucuaccucauuaguaucuuucugcaucuuguuaaaauuccaacucaccggcauauagugggcaagagcugccccaaaccucaccgucugaaucacauggggaucuguuccugcggauuguauaagcagccaggcguaccggugaaauggaagcgcuga

SEQ ID NO: 5044 - RNA, 1476 nt, Artificial Sequence
  derived and/or modified protein sequence (opt3) from LASV(G2944-SLE-2012;Clade IV)__AIT17340__GPCstabilized
augggccagaucgugaccuucuuucaagaggucccccacguuauugaagaggugaugaacauaguacugaucgcccucagcauucuugcugugcugaagggguuguacaauuucgcaacaugcggauuagucggucuggugacuuuucuacuccuguguggcagauccugcacgaccucucuuuauaaagggguuuacgaacugcagacauuggagcucaacauggaaacucugaauaugaccaugccucugucauguacaaagaacaauagucaucacuauaucauggugggaaacgagaccggccucgaguuaacucugacaaauauuagcaucauaaaccauaaauucugcaaucuuuccgacgcccacaagaaaaacuuguacgaucaugcgcugaugucuaucauuucgaccuuucaccuaucaaucccaaauuucaaccaguaugaagcuaugagcugugacuuuaauggugggaagauuaguguccaguacaaccucucccacucuuaugccggagaugcagccaaucauugcggcacgguggcuaacggcguacugcaaacuuucaugaggauggcauggggagggagcuacaucgcccuugacuccgguugcggcgagugggauuguauaaugaccucauaccaguaucugauuauccagaacacaacuugggaagaccacugccaguuuagucgcccgagccccauuggguacuugggacuccugucucaacgaacccgugauaucuauaucuccagaaggcgccggggcacauucaccuggacgcucucagacagcgaggguaaggauacuccugggggauacugucuuacacgguggaugcugauugaggcugaauugaaaugcuuuggcaauaccgccguugcgaaguguaacgagaaacaugacgaagaguucugcgauaugcuacgccuguuugacuucaauaagcaggcaauacagagacucaaagcccccgcucagaugaguauccaacugauuaacaaggccgugaaugcacuuaucaacgaucagcugauaaugaagaaucacuugagggacauuaugugcaucccauauugcaacuacucuaaauauugguaccucaaucacacuacaaccgggaagacgucccugcccaaauguugguuagucagcaacggaucguaccugaaugagacccauuucucugacgauaucgagcagcaagcugacaacaugauuacagaaaugcuacagaaggaguauauggaacggcaggguaaaacuccucucggccugguggaucuuuuuguguucuccaccucauuuuacuugaucaguauuuuccugcaccucgucaagauaccaacacaucgccacaucguugggaaacccugcccucgaccacauagacugaaucacaugggaauuuguagcugcggccuuuauaagcagccgggugugcccguaaaguggaaaagguga

SEQ ID NO: 5045 - RNA, 1476 nt, Artificial Sequence
  derived and/or modified protein sequence (opt3) from LASV(G3010-SLE-2013;Clade IV)__AIT17344__GPCstabilized
augggccagaucgugaccuucuuucaagaggucccccacguuauugaagaggugaugaacauaguacugaucgcccucagcauucuugcugugcugaagggguuguacaauuucgcaacaugcggauuagucggucuggugacuuuucuacuccuguguggcagauccugcacgaccucucuuuauaaagggguuuacgaacugcagacauuggagcucaacauggaaacucugaauaugaccaugccucugucauguacaaagaacaauagucaucacuauaucauggugggaaacgagaccggccucgaguuaacucugacaaauaccagcauuaucaaccauaaauucugcaaucuuuccgacgcccacaagaaaaacuuguacaaucaugcgcugaugucuauaaucucgacguuucaccuaucaauuccaaacuucaaucaguaugaagcuaugagcugugauuuuaacggugggaagaucaguguccaguacaaucucucccacucuuaugccggagacgcagccagccauugcggcacuguggcuaacggcguacugcaaaccuucaugaggauggcauggggaggguccuacauugcccuugauucagguugcggcaagugggacuguaucaugacaaguuaucaguaccugauaauucagaacacuaccugggaggaucacugccaguuuagccggccgucucccaucggguauuugggacuccugucccaacgcacacgagacauuuacaucucacguagacgccggggcaccuucacguggacucucagcgauagugaagguaaagacacaccugggggauauugucuuaccagguggaugcugaucgaggcugaguugaagugcuuuggcaauacugccguugcgaaauguaacgaaaagcaugaugaggaguucugcgacaugcuacggcuguuugauuucaauaaacaggcaauucagcgccucaagacacccgcccagaugucuauacaacugaucaacaaggcugugaaugcccuuauuaacgaccagcugaucaugaaaaaucacuugagagauauaaugugcauuccauacugcaacuauuccaaguacugguaccucaaucacaccacgaccgggaaaacaagccugcccaaguguugguuagucucgaacggaucuuaucugaaugaaacucauuucuccgacgacaucgagcagcaagcagauaacaugaucaccgagaugcuacagaaagaauacauggagaggcaggguaagacaccucucggccugguggaccuuuuuguguucucaaccaguuuuuauuugauuagcaucuuccugcaccucgucaaaauuccaacucaucggcacauaguugggaaguccugccccaagccucaucgccugaaucacaugggaaucuguucuugcggccuuuacaaacagccaggugugccgguacgauggaagagauga

SEQ ID NO: 5046 - RNA, 1476 nt, Artificial Sequence
  derived and/or modified protein sequence (opt3) from LASV(G3016-SLE-2013;Clade IV)__AIT17348__GPCstabilized
augggccagaucgugaccuucuuucaagaggucccccacguuauugaagaggugaugaacauaguacugaucgcccucagcauucuugcugugcugaagggguuguacaauaucgcaacaugcggauuaauuggucuggucacuuuccuacuccuguguggcagauccugcacgaccucucuuuauaaagggguguacgaacugcagacauuggagcucaacauggaaacucugaauaugaccaugccucugucauguacaaagaacaauagucaucacuauaucaugguuggaaacgagaccggccucgaguuaacucugacaaauaccagcauaaucaaccauaaauuuugcaaucuuuccgacgcccacaagaaaaacuuguacgaucaugcgcugaugucuauuaucucgacguuccaccuaucaauuccaaauuuuaaccaguaugaagcuaugagcugugacuucaauggugggaagaucagugugcaguacaaccucucccacucuuaugccggagaugcagccaaucauugcggcacugucgcuaacggcgugcugcaaaccuuuaugaggauggcauggggagggagcuacauagcccuugacuccgguugcggccgcugggauuguauuaugacaucauaccaguaucugaucauucagaacacuaccugggaggaccacugccaguucagucgaccgagccccaucggguacuugggacuccugucucaacguacaagagauaucuauauuuccaggcggcgccggggcaccuuuacguggacucucucagacagcgaagguaaugauacaccugggggauacugucuuacccgcuggaugcugauagaggcugaguugaagugcuucggcaacacugccguagcgaaauguaaugaaaagcaugacgaggaauuuugcgauaugcuaagacuguucgacuuuaacaaacaggcaauccagaggcucaaggcccccgcucagaugaguauucaacugaucaauaaagccguuaacgcacuuauaaaugaucagcugauuaugaagaaccacuugcgggacaucaugugcaucccauauugcaauuacucuaaguauugguaccucaaccacacaaccacggggaaaaccucccugcccaaguguugguuagugagcaauggaucguaccugaacgaaacacauuucucugacgauauugagcagcaagcugacaauaugaucacugagaugcuacagaaagaauauauggagcgccaggguaagaccccucucggccuggucgaucuuuucguguuuuccacaucauucuacuugauuaguauauuucugcaccucgugaaaaucccaacucaucgacacauugucgggaagcccugcccuaaaccacauagacugaaccacaugggaaucuguagcugcggccuuuauaagcagccggguguucccgugaaguggaaaagguga

SEQ ID NO: 5047 - RNA, 1476 nt, Artificial Sequence
  derived and/or modified protein sequence (opt3) from LASV(G3034-SLE-2013;Clade IV)__AIT17350__GPCstabilized
augggccagaucgugaccuucuuucaagaggucccccacguuauugaagaggugaugaacauaguacugaucgcccucagcauucuugcugugcugaagggguuguacaaugucgcaacaugcggauuaaucggucuggugacuuuccuacuccuguguggcagauccugcacgaccacacuuuauaaagggguuuacgaacugcaggccuuggagcucaacauggaaacucugaauaugaccaugccucugucuuguacaaagaacaauucacaucacuauauuauggugggaaacgagaccggccucgaguuaacucugacaaauaccaguaucauagaccauaaauuuugcaaccuuagcgaugcgcacaagaaaaauuuguacgaccaugcucugauguccaucauuucuacguuccaccuaucgaucccaaacuuuaaucaguaugaagccaugucaugugauuucaacggugggaagauuagcguccaguacaaucucagucacuccuaugcaggagacgccgcuaagcauugcggcacuguggcaaacggcguacugcaaaccuuuaugaggauggccuggggagggucuuacaucgcucuugauagcgguugcaauggcugggacuguguuaugacauccuaccaguaucugauaauucagaacacuaccugggaggaucacugccaguucucacgcccgagucccaucggguacuugggacuccugagccaacgaacacgugacauuuauaucucuagaaggcgccggggcaccuuuacguggacucucuccgauucagaagguaaagacacaccugggggauacugucuuacccgguggaugcugaucgaggccgaguugaagugcuucggcaacacugcgguggcaaaauguaaugaaaagcaugaugaggaauuuugcgacaugcuacgccuguucgauuuuaacaaacaggccauucagagacucaagacacccgcucagaugagcauacaacugaucaauaaggccgucaacgcacuuauuaaugaccagcugaucaugaaaaaccacuugagggacauaaugugcauuccauauugcaauuacaguaaguauugguaccucaaccacaccgugacggggaaaaccucucugccccgguguugguuaguguccaauggaagcuaccugaacgaaacacauuucucggaugacaucgagcagcaagcugauaauaugaucacugagaugcuacagaaggaauauauugagcgccaggguaaaaccccucucggccuggucgaccuuuucguguuuucuacauccuucuacuugaucucaauuuuucugcaccucguuaagauaccaacucaucgacacaucauugggaaacccugcccuaagccacauagacugaaccacaugggaaucuguaguugcggccuuuauaagcagccggguguacccgugagguggaaacgguga

SEQ ID NO: 5048 - RNA, 1476 nt, Artificial Sequence
  derived and/or modified protein sequence (opt3) from LASV(G3101-SLE-2013;Clade IV)__AIT17354__GPCstabilized
augggccagaucgugaccuucuuucaagaggucccccacguuauugaagaggugaugaacauaguacugaucgcccucagcauucuugcugugcugaagggguuguacaauuucgcaacaugcggauuagucggucuggugacuuuucuacuccuguguggcagauccugcacgaccucucuuuauaaagggguuuacgaacugcagacauuggagcucaacauggaaacucugaauaugaccaugccucugucauguacaaagaacaauagucaucacuauaucauggugggaaacgagaccggccucgaguuaacucugacaaauauuagcaucauaaaccauaaauucugcaaucuuuccgacgcccacaagaaaaacuuguacgaucaugcgcugaugucuaucauuucgaccuuucaccuaucaaucccaaauuucaaccaguaugaagcuaugagcugugacuuuaauggugggaagauuaguguccaguacaaccucucccacucuuaugccggagaugcagccaaucauugcggcacgguggcuaacggcguacugcaaacuuucaugaggauggcauggggagggagcuacaucgcccuugacuccgguugcggcgggugggauuguauaaugaccucauaccaguaucugauuauccagaacacaacuugggaggaccauugccaguuuagucggccgagccccauuggauacuugggccuccugucucaacgcacccgagauaucuauaucucccguagacgccgggguacauucaccuggacgcucucagacagcgaagggaaggauacuccuggaggcuacugucuuacaagguggaugcugauugaggcugaguugaaaugcuuuggcaauaccgccguugcgaaguguaacgaaaaacacgacgaggaguucugcgauaugcuacggcuguuugacuucaauaagcaggcaauacagcgccucaaagcccccgcucagaugaguauccaacugauuaacaaggccgugaaugcacuuaucaacgaucagcugauaaugaagaaucacuugagagacauuaugugcaucccauauugcaacuacucuaaauauugguaccucaaucauacuacaaccggaaagacgucccugcccaaauguugguuagucagcaacgguucguaccugaaugaaacccacuucucugacgauaucgagcagcaagcugacaacaugauuacagagaugcuacagaaggaauauauggagaggcagggcaaaacuccucucgggcugguggaucuuuuuguguucuccaccucauuuuacuugaucaguauuuuccugcaucucgucaagauaccaacacaccggcauaucguuggaaaacccugcccucgcccacaccgacugaaucacaugggcauuuguagcugcggucuuuauaagcagccgggggugcccguaaaguggaaaagauga

SEQ ID NO: 5049 - RNA, 1476 nt, Artificial Sequence
  derived and/or modified protein sequence (opt3) from LASV(G3110-SLE-2013;Clade IV)__AIT17360__GPCstabilized
augggccagaucgugaccuucuuucaagaggucccccacguuauugaagaggugaugaacauaguacugaucgcccucagcauucuugcugugcugaagggguuguacaauuucgcaacaugcggauuagucggucuggugacuuuucuacuccuguguggcagauccugcacgaccucucuuuauaaagggguuuacgaacugcagacauuggagcucaacauggaaacucugaauaugaccaugccucugucauguacaaagaacaauagucaucacuauaucagggugggaaacgagaccggccucgaguuaacucugacaaauaccagcauuaucaaccaucgguucugcaaucuuuccgacgcccacaaaaagaacuuguacgaucaugcgcugaugucuauaaucucgacguuucaccuaucaauuccaaauuucaaccaguaugaagcuaugagcugugacuuuaauggugggaaaaucaguguccaguacaaccucucccacucuuaugccggagaugcagccaaucauugcggcacuguggcuaacggcguacugcaaaccuucaugcgcauggcauggggagggagcuacauugcccuugacuccgguugcggcaagugggauuguaucaugacaucauaccaguaucugauaauucagaacacuaccugggacgaucauugccaguuuagucgaccgagccccaucggguacuugggacuccugucucaacguacaagagacauuuauaucuccaggcggcgccggggcaccuucacguggacucucucagauagcgaggguaaggacacaccugggggauacugucuuacccgcuggaugcugaucgaagcugaguugaaaugcuuuggcaauacugccguugcgaaguguaacgagaaacacgaugaagaguucugcgacaugcuaagacuguuugauuucaauaagcaggcaauuaggcggcucaaagcccccgcucagaugaguauacagcugaucaacaaggccgugaaugcacuuauuaacgaccaacugaucaugaagaaucacuugcgcgacauaaugugcauuccauauugcaacuacucuaaauauugguaccucaaucauacaaccacggggaagaccucccugccccgauguugguuagucagcaacggaucguaccugaaugagacacacuucucugaugacaucgaacagcaggcugauaacaugaucacugagaugcuacaaaaagaguauauggaaagacaggguaagaccccucucggccugguggaccuuuuuguguucuccacaucauuuuacuugauuaguaucuuccugcaucucgucaaaauuccaacucacaggcauauaguuggaaagagcugccccaaaccucaccggcugaaucacauggggaucuguuccugcggcuuuuauaagcagccaggugugccgguaaaguggaaacguuga

SEQ ID NO: 5050 - RNA, 1476 nt, Artificial Sequence
  derived and/or modified protein sequence (opt3) from LASV(G3148-SLE-2013;Clade IV)__AIT17364__GPCstabilized
augggccagaucgugaccuucuuucaagaggucccccacguuauugaagaggugaugaacauaguacugaucgcccucagcauucuugcugugcugaagggguuguacaauuucgcaacaugcggauuagucggucuggugacuuuucuacuccuguguggcagauccugcacgaccucucuuuauaaagggguuuacgaacugcagacauuggagcucaacauggaaacucugaauaugaccaugccucugucauguacaaagaacaauagucaucacuauaucauggugggaaacgagaccggccucgaguuaacucugacaaauaccagcauuaucaaccauaaauucugcaaucuuuccgacgcccacaagaaaaacuuguacgaucaugcgcugaugucuauaaucucgacguuucaccuaucaauuccaaauuucaaccaguaugaagcuaugagcugugacuuuaauggugggaagaucaguguccaguacaaccucucccacucuuaugccggagaugcagccaaucauugcggcacuguggcuaacggcguacugcaaaccuucaugaggauggcauggggagggagcuacauugcccuugacuccgguugcgaucgcugggacuguaucaugacaucauaccaguaucugauaauucagaacacuaccugggaggaucacugccaguuuagucgaccgagccccaucggcuacuuggggcuccugucucaacguacaagagacauuuauaucuccaggcggcgccggggaaccuucacguggacucucucagauagcgaaggcaaggacacaccugguggguacugucuuacccgcuggaugcugaucgaggcugaguugaaaugcuuuggaaauacugccguugcgaaguguaacgaaaaacaugaugaggaguucugcgacaugcuaagacuguuugauuucaauaagcaggcaauucagaggcucaaagcccccgcucagaugaguauacaacugaucaacaaggccgugaaugcacuuauuaacgaccagcugaucaugaagaaucacuugcgggacauaaugugcauuccauauugcaacuacucuaaauauugguaccucaaucacacaaccacgggcaagaccucccugcccaaauguugguuagucagcaacgggucguaccugaaugaaacacauuucucugaugacaucgagcagcaagcugauaacaugaucacugagaugcuacagaaggaauauauugagcgccagggaaaaaccccucucggucugguggaccuuuuuguguucuccacaucauuuuacuugaucaguauuuuccugcaccucgucaagauaccaacucaucgacacaucguuggcaaacccugcccuaagccacauagacugaaucacauggggauuuguagcugcggacuuuauaagcagccgggcguguccguaaaauggaagagguga

SEQ ID NO: 5051 - RNA, 1476 nt, Artificial Sequence
  derived and/or modified protein sequence (opt3) from LASV(G3151-SLE-2013;Clade IV)__AIT17368__GPCstabilized
augggccagaucgugaccuucuuucaagaggucccccacguuauugaagaggugaugaacauaguacugaucgcccucagcauucuugcugugcugaagggguuguacaauuucgcaacaugcggauuagucggucuggugacuuuucuacuccuguguggcagauccugcacgaccucucuuuauaaagggguuuacgaacugcagacauuggagcucaacauggaaacucugaauaugaccaugccucugucauguacaaagaacaauagucaucacuauaucauggugggaaacgagaccggccucgaguuaacucugacaaauaccagcauuaucaaccauaaauucugcaaucuuuccgacgcccacaagaaaaacuuguacgaucaugcgcugaugucuauaaucucgacguuucaccuaucaauuccaaauuucaaccaguuugaagcuaugagcugugacuucaauggugggaagaucaguguccaguauaaccucucccacucuuacgccggagaugcagccaaucauugcggcacuguggcuaacggcguacugcaaaccuuuaugaggauggcauggggagggagcuauauugcccuugacuccgguugcucaaagugggauuguaucaugacaaguuaccaguaccugauaauucagaacacuaccugggacgaucauugccaguucagccggccgucucccaucggcuauuuggggcuccugucccaacgcacacgagacauuuacaucucacguagacgccggggaaccuuuacguggacucucagcgauagugagggcaaagacacaccugguggguauugucuuaccagguggaugcugaucgaagcugaguugaagugcuucggaaauacugccguugcgaaauguaacgagaagcacgaugaagaguuuugcgacaugcuacggcuguucgauuucaauaaacaggcaauucagcgccucaaggcccccgcucagaugucuauacaacugaucaacaaggccgugaaugcacuuauuaacgaccagcugaucaugaaaaaucacuugagagacauaaugugcauuccauacugcaacuauuccaaguacugguaucucaaucauacaaccacgggcaaaaccagccugcccaaguguugguuagucucgaacgggucuuaccugaaugagacacacuuuuccgaugacaucgaacagcaagcugauaacaugaucacugagaugcuacagaaagaguacauggaaaggcagggaaagaccccucucggucugguggaccuuuucguguuuucaacaaguuucuauuugauuagcaucuuucugcaucucgucaaaauuccaacucaccggcauauaguuggcaaguccugccccaagccucaccgccugaauuacauggggaucuguucuugcggauucuauaaacagccaggcgugccgguaaaguggaaacgauga

SEQ ID NO: 5052 - RNA, 1476 nt, Artificial Sequence
  derived and/or modified protein sequence (opt3) from LASV(G3157-SLE-2013;Clade IV)__AIT17370__GPCstabilized
augggccagaucgugaccuucuuucaagaggucccccacguuauugaagaggugaugaacauaguacugaucgcccucagcauucuugcugugcugaagggguuguacaauuucgcaacaugcggauuagucggucuggugacuuuucuacuccuguguggcagauccugcacgaccucucuuuauaaagggguuuacgaacugcagacauuggagcucaacauggaaacucugaauaugaccaugccucugucauguacaaagaacaauagucaucacuauaucauggugggaaacgagaccggccucgaguuaacucugacaaauaccagcauuaucaaccauaaauucugcaaucuuuccgacgcccacaagaaaaacuuguacgaucaugcgcugaugucuauaaucucgacguuucaccuaucaauuccaaauuucaaccaguaugaagcuaugagcugugacuuuaauggugggaagaucaguguccaguacaaccucucccacucuuaugccggagaugcagccaaucauugcggcacuguggcuaacggcguacugcaaaccuucaugaggauggcauggggagggagcuacauugcccuugacuccgguugcgaucgcugggacuguaucaugacaucauaccaguaucugauaauucagaacacuaccugggaggaucacugccaguuuagucgaccgagccccaucggcuacuuggggcuccugucucaacguacaagagacauuuauaucuccaggcggcgccggggaaccuucacguggacucucucagauagcgaaggcaaggacacaccugguggguacugucuuacccgcuggaugcugaucgaggcugaguugaaaugcuuuggaaauacugccguugcgaaguguaacgaaaaacaugaugaggaguucugcgacaugcuaagacuguuugauuucaauaagcaggcaauucagaggcucaaagcccccgcucagaugaguauacaacugaucaacaaggccgugaaugcacuuauuaacgaccagcugaucaugaagaaucacuugcgggacauaaugugcauuccauauugcaacuacucuaaauauugguaccucaaucacacaaccacgggcaagaccucccugcccaaauguugguuagucagcaacgggucguaccugaaugaaacacauuucucugaugacaucgagcagcaagcugauaacaugaucacugagaugcuacagaaggaauauauggagcgccagggaaaaaccccucucggucugguggaccuuuuuguguucuccacaucauuuuacuugauuaguaucuuccugcaccucgucaagauuccaacucaucgacacauaguuggcaaacccugcccuaagccacauagacugaaucacauggggaucuguagcugcggacuuuauaagcagccgggcguguccguaaaauggaagagguga

SEQ ID NO: 5053 - RNA, 1476 nt, Artificial Sequence
  derived and/or modified protein sequence (opt3) from LASV(G3206-SLE-2013;Clade IV)__AIT17378__GPCstabilized
augggccagaucgugaccuucuuucaagaggucccccacguuauugaagaggugaugaacauaguacugaucgcccucagcauucuugcugugcugaagggguuguacaauuuagcaacaugcggacuggucggucuagugacuuuccuccugcuuuguggcagauccugcacgaccucucuguauaaagggguuuacgaauugcagacacucgagcugaacauggaaacucugaauaugaccaugccucucucauguacaaagaacaauagucaucacuauaucauggugggaaacgagaccggcuuagagcugacucuuacaaauaccagcauuaucaaccauaaauuuugcaauuuguccgacgcccacaagaaaaaccuguacgaucauacgcuaaugucuauaaucucgacuuuccaccucucaauuccaaauuuuaaccaguaugaagcgaugagcugugacuucaauggugggaagaucaguguccaguacaaccugucccacucuuaugcuguggaugccgcaaaucauugcggaaccguagccaacggcguucuucaaacauuuaugaggauggcuuggggcgggagcuacauugcacuggacuccggaugcucagguugggauuguaucaugacuucauaccaguauuuggugauacagaacaccacaugggaggaccacugccaguucagccgcccgucucccauuggcuaccucgggcuguuaucccaacgaacccgugauaucuauauuucaagaaggcgccggggaacguuuacuuggacacuuagcgacagugaaggcaagaauaccccugguggguacugucugacucgguggauguugaucgaggccgagcuaaaaugcuucggaaacacagcugucgccaaguguaaugaaaaacaugaugaggaauuuugcgacaugcugcgccucuucgauuuuaacaagcaggcgauccagagacugaaagcacccgcccagaugucuauucaacuuauaaauaaggcugugaacgcccugaucaaugaccaguugauuaugaagaaccaccucagggauaucaugugcauaccauauugcaauuacuccaaauauugguaccugaaccacaccacgaccggccggacuagcuuaccccgcuguuggcuggugucgaaugggucuuaccuaaacgaaacucauuucuccgacgacauugagcagcaagcagauaauaugaucaccgagaugcuccagaaggaauauauggagcgacagggaaaaacaccucugggucuugucgacuuguucguuuuuaguacaaguuucuaccugaucagcauuuuucuccaccuggugaagaucccaacccauagacacauuguaggcaaauccugccccaagccucauaggcuuaaccacauggggauauguucuugcggauucuauaaacagccaggcgugccggucaaguggaagcgguga

SEQ ID NO: 5054 - RNA, 1476 nt, Artificial Sequence
  derived and/or modified protein sequence (opt3) from LASV(G3234-SLE-2013;Clade IV)__AIT17388__GPCstabilized
augggccagaucgugaccuucuuucaagaggucccccacguuauugaagaggugaugaacauaguacugaucgcccucagcauucuugcugugcugaagggguuguacaaugucgcaacaugcggauuaaucggucuggugacuuuccuacuccuguguggcagauccugcacgaccacacuuuauaaagggguuuacgaacugcaggccuuggagcucaacauggaaacucugaauaugaccaugccucugucuuguacaaagaacaauucacaucacuauauuagggugggaaacgagaccggccucgaguuaacucugacaaauaccaguaucauaaaccauaaauuuugcaaucuuagcgacgcgcacaagaaaaacuuguacgaucaugcucugauguccaucauuucuacguuccaccuaucgaucccaaauuuuaaccaguaugaagccaugucaugugacuucaauggugggauuaucagcguccaguacaaccucagucacuccuaugcaggagaugccgcuaaucauugcggcacuguggcaaacggcguacugcaaaccuuuaugcggauggccuggggagggucuuacauagcucuugacagcgguugcaacggcugggauuguauuaugacauccuaccaguaucugaucauucagaauacuaccugggacgaucacugccaguucucacgaccgagucccaucggguacuugggacuccugagccaacguacaagagacaucuauauuucuaggcggcgccggggcaccuuuacguggacucucuccgauucagaggguaaggacacaccugggggauacugucuuacccgcuggaugcugauagaagccgaguugaagugcuucggcaacacugcgguugcaaaauguaaugagaagcaugaugaagaguuuugcgacaugcuaagacuguucgauuuuaacaaacaggccauccagaggcucaagacacccgcucagaugaauauucaacugaucaacaaagccgugaaugcacuuauaaacgaccagcugauuaugaagaaucacuugcgggacaucaugugcaucccauauugcaacuacagcaaguauugguaccucaauaacaccgcuacggggaaaaccagucugccccgcuguugguuagucucuaauggauccuaccugaacgagacacacuucagcgaugacauugaacagcaagccgauaauaugaucacugagaugcuacagaaggaguauauggaacgacaggguaaaaccccucucggccugguggaccuuuucguguuuucgacaucuuucuacuugauuuccauauuucugcaucucgucaagaucccaacucacagacauauuguugggaaacccugcccuaagccacacaggcugaaccauaucggaaucuguucaugcggccuuuauaaacagccgggugugcccguaaaguggaagcgguga

SEQ ID NO: 5055 - RNA, 1476 nt, Artificial Sequence
  derived and/or modified protein sequence (opt3) from LASV(G502-SLE-2009;Clade IV)__AIT17126__GPCstabilized
augggccagaucgugaccuucuuucaagaggucccccacguuauugaagaggugaugaacauaguacugaucgcccucagcauucuugcugugcugaagggguuguacaauuucgcaacaugcggauuagucggucugcuaacuuuucuccugcuuuguggcagauccugcacgaccgggcuguauaaaggaguguacgaauugcagacacucgagcugaacauggaaacucugaauaugaccaugccucucucuuguacaaagaacaauucacaucacuauaucaugguuggcaacgagaccgguuuagagcugacucuuacaaauaccaguauuaucaaccauaaauucugcaauuugagcgacgcccacaagaaaaaccuguacgaucaugcgcuaauguccauaaucucuacguuucaccucucgauuccaaauuucaaccaguaugaagcuaugucaugugacuuuaaugggggaaagaucagcgugcaguacaaccugagucacuccuaugccggcgaugcagccgaccauugcggcacugucgcuaauggggugcuucaaaccuucaugaggauggcauggggagguucuuacauugcccuggauagcggcugcgggcgcugggacuguaucaugacauccuaccaguauuugauaauucagaacacuaccugggaggaucacugccaguuuucacgaccgagucccaucggauaccucggccuguuaagccaacguacaagagacauuuauaucucuaggcggcgccgggguaccuucacguggacucuuuccgauucagaagggaaggacacaccuggaggcuacugucugacccgcuggauguugaucgaggcugagcuaaaaugcuuuggcaacacugccguagcgaaguguaaugaaaaacaugaugaggaguucugcgacaugcugagacucuuugauuucaacaagcaggcaauucagaggcugaaagcccccgcucagaugagcauacaacuuaucaauaaggccguuaacgcacugauuaaugaccaguuggugaugaagaaccaccuccgggacaucaugugcauaccauauugcaauuacagucgcuauugguaccugaaccacacaaccacgggacgaaccucuuuacccaaauguuggcuggucuccaaugguagcuaccuaaacgaaacacauuucucggaugacauugagcagcaagcugauaauaugaucacugagaugcuccagaaggaauauauggagagacagggcaaaaccccucuggggcuuguggacuuguuuguguucucuacauccuuuuaccugaucucaauuuuccuccaccuggucaagaucccaacucauaggcacauuguuggaaaaaguugccccaagccucaucggcuuaaccacaugggcauauguagcugcggucuguauaaacagccaggggugccgguaaaguggaagcguuga

SEQ ID NO: 5056 - RNA, 1476 nt, Artificial Sequence
  derived and/or modified protein sequence (opt3) from LASV(G503-SLE-2009;Clade IV)__AIT17130__GPCstabilized
augggccagaucgugaccuucuuucaagaggucccccacguuauugaagaggugaugaacauaguacugaucgcccucagcauucuugcugugcugaagggguuguacaauuucgcaacaugcggauuugucgguuuagugacuuuccugcuacucuguggcagauccugcacgaccucucuguauaaagggguuuacgaacuucagacacuggaguugaacauggaaacucucaauaugaccaugccucugucauguacaaagaacaauagucaucacuauaucagggugggaaacgacaccggccuggagcucacuuuaacaaauaccagcauuaucaaccauaaauuuugcaaucuguccgaugcccacaagaaaaaccuuuacgaccaugcguugaugucuauaaucucgacguuccaccugucaauuccaaauuuuaaccaguaugaggcuaugagcugugauuucaauggugggaagaucaguguccaguacaaccuaucccacucuuaugccguggacgcagccagccauugcggaacuauugcuaauggcguacuccaaaccuuuaugcggauggcauggggcggguccuacaucgcccuggauucaggaugcgaccgaugggauuguauaaugacaaguuaccaguaucuuauuauccagaacacuaccugggaagaccacugccaguucagccguccgucucccauugguuaccugggcuugcucucccaaagaacaagggauaucuauaucucacggcgccgccgggggaccuuuacguggacucugagcgacagugagggaaaggauacaccuggcgguuacugucucaccagauggaugcuuauugaagcugagcugaaaugcuucgggaacacugccguugcgaaguguaaugagaaacaugacgaagaguuuugcgauauguugaggcuauucgacuucaacaagcaggcaauacagcggcugaaagcccccgcucagaugucuauccaacucauuaauaaggccgugaacgcacugaucaaugaccagcuuauaaugaagaaccacuugcgcgauauuaugugcaucccauauugcaauuacuccaaauauugguacuugaaccacacaaccacgggcaagaccagccuccccaaauguuggcuggucucgaauggcucuuacuuaaacgagacacauuuuuccgacgauaucgaacagcaagcugacaauaugauuacugagaugcugcagaaggaguauauggaacgacaggggaaaaccccucuaggacucguggaucuguucguguuuucaacaaguuucuaccuuaucagcauuuuucugcaccuggucaagauaccaacucauagacacaucguugguaaauccugccccaagccucauaggcucaaccacaugggcauuuguucuugcgggcuguauaagcagccaggagugccgguaaaauggaagcgguga

SEQ ID NO: 5057 - RNA, 1476 nt, Artificial Sequence
  derived and/or modified protein sequence (opt3) from LASV(G610-SLE-2009;Clade IV)__AIT17134__GPCstabilized
augggccagaucgugaccuucuuucaagaggucccccacguuauugaagaggugaugaacauaguacugaucgcccucagcauucuugcugugcugaagggguuguacaauuucgcaacaugcggauuagucggucuggugacuuuucuacuccuguguggcagauccugcacgaccucucuuuauaaagggguuuacgaacugcagacauuggagcucaacauggaaacucugaauaugaccaugccucugucauguacaaagaacaauagucaucacuauaucauggugggaaacgagaccggccucgaguuaacucugacaaauaccagcauuaucaaccauaaauucugcaaucuuuccgacgcccacaagaaaaacuuguacgaucaugcgcugaugucuauaaucucgacguuucaccuaucaauuccaaauuucaaccaguaugaagcuaugagcugugacuuuaauggugggaagaucaguguccaguacaaccucucccacucuuaugccggagaugcagccaaucauugcggcacuguggcuaacggcguacugcaaaccuucaugaggauggcauggggagggagcuacauugcccuugacuccgguugcggccgcugggauuguaucaugacaucauaccaguaucugauaauucagaacacuaccugggaggaccacugccaguuuagucgaccgagccccaucggguacuugggacuccugucucaacguacaagagauauuuauaucuccaggcggcgccggggcaccuucacguggacucucucagacagcgaagguaaggauacaccugggggauacugucuuacccgcuggaugcugaucgaggcugaguugaaaugcuuuggcaauacugccguugcgaaguguaacgaaaaacaugacgaggaguucugcgauaugcuaagacuguuugacuucaauaagcaggcaauucagaggcucaaagcccccgcucagaugaguauacaacugaucaacaaggccgugaaugcacuuauuaacgaucagcugaucaugaagaaucacuugcgggacauaaugugcauuccauauugcaacuacucuaaauauugguaccucaaucacacaaccacggggaagaccucccugcccaaauguugguuagucagcaacggaucguaccugaaugaaacacauuucucugacgauaucgagcagcaagcugacaacaugaucacugagaugcuacagaaggaauauauggagcgccaggguaaaaccccucucggccugguggaucuuuuuguguucuccacaucauuuuacuugauuaguaucuuccugcaccucgucaagauuccaacucaucgacacauaguugggaaaagcugccccaagccucauagacugaaucacaugggaaucuguuccugcggccuuuauaagcagccaggugugccgguaaaauggaagagguga

SEQ ID NO: 5058 - RNA, 1476 nt, Artificial Sequence
  derived and/or modified protein sequence (opt3) from LASV(G636-SLE-2009;Clade IV)__AIT17138__GPCstabilized
augggccagaucgugaccuucuuucaagaggucccccacguuauugaagaggugaugaacauaguacugaucgcccucagcauucuugcugugcugaagggguuguacaauuuagcaacaugcggacuggucggucuagugacuuuccuccugcuuuguggcagauccugcacgaccucucuguauaaagggguuuacgaauugcagacacucgagcugaacauggaaacucugaauaugaccaugccucucucauguacaaagaacaauagucaucacuauaucauggugggaaacgagaccggcuuagagcugacucuuacaaauaccagcuugauuaaccauaaauuuugcaaucuguccgacgcccacaagaaaaaccuauacgaucaugcgcucaugucuaucauaucgacguuccaccugucaaucccaaauuuuaaccaguaugaagcuaugagcugugacuucaauggugggaagauuaguguccaguacaaccuuucccacucuuaugccguggaugcagccagccauugcggaacuguagcuaauggcguucugcaaaccuuuaugaggauggcauggggcggguccuacaucgccuuggacucaggaugcgguggcugggauuguauuaugacaaguuaccaguaucucaucauacagaacacuaccugggaggaccacugccaguucagccgcccgucucccauuggguaccugggauuacugucccaacgaacacgugauaucuauauuucaagaaggcgccggggcaccuuuacguggacucugagcgacagugaagguaaggauacaccugggggauacuguuugacccgguggaugcuaaucgaggcugagcugaaaugcuucggcaacacugccguggcgaaguguaaugaaaaacaugacgaggaauuuugcgauaugcuccgccuguucgacuuuaacaagcaggcaauccagagacuuaaagcccccgcucagaugucuauucaacugauaaauaaggccgucaacgcauugaucaaugaucagcucauuaugaagaaccaccugagggacaucaugugcauaccauauugcaauuacuccaaauauugguacuuaaaccacacaaccacggggcggaccagccugccccgcuguuggcuagugucgaauggaucuuaccucaacgaaacacauuucuccgacgauauugagcagcaagcugacaauaugaucacugagaugcugcagaaggaauauauggagcgacaggguaaaaccccucuuggcuugguggaucuguucgucuuuucaacaaguuucuaccucaucagcauuuuucugcaccuuguuaagaucccaacucauagacacauuguggggaaauccugccccaagccucauaggcugaaccacaugggaauauguucuugcggcuuguauaaacagccagguguaccggugaaguggaagcgguga

SEQ ID NO: 5059 - RNA, 1476 nt, Artificial Sequence
  derived and/or modified protein sequence (opt3) from LASV(G692-SLE-2009;Clade IV)__AIT17146__GPCstabilized
augggccagaucgugaccuucuuucaagaggucccccacguuauugaagaggugaugaacauaguacugaucgcccucagcauucuugcugugcugaagggguuguacaauuuagcaacaugcggacuggucggucuagugacuuuccuccugcuuuguggcagauccugcacgaccucucuguauaaagggguuuacgaauugcagacacucgagcugaacauggaaacucugaauaugaccaugccucucucauguacaaagaacaauagucaucacuauaucauggugggaaacgagaccggcuuagagcugacucuuacaaauaccagcauuaucaaccauaaauuuugcaauuuguccgacgcccacaagaaaaaccuguacgaucaugcgcuaaugucuauaaucucgacguuccaccucucaauuccaaauuuuaaccaguaugaagcuaugagcugugacuucaauggugggaagaucaguguccaguacaaccugucccacucuuaugccggagaugcagccaaucauugcggcacuguggcuaacggcguacuucaaaccuuuaugaggauggcauggggagggagcuacauugcccuggacuccgguugcggccgcugggauuguaucaugacaucauaccaguauuugauaauucagaacacuaccugggaggaccacugcaguuucagccgaccgucucccaucggguaccucggacuguuaucccagcguacaagagauauuuauaucucaaggcggcgccggggcaccuuuacguggacucuuagcgacagugaagguaaggauacaccugggggauacugucugacccgcuggauguugaucgaggcugagcuaaaaugcuucggcaauacugccguugcgaaguguaacgaaaaacaugacgaggaauuuugcgauaugcugagacucuucgacuuuaauaagcaagcaauucagaggcugaaagcccccgcucagaugucuauacagcuuaucaacaaggccgugaaugcacugauuaacgaucaauugaucaugaagaaucaccuccgggacauaaugugcauuccauauugcaacuacuccaaauauugguaccugaaucacacaaccacggggaagaccagcuuacccaaauguuggcuggucucgaacggaucuuaccuaaaugaaacacauuucuccgacgauaucgagcagcaggcugacaacaugaucacugagaugcuccaaaaggaauauauggagcgccaggguaaaaccccucugggccuuguggauuuguucguguuuucaacaaguuucuaccugauuagcaucuuucuccaccuggucaagauuccaacucaucgacacauaguugggaaauccugccccaagccucauagacuuaaucacaugggaaucuguucuugcggcuucuauaagcagccaggugugccgguaaaauggaagagguga

SEQ ID NO: 5060 - RNA, 1476 nt, Artificial Sequence
  derived and/or modified protein sequence (opt3) from LASV(G733-SLE-2010;Clade IV)__AIT17154__GPCstabilized
augggccagaucgugaccuucuuucaagaggucccccacguuauugaagaggugaugaacauaguacugaucgcccucagcauucuugcugugcugaagggguuguacaauuucgcaacaugcggaaucgucgguuuaguguccuuucugcuacucuguggcagaucuugcacuacgucacuguauaaagggguuuacgaacuucagacccuggaguugaacauggaaacacucaauaugacuaugccucugaguuguaccaagaacaauagccaucacuauauuauggugggaaacgagacaggccuggagcucaccuuaacuaauacauccaucauaaaccauaaauucugcaaucugucugacgcccacaagaaaaaccuuuacgaucaugcguugaugucgaucauuucaaccuuucaccugagcaucccaaauuucaaccaguaugaagcuaugaguugugacuuuaauggugggaagauuuccguccaguacaaccuaucucacagcuaugccggagaugcagccaaucauugcggcacgaucgcuaacggcgugcuccaaacuuucaugaggauggcauggggaggguccuacauagcccuggacucagguugcgaucgcugggacuguauuaugaccaguuaccaguaucuuaucauucagaacacaacuugggaggaucacugccaguuuagccgaccgucucccaucggcuaccugggguugcucucccaacguaccagagacaucuauauuucaaggcggcgccggggaacauucaccuggacgcugagcgauagugaaggcaaggacacuccugguggguacugucucacacgcuggaugcuuauagaggcugagcugaaaugcuuuggaaauaccgccguagcgaaguguaacgaaaaacaugaugaggaguucugcgacauguugagacuauuugauuucaauaagcaggcaauccagaggcugaaagcccccgcucagaugucuauucaacucaucaacaaggccguuaaugcacugauaaacgaccagcuuauuaugaagaaucaucugcgggacaucaugugcaucccauauugcaacuacuccaaauauugguacuugaaucacacuacaaccggcaagacgagccuccccaaauguuggcuggugucgaacgggucuuacuuaaaugaaacccacuucuccgaugacauugagcagcaagcugauaacaugaucacagagaugcugcagaaggaauauauggagcgccagggaaaaacuccucuaggucucgucgaccuguuuguguucucaaccaguuuuuaccuuauuagcauauucuugcaccuggugaagaucccaacacaucgacacgucguuggcaaauccugccccaagccucauagacucaaucacauggggauuuguucuugcggacuguauggccagccaggugugccgguaaaguggaaaagguga

SEQ ID NO: 5061 - RNA, 1476 nt, Artificial Sequence
  derived and/or modified protein sequence (opt3) from LASV(G771-SLE-2010;Clade IV)__AIT17158__GPCstabilized
augggccagaucgugaccuucuuucaagaggucccccacguuauugaagaggugaugaacauaguacugaucgcccucagcauucuugcugugcugaagggguuguacaauuucgcaacaugcggauuagucggucuggugacuuuucuacuccuguguggcagauccugcacgaccucucuuuauaaagggguuuacgaacugcagacauuggagcucaacauggaaacucugaauaugaccaugccucugucauguacaaagaacaauagucaucacuauaucauggugggaaacgagaccggccucgaguuaacucugacaaauaccagcauuaucaaccauaaauucugcaaucuuuccgacgcccacaagaaaaacuuguacgaucaugcgcugaugucuauaaucucgacguuucaccuaucaauuccaaauuucaaccaguaugaagcuaugagcugugacuuuaauggugggaagaucaguguccaguacaaccucucccacucuuaugccggagaugcagccaaucauugcggcacuguggcuaacggcguacugcaaaccuucaugaggauggcauggggagggagcuacauugcccuugacuccgguugcgaucgcugggacuguaucaugacaucauaccaguaucugauaauucagaacacuaccugggaggaucacugccaguuuagucgaccgagccccaucggcuacuuggggcuccugucucaacguacaagagacauuuauaucuccaggcggcgccggggaaccuucacguggacucucucagauagcgaaggcaaggacacaccugguggguacugucuuacccgcuggaugcugaucgaggcugaguugaaaugcuuuggaaauacugccguugcgaaguguaacgaaaaacaugaugaggaguucugcgacaugcuaagacuguuugauuucaauaagcaggcaauucagaggcucaaagcccccgcucagaugaguauacaacugaucaacaaggccgugaaugcacuuauuaacgaccagcugaucaugaagaaucacuugcgggacauaaugugcauuccauauugcaacuacucuaaauauugguaccucaaucacacaaccacgggcaagaccucccugcccaaauguugguuagucagcaacgggucguaccugaaugaaacacauuucucugaugacaucgagcagcaagcugauaacaugaucacugagaugcuacagaaggaauauauggagcgccagggaaaaaccccucucggucugguggaccuuuuuguguucuccacaucauuuuacuugauuaguaucuuccugcaccucgucaagauuccaacucaucgacacauaguuggcaaaagcugccccaagccucauagacugaaucacauggggaucuguuccugcggacuuuauaagcagccaggcgugccgguaaaauggaagagguga

SEQ ID NO: 5062 - RNA, 1476 nt, Artificial Sequence
  derived and/or modified protein sequence (opt3) from LASV(G808-SLE-2010;Clade IV)__AIT17164__GPCstabilized
augggccagaucgugaccuucuuucaagaggucccccacguuauugaagaggugaugaacauaguacugaucgcccucagcauucuugcugugcugaagggguuguacaauuucgcaacaugcggauuagucggucuggugacuuuucuacuccuguguggcagauccugcacgucuucacuuuauaaagggguuuacgaacugcagaccuuggagcucaacauggaaacacugaauaugacuaugccucugaguuguaccaagaacaauagccaucacuauaucagggugggaaacgagacaggccucgaguuaacccugacuaauacauccauuaucgaccauaaauucugcaaccuuucugaugcccacaagaaaaauuuguacgaccaugcgcugaugucgauaaucucaaccuuucaccuaagcauuccaaacuucaaucaguaugaagcuaugaguugugauuuuaacggugggaagaucuccguccaguacaaucucucucacagcuaugccggagacgcagccaagcauugcggcacgguggcuaacggcguacugcaaacuuucaugcggauggcauggggaggguccuacauugcccuugauucagguugcggcaauugggacuguaucaugaccaguuaccaguaucugauaauucagaacacaacuugggaggaucauugccaguuuagccgcccgucucccaucggguacuugggacuccugucccaacgaacccgugacauuuauaucucaagaaggcgccggggcacauucaccuggacgcucagcgauagugaagguaacgacgcuccugggggauacugucuuacucgguggaugcugauccaggccgaguugaaaugcuuuggcaauacagcgguugcaaaguguaacgagaaacacgaugaagaguucugcgacaugcuacgccuguuugauuucaauaagcaggccauucagagacucaaagcucccgcccaaaugucuauacagcugaucaacaaggcagugaaugcucuuauuaacgaccagcugaucaugaagaaucacuugagggacauaaugugcauuccauauugcaacuacuccaaauauugguaccucaaucauaccacuacagggcggaccagccugccccgcuguugguuagucucgaacggaucuuaccugaaugagacgcacuucuccgaugacaucgaacaacaggccgauaacaugaucaccgagaugcuacagaaggaguauauggaacgacaggguaaaacaccucucggccugguggaccuuuuuguguucucaaccaguuuuuacuugauuagcaucuuccugcaucucgucaagauuccaacucacagacauauaguugggaaauccugccccaagccucacaggcugaaucacaugggaaucuguucuugcggccuuuuuaaacaaccaggugugccgguaaaguggaagcgguga

SEQ ID NO: 5063 - RNA, 1476 nt, Artificial Sequence
  derived and/or modified protein sequence (opt3) from LASV(Guinea Faranah;Clade IV)__AMZ00381__GPCstabilized
augggccagaucgugaccuucuuucaagaggucccccacguuauugaagaggugaugaacauaguacugaucgcccucagcauucuugcugugcugaagggguuguacaaugucgcaacaugcggauuaaucggucugauugccuuccuacuccuguguggcagauccugcacuucuacgcuuuauaaagggguguacgaacugcaggcguuggagcucaacauggaaacccugaauaugacaaugccucugucauguacuaagaacaauagucaucacuauaucaugguuggaaacgagaccggccucgaguuaacacugaccaauacuagcauaaucaaccauaaauuuugcaaucuuuccgacgcucacaagaaaaacuuguacaaucaugcccugaugucuauuaucucgacauuccaccuaucaauuccaaacuuuaaucaguaugaagcaaugagcugugauuucaacggugggaagaucagugugcaguacaaucucucccacucuuaugccgucgacgcugcaaaccauugcggaaccguggccaacggcauacugcaaacguuuaugaggauggcuuggggcgggagcuacauugcccuugauuccggaugcgguggcugggacuguaucaugucaaguuaccaguaucugguaauucagaauacuaccugggaggaucauugccaguucagccggccgucucccaucggguacuugggacuccugucccaacgcacacgagacaucuauauuucacguagacgccggggcacuuuuaccuggacacucagcgauagugaagguaaggacaccccugggggauacugucuuacgagguggaugcugauagaggcggaguugaaaugcuucggcaacacugcaguugccaaguguaaugaaaaacacgaugaggaauuuugcgacaugcuacggcuguucgauuuuaacaagcaggcuauccagcgccucaaagcccccgcacagaugucuauucaacugaucaauaaggcugugaacgcccuuauaaaugaccagcugauuaugaagaaccacuugagagauaucaugugcaucccauauugcaauuacuccaaauauugguaccucaaccauacaauuaccgggaggacuagccugcccaaguguugguuagucucgaauggaucuuaccugaacgaaacacacuucuccgacgacaucgagcagcaagcggauaauaugauuaccgagaugcuacagaaagaauaucucgagcggcaggguaagacgccucugggccuuguggacuuguucguguuuucaaccaguuucuaccugauaagcaucuuucuccaucugauuaaaaucccaacacaccgccauaucgucgggaaguccugccccaaaccucaccgacuuaaccacaugggaguuuguucuugcggccuguauaagcagccaggugugccgguaagauggaagagguga

SEQ ID NO: 5064 - RNA, 1476 nt, Artificial Sequence
  derived and/or modified protein sequence (opt3) from LASV(GUINEA Z-185a;Clade IV)__AMZ00377__GPCstabilized
augggccagaucgugaccuucuuucaagaggucccccacguuauugaagaggugaugaacauaguacugaucgcccucagcauucuugcugugcugaagggguuguacaaugucgcaacaugcggauuaaucggucuggugacuuuccuauuucucuguggcagauccugcucuacgucacuguauaaagggguuuacgaacuucagacccuggaguugaacauggaaacacucaauaugacuaugccucugaguuguaccaagaacaauagccaucacuauauuauggugggaaacgagacaggccuggagcucaccuuaacuaauacauccaucauaaaccauaaauucugcaaucugucugacgcccacaagaaaaaccuuuacgaucauaccuugaugucgaucauuucaacguuucaccugagcaucccaaauuucaaccaguaugaagcgaugaguugugacuuuaauggugggaagauuuccguccaguacaaccuaucucacagcuaugcuguggaugccgcaaaucauugcggaacuguagccaacggcguucuccaaaccuucaugaggauggcuuggggcggguccuacaucgcacuggacucaggaugcgguaacugggauuguauaaugacaaguuaccaguaucuugugauucagaauacuaccugggaggaccacugccaguuuagccgcccgucucccaucggcuaccugggguugcucucccaacgaacacgugauauuuauaucucaagaaggcgccggggaaccuucacguggacucugagcgacagugaaggcaaggauacaccugguggguacugucucacccgguggaugcuuaucgaggccgagcugaaaugcuuuggaaacacugcugucgccaaguguaaugaaaaacaugacgaggaguucugcgauauguugcgccuauuugacuucaacaagcaggcgauucagagacugaaagcacccgcccagaugucuauacaacucaucaauaaggcugugaacgcccugauuaaugaucagcuuaucaugaagaaccaccugagggacauaaugugcauuccauauugcaauuacuccaaauauugguacuugaaccacacagugaccggcaagacgagccuccccaaauguuggcuggucucgaaugggucuuacuuaaacgaaacccauuucuccgacgauaucgagcagcaagcagacaaucugaucacagagaugcuacagaaggaauauauggagcggcagggaaaaacuccucucggucugguugaucuuuuuguguucucaaccaguuuuuacuugauuagcaucuuccugcaccucguaaagauuccaacacaucgccacauagugggcaaacccugcccuaagccacaucgacugaaccacauggggaucuguuccugcggagucuauaagcagccgggcgugcccguuagauggaaaagguga

SEQ ID NO: 5065 - RNA, 1476 nt, Artificial Sequence
  derived and/or modified protein sequence (opt3) from MOPV/LASV reassortant(IGS-1;Clade IV)__AFY05576__GPCstabilized
augggccagaucgugaccuucuuucaagaggucccccacguuauugaagaggugaugaacauaguacugaucgcccucagcgugcuugcuguccugaagggguuguacaauuucgcaacaugcggauuagugggucugguuacuuuucuacuccuguguggcagauccugcacgaccucucuuuauaaagggguguacgaacugcagacauuggagcucaacauggaaacucugaauaugaccaugccucugucauguacaaagaacaauagucaucacuauauuauggucggaaacgagaccggccucgaguuaacucugacaaauaccagcaucauuaaccauaaauucugcaaucuuuccgacgcccacaagaaaaacuuguacgaucaugcgcugaugucuaucauaucgacguuucaccuaucaaucccaaauuucaaccaguaugaagcuaugagcugugacuuuaauggugggaagauuagugugcaguacaaccucucccacucuuaugccggagaugcagccaaucauugcggcacuguagcuaacggcguucugcaaaccuucaugaggauggcauggggagggagcuacaucgcccuugacuccgguugcggcaacugggauuguauuaugacaucauaccaguaucugaucauacagaauacuaccugggaggaccacugccaguuuagucgcccgagccccauuggguacuugggacuccugucucaacgaacacgugauaucuauauuuccagaaggcgccggggcaccuucacguggacucucucagacagcgaaggugaggauacaccugggggauacugucuuacccgguggaugcugaucgaggcugaauugaagugcuuuggcaacacugccguggcgaaauguaaugagaagcaugacgaagaguucugcgauaugcuacgccuguuugacuucaacaaacaggcaauccagagacucaaggcccccgcucagaugaguauucaacugauaaauaaagccgucaacgcacuuaucaaugaucagcugauuaugaagaaccacuugagggacaucaugugcauaccauauugcaauuacucuaaguauugguaccucaaccacacaaccacggggcggaccucccugcccaaauguugguuagugagcaauggaucguaccugaacgagacacauuucucugacgauauugagcagcaagcugacaauaugaucacugaaaugcuacagaaggaguauauggaacgccaggguaaaaccccucucggccugguggaucuuuuugucuucuccacaucauuuuacuugaucaguauuuuccugcaccucguuaagaucccaacucaucgacacauuguggggaaaagcugccccaagccucauagacugaaccacaugggaauauguuccugcggccuuuauaaacagccagguguaccggugaaguggaagagguga

SEQ ID NO: 5066 - RNA, 1476 nt, Artificial Sequence
  derived and/or modified protein sequence (opt3) from MOPV/LASV reassortant(IGS-11;Clade IV)__AFY05588__GPCstabilized
augggccagaucgugaccuucuuucaagaggucccccacguuauugaagaggugaugaacauaguacugaucgcccucagcgugcuugcuguccugaagggguuguacaauuucgcaacaugcggauuagugggucugguuacuuuucuacuccuguguggcagauccugcacgaccucucuuuauaaagggguguacgaacugcagacauuggagcucaacauggaaacucugaauaugaccaugccucugucauguacaaagaacaauagucaucacuauauuauggucggaaacgagaccggccucgaguuaacucugacaaauaccagcaucauuaaccauaaauucugcaaucuuuccgacgcccacaagaaaaacuuguacgaucaugcgcugaugucuaucauaucgacguuucaccuaucaaucccaaauuucaaccaguaugaagcuaugagcugugacuuuaauggugggaagauuagugugcaguacaaccucucccacucuuaugccggagaugcagccaaucauugcggcacuguagcuaacggcguucugcaaaccuucaugaggauggcauggggagggagcuacaucgcccuugacuccgguugcggcaacugggauuguauuaugacaucauaccaguaucugaucauacagaauacuaccugggaggaccacugccaguuuagucgcccgagccccauuggguacuugggacuccugucucaacgaacacgugauuuauauaucuccagaaggcgccggggcaccuucacguggacucuuucagacagcgaaggugaggauacaccugggggauacugucugacccgguggauguugauugaggcugaacuaaagugcuuuggcaacacugccguggcgaaauguaaugagaagcaugacgaagaguucugcgauaugcugcgccucuuugacuucaacaaacaggcaauccagagacugaaggcccccgcucagaugaguauccaacuuauuaauaaagccgucaacgcacugauaaaugaucaguugaucaugaagaaccaccucagggacauuaugugcaucccauauugcaauuacucuaaguauugguaccugaaccacacaaccacggggcggaccuccuuacccaaauguuggcuggugagcaauggaucguaccuaaacgagacacauuucucugacgauauagagcagcaagcugacaauaugauuacugaaaugcuccagaaggaguauauggaacgccaggguaaaaccccucugggccuuguggauuuguuugucuucuccacaucauuuuaccugaucaguaucuuccuccaccugguuaagauuccaacucaucgacacaucguggggaaaagcugccccaagccucauagacuuaaccacaugggaauuuguuccugcggccuguauaaacagccagguguaccggugaaguggaagagguga

SEQ ID NO: 5067 - RNA, 1476 nt, Artificial Sequence
  derived and/or modified protein sequence (opt3) from MOPV/LASV reassortant(IGS-12;Clade IV)__AFY05590__GPCstabilized
augggccagaucgugaccuucuuucaagaggucccccacguuauugaagaggugaugaacauaguacugaucgcccucagcgugcuugcuguccugaagggguuguacaauuucgcaacaugcggauuagugggucugguuacuuuucuacuccuguguggcagauccugcacgaccucucuuuauaaagggguguacgaacugcagacauuggagcucaacauggaaacucugaauaugaccaugccucugucauguacaaagaacaauagucaucacuauauuauggucggaaacgagaccggccucgaguuaacucugacaaauaccagcaucauuaaccauaaauucugcaaucuuuccgacgcccacaagaaaaacuuguacgaucaugcgcugaugucuaucauaucgacguuucaccuaucaaucccaaauuucaaccaguaugaagcuaugagcugugacuuuaauggugggaagauuagugugcaguacaaccucucccacucuuaugccggagaugcagccaaucauugcggcacuguagcuaacggcguucugcaaaccuucaugaggauggcauggggagggagcuacaucgcccuugacuccgguugcggcaacugggauuguauuaugacaucauaccaguaucugaucauacagaauacuaccugggaggaccacugccaguuuagucgcccgagccccauuggguacuugggacuccugucucaacgaacacgugauauguauaucuccagaaggcgccggggcaccuucacguggacucucucagacagcgaaggugaggauacaccugggggauacugucuuacccgguggaugcugauugaggcugaauugaagugcuuuggcaacacugccguggcgaaauguaaugagaagcaugacgaagaguucugcgauaugcuacgccuguuugacuucaacaaacaggcaauccagagacucaaggcccccgcucagaugaguauccaacugauuaauaaagccgucaacgcacuuauaaaugaucagcugaucaugaagaaccacuugagggacauuaugugcaucccauauugcaauuacucuaaguauugguaccucaaccacacaaccacggggcggaccucccugcccaaauguugguuagugagcaauggaucguaccugaacgagacacauuucucugacgauauagagcagcaagcugacaauaugauuacugaaaugcuacagaaggaguauauggaacgccaggguaaaaccccucucggccugguggaucuuuuugucuucuccacaucauuuuacuugaucaguaucuuccugcaccucguuaagauuccaacucaucgacacaucguggggaaaagcugccccaagccucauagacugaaccacaugggaauuuguuccugcggccuuuauaaacagccagguguaccggugaaguggaagagguga

SEQ ID NO: 5068 - RNA, 1476 nt, Artificial Sequence
  derived and/or modified protein sequence (opt3) from LASV(LM032-SLE-2010;Clade IV)__AIT17802__GPCstabilized
augggccagaucgugaccuucuuucaagaggucccccacguuauugaagaggugaugaacauaguacugaucgcccucagcauucuugcugugcugaagggguuguacaauuuagcaacaugcggacuggucggucuagugacuuuccuccugcuuuguggcagauccugcacgaccucucuguauaaagggguuuacgaauugcagacacucgagcugaacauggaaacucugaauaugaccaugccucucucauguacaaagaacaauagucaucacuauaucauggugggaaacgagaccggcuuagagcugacucuuacaaauaccagcauuaucaaccauaaauuuugcaauuuguccgacgcccacaagaaaaaccuguacaaucaugcgcuaaugucuauaaucucgacguuccaccucucaauuccaaacuuuaaucaguaugaagcuaugagcugugauuucaacggugggaagaucaguguccaguacaaucugucccacucuuaugccggagacgcagccaaccauugcggcacuguggcuaacggcguacuucaaaccuuuaugaggauggcauggggagggagcuacauugcccuggauuccgguugcgaccgcugggauuguaucaugacaucauaccaguauuugauaauucagaauacuaccugggaggaccacugccaguucagucgaccgagccccaucggcuaccucgggcuguuaucucaacguacaagagauauuuauaucuccaggcggcgccggggaaccuuuacguggacucuuucagacagcgaaggcaaggauacaccugguggguacugucugacccgcuggauguugaucgaggcugagcuaaaaugcuucggaaacacugccguugcgaaguguaaugaaaaacaugacgaggaauuuugcgauaugcugagacucuucgacuuuaacaagcaggcaauucagaggcugaaagcccccgcucagaugaguauacaacuuaucaauaaggccgugaacgcacugauuaaugaucaguugaucaugaagaaccaccuccgggacauaaugugcauuccauauugcaauuacucuaaauauugguaccugaaccacacaaccacgggcaagaccuccuuacccaaauguuggcuggucagcaaugggucguaccuaaacgaaacacauuucucugacgauaucgagcagcaagcugacaauaugaucacugagaugcuccagaaggaauauauggagcgccugggaaaaaccccucuugguuugguggaucuguucguguuuuccacaucauucuaccucauuaguaucuuucugcaccuugucaagauuccaacucaucgacacauaguuggcagaagcugccccaaaccucauaggcugaaccacauggggaucuguuccugcggauuguauaagcagccaggcgugccgguaaaguggaaacgguga

SEQ ID NO: 5069 - RNA, 1476 nt, Artificial Sequence
  derived and/or modified protein sequence (opt3) from LASV(LM222-SLE-2010;Clade IV)__AIT17806__GPCstabilized
augggccagaucgugaccuucuuucaagaggucccccacguuauugaagaggugaugaacauaguacugaucgcccucagcauucuugcugugcugaagggguuguacaauuucgcaacaugcggauuaaucggucuggucacuuuucuacuccuguguggcagauccugcacgaccucucuuuauaaagggguguacgaacugcagacauuggagcucaacauggaaacucugaauaugaccaugccucugucauguacaaagaacaauagucaucacuauauuaugguuggaaacgagaccggccucgaguuaacucugacaaauaccagcaucauaaaccauaaauucugcaaucuuuccgacgcccacaagaaaaacuuguacgaucaugcgcugaugucuaucauuucgacguuucaccuaucaaucccaaauuucaaccaguaugaagcuaugagcugugacuuuaauggugggaagauuagugugcaguacaaccucucccacucuuaugccggagaugcagccaaucauugcggcacugucgcuaacggcgugcugcaaaccuucaugaggauggcauggggagggagcuacaucgcccuugacuccgguugcggcaagugggauuguauaaugacaucauaccaguaucugauuauccagaacacuaccugggaggaccacugccaguuuagucgcccgagccccauuggguacuugggacuccugucucaacgaacacgugauaucuauaucuccagaaggcgccggggcaccuucacguggacucucucagacagcgaagguaaagauacaccugggggauacugucuuacccgguggaugcugauugaggcugaguugaagugcuuuggcaauacugccguagcgaaauguaacgaaaagcaugacgaggaguucugcgauaugcuacgccuguuugacuucaauaaacaggcaauacagagacucaaggcccccgcucagaugaguauccaacugauuaacaaggccguuaaugcacuuaucaacgaucagcugauaaugaaaaaucacuugagggacauuaugugcaucccauauugcaacuacucuaaguauugguaccucaaucacacaaccacggggaaaaccucccugcccaaguguugguuagugagcaacggaucguaccugaaugaaacacauuucucugacgauaucgagcagcaagcugacaacaugauuacugagaugcuacagaaagaauauauggagcggcaggguaagaccccucucggccuggucgaucuuuuuguguucuccacaucauuuuacuugaucaguauuuuccugcaccucgugaaaauaccaacucaucgccacaucgucggaaagagcugccccaagccucaucgacugaaucacauggggauuuguuccugcggccuuuauaaacagccagguguuccggugaaguggaaaagauga

SEQ ID NO: 5070 - RNA, 1476 nt, Artificial Sequence
  derived and/or modified protein sequence (opt3) from LASV(LM395-SLE-2009;Clade IV)__AIT17810__GPCstabilized
augggccagaucgugaccuucuuucaagaggucccccacguuauugaagaggugaugaacauaguacugaucgcccucagcauucuugcugugcugaagggguuguacaauuuagcaacaugcggacuggucggucuagugacuuuccuccugcuuuguggcagauccugcacgaccucucuguauaaagggguuuacgaauugcagacacucgagcugaacauggaaacucugaauaugaccaugccucucucauguacaaaggacaacagucaucacuauaucagggugggaaaugagaccggcuuagagcugacucuuacaaacaccagcauuuugaaucauaaauuuugcaaccuguccgaugcccacaagaaaaaucuauacgaccaugcgcucaugucuaucauaucgacguuccaccugucaaucccaaacuuuaaucaguaugaagcuaugagcugugauuucaacggugggcggauuaguguccaguacaaucuuucccacucuuaugccggagacgcagccaaccauugcggcacuguggcuaauggcguacugcaaaccuuuaugcgcauggcauggggagggagcuacaucgccuuggauuccgguugcggccguugggacuguauuaugacaucauaccaguaucucaucauacagaacacuaccugggaggaucacugccaguucaguagaccgagccccauuggguaccugggauuacugucucaaaggacacgggacaucuauauuucccgcagacgccggggcaccuuuacguggacucugucagauagcgaagguaaggacacaccugggggauacuguuugaccagguggaugcuaaucgaggcugagcugaagugcuucggcaacacugccguugcgaaauguaaugaaaagcaugaugaggaauuuugcgacaugcuccggcuguucgauuuuaacaaacaggcaauccagcgccuuaaggcccccgcucagaugaguauucaacugauaaauaaagccgugaacgcauugaucaaugaccagcucauuaugaagaaccaucugcgagacaucaugugcauaccauauugcaauuacucuaaguauugguacuuaaaccacacaaccacggggaaaaccucccugcccagauguuggcuagucagcaauggaucguaccucaacgaaacacacuucucugaugacauugagcagcaagcugauaauaugaucacugagaugcugcagaaggaauauauggagaggcaggguaaaaccccucuuggcuugguggaccuguucguguuuuccacaucauucuaccucaucaguauuuuucugcaccuugucaagaucccaacucaucggcacguuguggggaaacccugcccuaagccacaucgucugaaccacaugggaauuuguagcugcggcuuguauaaacagccggguguacccgugaaguggaagcgcuga

SEQ ID NO: 5071 - RNA, 1476 nt, Artificial Sequence
  derived and/or modified protein sequence (opt3) from LASV(LM765-SLE-2012;Clade IV)__AIT17814__GPCstabilized
augggccagaucgugaccuucuuucaagaggucccccacguuauugaagaggugaugaacauaguacugaucgcccucagcauucuugcugugcugaagggguuguacaauuucgcaacaugcggauuagucggucuggugacuuuucuacuccuguguggcagauccugcacgaccucucuuuauaaagggguuuacgaacugcagacauuggagcucaacauggaaacucugaauaugaccaugccucugucauguacaaagaacaauagucaucacuauaucauggugggaaacgagaccggccucgaguuaacucugacaaauaccagcauuaucgaccauaaauucugcaaccuuuccgaugcccacaggaagaauuuguacgaccaugcgcugaugucuauaaucucgacguuucaccuaucaauuccaaacuucaaucaguaugaagcuaugagcugugauuuuaacggugggaaaaucaguguccaguacaaucucucccacucuuaugccaaggacgcagccgaucauugcggaacuguggcuaacggcguacugcaaaccuucaugcggauggcauggggcgggagcuacauugcccuugacuccggaugcggucgaugggauuguaucaugacaucauaccaguaucugauaauucagaauacuaccugggaggaccacugccaguuuagucguccgagccccaucggcuacuuggggcuccugucucaaagaacaagggauauuuauaucucccggcgccgccggggaaccuucacguggacucucucagacagcgaaggcaaggauacaccugguggguacugucuuaccagauggaugcugaucgaggcugaguugaaaugcuuuggaaacacugccguugcgaaguguaacgaaaaacaugacgaggaguucugcgauaugcuaaggcuguuugacuucaauaagcaggcaauucagcggcucaaagcccccgcucagaugaguauacaacugaucaacaaggccgugaaugcacuuauuaacgaccagcugaucaugaagaaucacuugcgcgauauaaugugcauuccauauugcaacuacucuaaauauugguaccucaaucacacaaccacgggcaagaccucccugcccaaauguugguuagucagcaacgggucguaccugaaugaaacacauuucucugacgauaucgagcagcaagcugacaacaugaucacugagaugcuacagaaggaauauauggagcgacagggaaaaaccccucucggucugguggaucuuuuuguguucuccacaucauuuuacuugauuaguaucuuccugcaccucgucaagauuccaacucauagacacauaguuggcaaacccugcccuaagccacauaggcugaaucacauggggaucuguagcugcggacuuuauaagcagccgggcgugcccguaaaauggaagcgguga

SEQ ID NO: 5072 - RNA, 1476 nt, Artificial Sequence
  derived and/or modified protein sequence (opt3) from LASV(LM774-SLE-2012;Clade IV)__AIT17820__GPCstabilized
augggccagaucgugaccuucuuucaagaggucccccacguuauugaagaggugaugaacauaguacugaucgcccucagcauucuugcugugcugaagggguuguacaauuucgcaacaugcggauuagucggucuggugacuuuucuacuccuguguggcagauccugcacgaccucucuuuauaaagggguuuacgaacugcagacauuggagcucaacauggaaacucugaauaugaccaugccucugucauguacaaagaacaauagucaucacuauaucauggugggaaacgagaccggccucgaguuaacucugacaaauaccagcauuaucaaccauaaauucugcaaucuuuccgacgcccacaagaaaaacuuguacgaucaugcgcugaugucuauaaucucgacguuucaccuaucaauuccaaauuucaaccaguaugaagcuaugagcugugacuuuaauggugggaagaucaguguccaguacaaccucucccacucuuaugccgaggaugcagccaaucauugcggaacuguggcuaacggcguacugcaaaccuucaugaggauggcauggggcgggagcuacauugcccuugacuccggaugcgguaacugggauuguaucaugacaucauaccaguaucugauaauucagaauacuaccugggaagaccacugccaguuuagucgcccgagccccaucggcuacuuggggcuccugucucaacgaacacgugauauuuauaucuccagaaggcgccggggaaccuucacguggacucucucagacagcgagggcaaggauacaccugguggguacugucuuacccgguggaugcugaucgaggcugaauugaaaugcuuuggaaacacugccguugcgaaguguaaugagaaacaugacgaagaguucugcgauaugcuacgccuguuugacuucaacaagcaggcaauucagagacucaaagcccccgcucagaugaguauacaacugaucaauaaggccgugaacgcacuuauuaaugaucagcugaucaugaagaaccacuugagggacauaaugugcauuccauauugcaauuacucuaaauauugguaccucaaccacacaaccacgggcaagaccucccugcccaaauguugguuagucagcaaugggucguaccugaacgagacacauuucucugacgauaucgagcagcaagcugacaauaugaucacugaaaugcuacagaaggaguauauggaacggcagggaaaaaccccucucggucugguggaucuuuuuguguucuccacaucauuuuacuugauuaguaucuuccugcaccucgucaagauuccaacucaucgccacauaguuggcaaaagcugccccaagccucaucgacugaaccacauggggaucuguuccugcggacuuuauaagcagccaggcgugccgguaaaauggaagagauga

SEQ ID NO: 5073 - RNA, 1476 nt, Artificial Sequence
  derived and/or modified protein sequence (opt3) from LASV(LM776-SLE-2012;Clade IV)__AIT17824__GPCstabilized
augggccagaucgugaccuucuuucaagaggucccccacguuauugaagaggugaugaacauaguacugaucgcccucagcauucuugcugugcugaagggguuguacaauuucgcaacaugcggauuagucggucuggugacuuuucuacuccuguguggcagauccugcacgaccucuguuuauaaagggguguacgaacuucagacacuggaguugaacauggaaacucucaauaugaccaugccucugucauguacaaagaacaauagucaucacuauaucauggucggaaacgagaccggccuggagcucacuuuaacaaauaccagcauuaucaaccauaaauucugcaaucuguccgacgcccacaagaaaaaccuuuacgaucaugcguugaugucuauaaucucgacguuucaccugucaauuccaaauuucaaccaguaugaagcuaugagcugugacuuuaauggugggaagaucagugugcaguacaaccuaucccacucuuaugccggagaugcagccaaucauugcggcacuguagcuaacggcguucuccaaaccuucaugaggauggcauggggagggagcuacauugcccuggacuccgguugcggcaagugggauuguaucaugacaucauaccaguaucuuauaauucagaacacuaccugggaggaccauugccaguuuagucggccgagccccaucggguaccugggauugcucucucaacgcacacgagauauuuauaucucccguagacgccggggcaccuucacguggacucugucagacagcgaagguaaagauacaccugggggauacugucucaccagguggaugcuuaucgaggcugagcugaagugcuuuggcaauacugccguggcgaaauguaacgaaaagcacgacgaggaguucugcgauauguugcggcuauuugacuucaauaaacaggcaauucagcgccugaaggcccccgcucagaugaguauacaacucaucaacaaggccgucaaugcacugauuaacgaucagcuuaucaugaaaaaucaccugagagacauaaugugcauuccauauugcaacuacucuaaguauugguacuugaaucauacaaccacggggaaaaccucccuccccaaguguuggcuggugagcaacggaucguacuuaaaugaaacacacuucucugacgauaucgagcagcaagcugacaacaugaucacugagaugcugcagaaagaauauauggagaggcaggguaagaccccucuaggccucguggaucuguuugucuucuccacaucauuuuaccuuauuaguaucuucuugcaucugguuaaaauuccaacucaccggcauauagugggaaagagcugccccaagccucaccgccucaaucacauggggaucuguuccugcggccuguauaaacagccagguguaccggugcgauggaagagauga

SEQ ID NO: 5074 - RNA, 1476 nt, Artificial Sequence
  derived and/or modified protein sequence (opt3) from LASV(LM778-SLE-2012;Clade IV)__AIT17828__GPCstabilized
augggccagaucgugaccuucuuucaagaggucccccacguuauugaagaggugaugaacauaguacugaucgcccucagcauucuugcugugcugaagggguuguacaauuucgcaacaugcggauuagucggucuggugacuuuucuacuccuguguggcagauccugcacgaccucucuuuauaaaggggacuacgaacugcagacauuggagcucaacauggaaacucugaauaugaccaugccucugucauguacaaagaacaauagucaucacuauaucaugguuggaaacgagaccggccucgaguuaacucugacaaauaccagcauuaucaaccauaaauucugcaaucuuuccgaugcccacaagaaaaacuuguacgaccaugcgcugaugucuauaaucucgacguuucaccuaucaauuccaaauuucaaccaguaugaagcuaugagcugugauuuuaauggugggaagaucagugugcaguacaaccucucccacucuuaugccggagacgcagccaaucauugcggcacugucgcuaacggcgugcugcaaaccuucaugaggauggcauggggagggagcuacauugcccuugauuccgguugcggcaacugggacuguaucaugacaucauaccaguaucugauaauucagaauacuaccugggaggaucacugccaguuuagucgcccgagccccaucggguacuugggacuccugucucaacgaacacgugacauuuauaucuccagaaggcgccggggcaccuucacguggacucucucagauagcgaagguaaggacacaccugggggauacugucuuacccgguggaugcugaucgaggcugaguugaaaugcuuuggcaacacugccguagcgaaguguaaugaaaaacaugaugaggaguucugcgacaugcuacgccuguuugauuucaacaagcaggcaauucagagacucaaagcccccgcucagaugaguauacaacugaucaauaaggccguuaacgcacuuauuaaugaccagcugaucaugaagaaccacuugagggacauaaugugcauuccauauugcaauuacucuaaauauugguaccucaaccacacaaccacggggaagaccucccugcccaaauguugguuagugagcaauggaucguaccugaacgaaacacauuucucugaugacaucgagcagcaagcugauaauaugaucacugagaugcuacagaaggaauauauggagcggcaggguaaaaccccucucggccuggucgaccuuuuuguguucuccacaucauuuuacuugauuaguaucuuccugcaccucgugaagauuccaacucaucgccacauagucgggaaaagcugccccaagccucaucgacugaaccacaugggaaucuguuccugcggccuuuauaagcagccagguguuccggugaaauggaagagauga

SEQ ID NO: 5075 - RNA, 1476 nt, Artificial Sequence
  derived and/or modified protein sequence (opt3) from LASV(Mad39;Clade IV)__ANH09722__GPCstabilized
augggccagaucgugaccuucuuucaagaggucccccacguuauugaagaggugaugaacauaguacugaucgcccucagcauucuugcugugcugaagggguuguacaaugucgcaacaugcggauuaaucggucuggugacuuuccuacuccuguguggcagauccugcacgaccacacuuuauaaagggguuuacgaacugcaggccuuggagcucaacauggaaacucugaauaugaccaugccucugucuuguacaaagaacaauucacaucacuauauuagggugggaaacgagaccggccucgaguuaacucugacaaauaccagucuuaucaaccauaaauuuugcaauuugagcgacgcgcacaagaaaaaccuguacgaucaugcucuaauguccauaaucucuacguuccaccucucgauuccaaauuuuaaccaguaugaagccaugucaugugacuucaaugaugguaagaucagcguccaguacaaccugagucacacuuaugcaggggacaccgccaaucauugcggaacaguggcuaacggcguacuucaaacuuuuaugcggauggcauggggcggguccuacauugcccuggauucuggaugcgguggcugggacuguaucaugaccagcuaccaguauuugauaauucagaacacaaccugggaggaucacugccaguucucccgaccgucacccaucggguaccucggacuguuaagucaacguacgagagacauuuauaucagcaggcggcgccggggcacuuuuacauggacccuuucugauuccgaagguaaggacacuccugggggauacugucugacacgcuggauguugaucgaggcugagcuaaaaugcuucggcaauaccgccguugcgaaguguaacgaaaaacaugaugaggaauuuugcgacaugcugagacucuucgauuuuaauaagcaggcaauucagaggcugaaagcccccgcucagaugucaauacaacuuaucaacaaggccgugaaugcacugauuaacgaccaguugaucaugaagaaucaccuccgggacauaaugugcauuccauauugcaacuacagcaaauauugguaccugaaucacacggucaccgggaagacaaguuuacccaaauguuggcuggugucuaacggauccuaccuaaaugaaacucauuucagcgaugacaucgagcagcaagcugauaacaugaucaccgagaugcuccagaaggaauauauggagcgccaggguaaaacaccucugggccuuguggacuuguucgucuuuucgacuucuuucuaccugauuuccaucuuucuccaccugguuaagauuccaacccaucgacacgugguagggaaacccugcccuaagccacauagacuuaaucacaugggaauauguucaugcggcuucuauaagcagccgggugugcccgucagguggaaacgguga

SEQ ID NO: 5076 - RNA, 1476 nt, Artificial Sequence
  derived and/or modified protein sequence (opt3) from LASV(Mad41;Clade IV)__ANH09724__GPCstabilized
augggccagaucgugaccuucuuucaagaggucccccacguuauugaagaggugaugaacauaguacugaucgcccucagcauucuugcugugcugaagggguuguacaaugucgcaacaugcggauuaaucggucuggugacuuuccuacuccuguguggcagauccugcacgaccacacuuuauaaagggguuuacgaacugcaggccuuggagcucaacauggaaacucugaauaugaccaugccucugucuuguacaaagaacgacucacaucacuauauuauggugggaaaugagaccggccucgaguuaacucugacaaacaccaguaucauaagccauaaauuuugcaaucuuuccgaugcgcacaagcagaacuuguacgaccaugcucugaugucuaucauuucgacguuccaccuaucaaucccaaauuuuaaccaguaugaagccaugagcugugauuucaauggugggaaaauuaguguccaauacaaccucucccacacuuaugcaggagacgccgcuaaucauugcggcaccguggcaaacggcguacugcagacauuuaugaggauggccuggggagggucuuacaucgcucuugauagcgguugcggcgggugggacuguauaaugacuuccuaccaguaucugauuauccagaauaccacaugggaggaucacugccaauucucacgcccgagucccauuggauacuugggccuccugagccagcgaacccgugacaucuauaucucuagaaggcgccgggguacguuuacuuggacacucuccgauucagaagggaaggacaccccuggaggcuacugucuuacucgguggaugcugauugaggccgaguugaagugcuucggcaacacagcgguugcaaaauguaacgaaaagcaugaugaggaauuuugcgacaugcuacgccuguucgauuuuaauaaacaggccauacagagacucaaggcucccgcccaaaugagcauccagcugauuaacaaagcagugaaugcucuuaucaacgaccagcugauaaugaagaaucacuugagggacauuaugugcaucccauauugcaacuacaguaaguauugguaccucaaucacaccgucacgggaaaaaccucucugcccaaguguugguuaguguccaacgguagcuaccugaaugaaacacauuucucggaugacaucgagcaacaggccgauaacaugauuacugagaugcuacagaaagaauauauggagcggcagggcaagaccccucucgggcugguggaccuuuucgucuuuucuacauccuucuacuugaucucaauuuuucugcaccucguuaaaauaccaacucaucgccacgugguaggaaagcccugcccuaaaccacaucgacugaaucacaugggcaucuguaguugcgguuucuaugggcaaccgggcgugcccgucagauggaagagguga

SEQ ID NO: 5077 - RNA, 1476 nt, Artificial Sequence
  derived and/or modified protein sequence (opt3) from LASV(Mad63;Clade IV)__ANH09728__GPCstabilized
augggccagaucgugaccuucuuucaagaggucccccacguuauugaagaggugaugaacauaguacugaucgcccucagcgugcuugcuguccugaagggguuguacaauguggcaacaugcggauuaauuggucugguuacuuuccuacuccuguguggcagauccugcacgaccacacuuuauaaagggguguacgaacugcaggccuuggagcucaacaugggaacucugaauaugaccaugccucugucuuguacaaagaacaauucacaucacuauaucauggucggcaacgaaaccggucucgaguuaacucugacaaauaccaguauuaucaaccauaaauuuugcaaucuuagcgacgcgcacaagaaagauuuguacgaccaugcucugauguccauaaucucuacguuccaccuaucggugccaaacuuuaaucaguaugaggccaugucaugugauuucaacgggggaaagauuagcguacaguacaaucucagucacgcauaugccggcgacacugcuaaccauugcggcaccguugcaaauggggugcugcaaacauuuaugaggauggccuggggagguuccuacaucgcucuugauucuggcugcgggggaugggacuguauuaugacuagcuaccaguaucugaucauacagaacaccacaugggaagaucacugccaguucucccggccgucacccauuggcuacuugggucuccugagucaacgaacccgugacaucuauauuagcagaaggcgccgggggacguuuacuuggacacucucugauuccgagggagaauacaccccuggcggcuauugucuuacucgguggaugcugaucgaggccgaguugaagugcuucgggaacacagcggucgcaaaauguaaugaaaagcaugacgaggaauuuugcgauaugcuacgccuguucgacuuuaacaaacaggccauccagagacucaaggcucccgcccagaugucaauucaacugauaaauaaagcagugaacgcucuuaucaaugaucagcugauuaugaagaaccacuugagggacaucaugugcauaccauacugcaauuauagcaaguacugguaccucaaccacaccgugacggguaaaaccagucugcccaaguguugguuagucucuaauggcuccuaucugaacgaaacacauuucagcgacgauauugagcagcaagccgacaauaugaucacugagaugcuacagaaagaauacauggagcggcaggggaagaccccucucggacugguugaucuuuucguguuuucgacaucuuucuauuugaucuccauuuuucugcaccucguaaaaaucccaacucaucgccacguggucggcaagcccugcccuaaaccacaucgacugaaccacauggguauuuguucaugcggguucuacaagcagccgggcgugcccguuagauggaagagguga

SEQ ID NO: 5078 - RNA, 1476 nt, Artificial Sequence
  derived and/or modified protein sequence (opt3) from LASV(Mad69;Clade IV)__ANH09730__GPCstabilized
augggccagaucgugaccuucuuucaagaggucccccacguuauugaagaggugaugaacauaguacugaucgcccucagcgugcuugcuguccugaagggguuguacaauguggcaacaugcggauuaauuggucugguuacuuuccuacuccuguguggcagauccugcacgaccacacuuuauaaagggguguacgaacugcaggccuuggagcucaacauggaaacucugaauaugaccaugccucugucuuguacaaagaacaauucacaucacuauaucauggucggaaacgagaccggccucgaguuaacucugacaaauaccaguauuaucaaccauaaauuuugcaaucuuagcgacgcgcacaagaaaaacuuguacgaucaugcucugauguccauaaucucuacguuccaccuaucgauuccaaauuuuaaccaguaugaagccaugucaugugacuucaaucaggguaagaucagcgugcaauacaaccucagucacgcauaugccggggaugcugcaaaucauugcggaacuguagccaacggcguucugcagaccuuuaugaggauggcuuggggcggguccuacauugcccuugacucuggaugcgguggcugggauuguaucaugacaagcuaccaguaucugauaauucagaacacuaccugggagaaucacugccaauucucccgcccgucacccaucggguacuugggacuccugagucagcgaacacgugacauuuauaucagcagaaggcgccggggcaccuuuacguggacucucucugauuccgaagguaaggggacaccuggaggcuacugucuuacccgguggaugcugaucgaggcggaguugaaaugcuucggcaacacugcaguggccaaguguaaugaaaaacaugacgaggaauuuugcgauaugcuacgccuguucgacuuuaacaagcaggcuauucagagauucaaagcccccgcacaaaugucaauacagcucaucaauaaggcugucaacgcccugauuaaugaucagcuuaucaugaagaaccaccugagggacauaaugugcauuccauauugcaauuacagcaaauauugguacuugaaccacacagugaccggaaagacgagucuccccaaauguuggcuggugucuaaugguuccuacuuaaacgaaacccauuucagcgaugacaucgagcaacaggcggacaauaugaucacagagaugcugcagaaggaauauauggagcggcagggccgcacuccucuagggcucgucgaucuguuuguuuucucgaccucuuuuuaccuuauuuccaucuucuugcaccuggugaaaauuccaacacaucgacacguagugggaaagcccugcccuaaaccacauagacucaaccacaugggcauauguucaugcgguuuuuauaagcaaccggggguccccgugagguggaagcgguga

SEQ ID NO: 5079 - RNA, 1476 nt, Artificial Sequence
  derived and/or modified protein sequence (opt3) from LASV(Mad83;Clade IV)__ANH09732__GPCstabilized
augggccagaucgugaccuucuuucaagaggucccccacguuauugaagaggugaugaacauaguacugaucgcccucagcauucuugcugugcugaagggggucuacaauguggcaacaugcggauugaucgguuuaguuacuuuccugcuacucuccggcagaucuuguacgaccacaauuuauaaagggguguacgaacugcaggcccuugagcugaacauggaaacuuugaauaugaccaugccucucucaugcacaaagaacaauagucaucacuauaucauggucggaaacgagaccggccuggagcugacucucacaaauaccagcauaaucaaccauaaauuuuguaauuuauccgacgcgcacaagaaaaaccuguacgaucaugcucuuaugucuauuaucucgacguuccacuugucaauuccaaauuuuaaccaguaugaagccaugagcugcgacuucaauggugggaagaucagugugcaguacaaccugucccacacuuaugcaggagaugccgcuaaucauuguggcaccguagcaaacggcguucuacaaacauuuaugaggauggccuggggagggucuuacauagcucucgacagcgguugcggcgggugggauugcauuaugacuuccuaccaguaucugaucauucagaacaccacaugggagaaucauugucaguucucacggccgagucccaucggauaccuuggccuguugagccaacgcacccgagacaucuauauuucucguagacgccgggguacguuuacuuggacauuauccgauucagaagggaaggacaccccuggaggcuacugccugacuagguggaugcucauagaggccgagcuuaaauguuucggcaacacagcgguggcaaagugcaaugaaaaacacgaugaggaauuuugugacaugcugcgguuguucgauuuuaacaagcaggccauccagcgccuaaaagcucccgcccagaugagcauucaacugaucaauaaggcagucaacgcucucauaaaugaccagcugauuaugaagaaccaccuuagagauaucaugugcaucccauauugcaauuacaguaaauauugguaccugaaccauaccgugacgggaaagaccucuuugcccaaaugcuggcucguguccaaugguagcuaccugaacgaaacacacuucucggacgacauugagcagcaagccgauaauaugaucacugagauguuacagaaggaauauauggagaggcagggcaaaaccccucuggggcuagucgaccucuucguguuuucuacauccuucuaccugauuucaauauuucuucauuugguuaagaucccaacucaccggcauauuguaggaaaacccuguccuaagccacaccgccugaaccacaugggcaucugcaguugugguuucuauaagcagccgggggugcccguccgauggaaaagauga

SEQ ID NO: 5080 - RNA, 1476 nt, Artificial Sequence
  derived and/or modified protein sequence (opt3) from LASV(NL;Clade IV)__AAO59512__GPCstabilized
augggccagaucgugaccuucuuucaagaggucccccacguuauugaagaggugaugaacauaguacugaucgcccucagcauucuugcugugcugaagggguuguacaauuucgcaacaugcggauuagucggucugguggccuuucuacuccuguguggcagauccugcacuucuucacuuuauaaagggguuuacgaacugcagacguuggagcucaacauggaaacccugaauaugacaaugccucugaguuguacuaagaacaauagccaucacuauaucagggugggaaacgagaccggccucgaguuaacacugaccaauacuuccauuaucaaccauaaauucugcaaucuuucugacgcgcacaagaaaaacuuguacgaucaugcucugaugucgauaaucucaacauuucaccuaagcauuccaaauuucaaccaguaugaagccaugaguugugacuuuaauggugggaagaucuccguccaguacaaccucucucacagcuaugcaguggaugccgcuaagcauugcggaaccguagcaaauggcguucugcaaacguucaugcggauggccuggggcggguccuacauugcucuugacucaggaugcggucgcugggauuguaucaugaccaguuaccaguaucugauaauucagaacacuacaugggaggaccauugccaguuuagccgaccgucucccaucggcuacuuggggcuccugucccaacguacuagagauauuuauaucucaaggcggcgccggggaaccuucacauggacccucagcgacagugaaggcaaagauacgccugguggguacugucuuacucgcuggaugcugaucgaggccgaguugaagugcuuuggaaacacagcgguggcaaaauguaaugaaaagcacgacgaggaguucugcgauaugcuaagacuguuugacuucaacaaacaggccauucagaggcucaagacccccgcucagaugucuauacaacugaucaauaaggccgucaacgcacuuauuaaugaucagcugaucaugaaaaaccacuugcgggacauaaugugcauuccauauugcaauuacucccgcuauugguaccucaaccauacuacaaccggcaagacgagccugcccaaauguugguuagugucgaaugggucuuaccugaacgaaacccgauucuccgacgauaucgagcagcaagcugacaauaugaucacagagaugcuacagaaggaauauauggagagacagggaaaaacuccucucggucugguggaucuuuuugucuucucaaccaguuuuuacuugauuagcaucuuccugcaccucguuaagauuccaacacauaggcacauagugggcaaauccugccccaagccucaucggcugaaccacauggggaucuguucuugcggacuuuauaagcagccaggcguaccggugaaauggaagcguuga

SEQ ID NO: 5081 - RNA, 1476 nt, Artificial Sequence
  derived and/or modified protein sequence (opt3) from LASV(Z0947-SLE-2011;Clade IV)__AIT17840__GPCstabilized
augggccagaucgugaccuucuuucaagaggucccccacguuauugaagaggugaugaacauaguacugaucgcccucagcauucuugcugugcugaagggguuguacaauuucgcaacaugcggauuagucggucuggugacuuuucuacuccuguguggcagauccugcacgaucucucuuuauaaagggguuuacgaacugcagaccuuggagcucaacauggaaacacugaauaugacuaugccucugucauguaccaagaacaauagucaucacuauauuauggugggaaacgagacaggccucgaguuaacccugacuaauacaagcaucauaaaccauaaauucugcaaucuuuccgacgcccacaagaaaaacuuguacgaucaugcgcugaugucuaucauuucgaccuuucaccuaucaaucccaaauuucaaccaguaugaagcuaugagcugugacuuuaauggugggaagauuaguguccaguacaaccucucccacucuuaugccggagaugcagccaaucauugcggcacgguggcuaacggcguacugcaaacuuucaugaggauggcauggggagggagcuacaucgcccuugacuccgguugcgaucgcugggacuguauaaugaccucauaccaguaucugauuauccagaacacaacuugggaggaucacugccaguuuagucgaccgagccccauuggcuacuuggggcuccugucucaacguaccagagacaucuauaucuccaggcggcgccggggaacauucaccuggacgcucucagauagcgaaggcaaggacacuccugguggguacugucuuacacgcuggaugcugauugaggcugaguugaaaugcuuuggaaauaccgccguugcgaaguguaacgaaaaacaugaugaggaguucugcgacaugcuaagacuguuugauuucaauaagcaggcaauacagaggcucaaagcccccgcucagaugaguauccaacugauuaacaaggccgugaaugcacuuaucaacgaccagcugauaaugaagaaucacuugcgggacauuaugugcaucccauauugcaacuacucuaaauauugguaccucaaucacacuacaaccggcaagacgucccugcccaaauguugguuagucagcaacgggucguaccugaaugaaacccauuucucugaugacaucgagcagcaagcugauaacaugauuacagagaugcuacagaaggaauauauggagcgccagggaaaaacuccucucggucugguggaccuuuuuguguucuccaccucauuuuacuugaucaguauuuuccugcaccucgucaagauaccaacacaucgacacaucguuggcaaacccugcccuaagccacauagacugaaucacauggggauuuguagcugcggacuuuauaagcagccgggcgugcccguaaaauggaagagguga

SEQ ID NO: 5082 - RNA, 1476 nt, Artificial Sequence
  derived and/or modified protein sequence (opt3) from LASV(Z0948-SLE-2011;Clade IV)__AIT17844__GPCstabilized
augggccagaucgugaccuucuuucaagaggucccccacguuauugaagaggugaugaacauaguacugaucgcccucagcauucuugcugugcugaagggguuguacaauuucgcaacaugcggauuagucggucuggugacuuuucuacuccuguguggcagauccugcacgaucucucuuuauaaagggguuuacgaacugcagaccuuggagcucaacauggaaacacugaauaugacuaugccucugucauguaccaagaacaauagucaucacuauauuauggugggaaacgagacaggccucgaguuaacccugacuaauacaagcaucauaaaccauaaauucugcaaucuuuccgacgcccacaagaaaaacuuguacgaucaugcgcugaugucuaucauuucgaccuuucaccuaucaaucccaaauuucaaccaguaugaagcuaugagcugugacuuuaauggugggaagauuaguguccaguacaaccucucccacucuuaugccggagaugcagccaaucauugcggcacgguggcuaacggcguacugcaaacuuucaugaggauggcauggggagggagcuacaucgcccuugacuccgguugcgaucgcugggacuguauaaugaccucauaccaguaucugauuauccagaacacaacuugggaggaucacugccaguuuagucgaccgagccccauuggcuacuuggggcuccugucucaacguaccagagacaucuauaucuccaggcggcgccggggaacauucaccuggacgcucucagauagcgaaggcaaggacacuccugguggguacugucuuacacgcuggaugcugauugaggcugaguugaaaugcuuuggaaauaccgccguugcgaaguguaacgaaaaacaugaugaggaguucugcgacaugcuaagacuguuugauuucaauaagcaggcaauacagaggcucaaagcccccgcucagaugaguauccaacugauuaaccgggccgugaaugcacuuaucaacgaccagcugauaaugaagaaucacuugcgcgacauuaugugcaucccauauugcaacuacucuaaguauugguaccucaaucacacuacaaccggcaaaacgucccugcccaaguguugguuagucagcaacgggucguaccugaaugaaacccauuucucugaugacaucgagcagcaagcugauaacaugauuacagagaugcuacagaaagaauauauggagcgacagggaaagacuccucucggucugguggaccuuuuuguguucuccaccucauuuuacuugaucaguauuuuccugcaccucgucaaaauaccaacacauagacacaucguuggcaagcccugcccuaaaccacauaggcugaaucacauggggauuuguagcugcggacuuuauaagcagccgggcgugcccguaaaguggaaacgguga

SEQ ID NO: 5083 - RNA, 1476 nt, Artificial Sequence
  derived and/or modified protein sequence (opt3) from LASV(Z148;Clade IV)__AAT49008__GPCstabilized
augggccagaucgugaccuucuuucaagaggucccccacguuauugaagaggugaugaacauaguacugaucgcccucagcauucuugcugugcugaagggguuguacaaugucgcaacaugcggauuaaucggucuggugacuuuccuauuucucuguggcagauccugcucuacgacccuguauaaagggguuuacgaacuucagacacuggaguugaacauggaaacucucaauaugaccaugccucugucauguacaaagaacaauagucaucacuauauuauggugggaaacgagaccggccuggagcucacuuuaacaaauaccagcaucauaaaccauaaauucugcaaucuguccgacgcccacaagaaaaaccuuuacgaucauacguugaugucuaucauuucgacuuuucaccugucaaucccaaauuucaaccaguaugaagcgaugagcugugacuuuaauggugggaagauuaguguccaguacaaccuaucccacucuuaugcuguggaugccgcaaaucauugcggaaccguagccaacggcguucuccaaacauucaugaggauggcuuggggcgggagcuacaucgcacuggacuccggaugcgguaacugggauuguauaaugacuucauaccaguaucuuauuauccagaauaccacaugggaggaccacugccaguuuagucgcccgagccccauuggcuaccugggguugcucucucaacgaacccgugauaucuauaucuccagaaggcgccggggaacguucacuuggacacugucagacagcgaaggcaaggauaccccugguggguacugucucacucgguggaugcuuauugaggccgagcugaaaugcuuuggaaacacagcuguggccaaguguaaugaaaaacaugacgaggaguucugcgauauguugcgccuauuugacuucaacaagcaggcgauacagagacugaaagcacccgcccagaugaguauccaacucauuaauaaggcugucaacgcccugaucaaugaucagcuuauaaugaagaaccaccugagggacauuaugugcaucccauauugcaauuacucucgguauugguacuugaaccacaccgugacgggcaaaaccucccuccccaaguguuggcuggugagcaaugggucguacuuaaacgaaacacauuucucugacgauaucgagcagcaagcagacaaucugauuacugagaugcuacagaaagaauauauggagcgccagggaaagaccccucucggucuggucgaucuuuuuguuuucuccacaucauuuuacuugaucaguauuuuccugcaccucgugaaaauaccaacucaucgacacaucguaggcaagcccugcccuaaaccacauagacugaaccacauggggauuuguagcugcggaguguauaagcagccgggcguccccgugagguggaagcgguga

SEQ ID NO: 5084 - RNA, 1476 nt, Artificial Sequence
  derived and/or modified protein sequence (opt3) from LASV(Bamba-R114;Clade V)__AHC95555__GPCstabilized
augggccagaucgugaccuucuuucaagaggucccccacguuauugaagaggugaugaacauaguacugaucgcccucagcauucuugcugugcugaagggguuguacaauaucgcaacaugcggauuaauuggucuggucacuuuccuacuccuguguggcagauccugcaguucaaaccuuuauaaagggguguacgaacugcagaguuuggaccucaauauggagacgcugaacaugaccaugccucugagcuguacaaagaauaacucccaucacuauaucagggccggaaaugaaacuggccucgaguuaacccugacaaacaccucucuuauaaaucauaaauuuugcaacuugucggaugcgcacaagaaaaaucuguacgaccauacucuaaugucaaucauuagcacauuccaccucaguaucccaaacuuuaaucaguaugaggcuauguccugugauuucaacggugggaagauuucuguucaguacaaucugagccacgccuaugcaaucgacgccgcugaacauugcggaaccguggcaaacggcguccuucaaacguuuaugcggauggccuggggcggguccuacauagcucuggauucaggaugcgguaacugggacuguauuaugacuucuuaccaguauuugaucauucagaauaccacaugggaggaucacugccaguucagccgaccgucucccaucggcuaccucgggcuguuaucccaacguacuagagacaucuauauuucaaggcggcgccggggaaccuuuacauggacccuuagcgauagugaaggcaacgccacgccugguggguacugucugacucgcuggauguugauagaggcggagcuaaagugcuucggaaauacagcaguggccaaauguaacgaaaagcaugacgaggaauuuugcgauaugcugagacucuucgacuuuaauaaacaggcuaucucuaggcugaagucccccgcccagaugagcauucagcuuaucaacaaagcaguaaaugcucugauaaacgaucaauugauuaugaagaaucaccuccgggacaucaugugcaucccauauugcaacuacucgaaguauugguaccugaaucacaccauuacuggccgcacaucuuuacccaaauguuggcugguuuccaacgggucauaccuaaaugaaacccauuucagugacgauaucgagcagcaggccgacaacaugauuacggagaugcuccaaaaggaauauauggagcgacagggaaaaaccccucugggucuuguggauuuguucgucuuuagcacauccuucuaccugauaucuaucuuucuccaccuggugaagauuccaacucauagacacaucgugggcaaacccugcccuaagccacauaggcuuaaucacauggggaucuguagcugcggacuguauaaacagccgggcguccccuugaaguggaagcgguga

SEQ ID NO: 5085 - RNA, 1476 nt, Artificial Sequence
  derived and/or modified protein sequence (opt3) from LASV(Komina-R16;Clade V)__AHC95557__GPCstabilized
augggccagaucgugaccuucuuucaagaggucccccacguuauugaagaggugaugaacauaguacugaucgcccucagcauucuugcugugcugaagggguuguacaauaucgcaacaugcggauuaauuggucuggucacuuucuuucuacucuguggcagauccuguucuucaaaccuguauaaagggguguacgaacuucagagucuggacuugaauauggagacgcucaacaugaccaugccucugagcugcacaaagaauaacucccaucacuauaucaggguuggaaaugaaacuggccuggagcucaccuuaacaaacaccucucugcuuaaucauaaauucugcaacuugucggaugcccacaagcggaaucuguacgaccaugcgcuaaugucaauaaucagcacuuuucaccucaguauuccaaacuucaaucaguaugaggcuauguccugugauuuuaacggugggaaaaucacagugcaguacaaucugucucacagcuaugccggagacaccgcaaagcauugcggcacgauugccaacggcguccuucaaacuuucaugcgcauggcuuggggaggguccuacaucgcacuggauucagguugcggcaacugggacuguauaaugaccaguuaccaguauuugauuauccagaauacaacuugggaagaucauugccaguuuagccgaccgucucccauuggguaccucggacuguuaucccaacguaccagagacaucuauaucucaaggcggcgccggggcacauucaccuggacgcuuagcgauagugaggguaacgccacuccugggggauacugucugacacgcuggauguugauugaagcugagcuaaagugcuuuggcaauaccgccguggcgaaauguaacgagaagcacgacgaagaguucugcgauaugcugagacucuuugacuucaauaaacaggcaauaucuaggcugcggucccccgcccagaugagcauccagcuuauuaacaaggcuguaaaugcccugaucaacgaucaauugauaaugaaaaaucaccuccgcgacauuaugugcaucccauauugcaacuacucgaaguauugguaccugaaucauacuguuacagggcgaaccucuuuacccaaguguuggcugguguccaacggaucauaccuaaaugagacgcacuucagugacgauaucgaacagcaggcagacaacaugauuaccgagaugcuccaaaaagaguauauggauagacaggguaagacaccucugggccuugucgacuuguuuguguucagcacuuccuuuuaccugaucucuauuuuccuccaucuggugaaaauaccaacccacaggcauaucgucgggaagcccugcccuaaaccacaccggcuuaaucguaugggaauuuguagcugcggccuguauaagcagccggguguucccgugaaauggaagcgcuga

SEQ ID NO: 5086 - RNA, 1476 nt, Artificial Sequence
  derived and/or modified protein sequence (opt3) from LASV(Ouoma-R123;Clade V)__AHC95559__GPCstabilized
augggccagaucauuaccuucuuucaagaggugccccacgucauagaagagguuaugaacaucgugcugauugcccucagcauccuugcuguacugaagggguuguacaauauugcaacaugcggauuaaucggucuggugacuuuccuacuccuguguggcagauccuguucuucaagucuuuauaaaggggucuacgaacugcagagcuuggaccucaacauggagacgcugaauaugaccaugccucuguccugcacaaagaacaauucucaucacuauauaagggugggaaacgaaacuggccucgaguuaacccugacaaauaccucgcuuaucaaccauaaauuuugcaauuugucagaugcccacaagaaaaaccuguacgaccaugcgcuaaugagcauuaucaguacuuuccaccucuccauuccaaauuuuaaccaguaugaggcuaugucuugugauuucaauggugggaagaucagcguucaguacaaccugucccacgccuaugcaauagacgccgcuucacauugcggaacaguggcaaauggcguccuucaaaccuuuaugcggauggccuggggcgggaguuacauugcucuggauagcggaugcgguaacugggacuguaucaugacgucuuaccaguauuugauuauccagaacacuaccugggaagaucauugccaguucucccgcccgucacccaucggcuaccucgggcuguuaagccaacgaacacgugacauuuauauaaguagaaggcgccggggaacuuuuaccuggacacuuucugauuccgagggcaaugccaccccugguggguacugucugacgcgguggauguugaucgaagcggagcuaaagugcuucggaaacacugcaguggccaaauguaaugagaagcacgacgaagaguuuugcgauaugcugcgccucuucgacuuuaacaaacaggcuauuagcagacugaagucgcccgcccagaugucuauccagcuuauaaauaaagcaguaaacgcucugauuaaugaucaauugaucaugaagaaccaccucagggacaucaugugcauuccauauugcaauuacuccaaguauugguaccugaaccauacaguuaccggcaaaacuucauuacccaaguguuggcuggugaguaaugggagcuaccuaaacgagacacacuucuccgacgauaucgaacagcaggccgacaauaugauuaccgagaugcuccaaaaagaguauauggaacggcagggaaagacgccucugggucuugucgauuuguucguguuuucuaccagcuucuaccugauaucaaucuuucuccaucuggugaaaauuccaacacaccgccauaucgucggcaagcccugcccuaaaccacaccgacuuaaccacauggggaucuguaguugcggacuguauaagcagccgggcguucccgugaaguggaaaagauga

SEQ ID NO: 5087 - RNA, 1476 nt, Artificial Sequence
  derived and/or modified protein sequence (opt3) from LASV(Soromba-R;Clade V)__AHC95553__GPCstabilized
augggccagaucgugaccuucuuucaagaggucccccacguuauugaagaggugaugaacauaguacugaucgcccucagcauucuugcugugcugaagggguuguacaauaucgcaacaugcggauuaauuggucuggucacuuucuuucuacucuguggcagauccugcaguucaaaccuguauaaagggguguacgaacuucagagucuggacuugaauauggagacgcucaacaugaccaugccucugagcuguacaaagaauaacucccaucacuauaucaggguuggaaaugaaacuggccuggagcucaccuuaacaaacaccucucugcuugaucauaaauucugcaauuugucggacgcccacaagaaaaaccuguacgaucaugcgcuaaugucaauaaucagcacuuuucaccucaguauuccaaauuucaaccaguaugaggcuauguccugugacuuuaauggugggaagaucacagugcaguacaaccugucucacagcuaugccggagaugcagcccggcauugcggcaccauugcuaauggcguccuucaaacguucaugcgcauggcauggggaggguccuacaucgcccuggacucagguugcggcaacugggauuguauaaugacuucuuaccaguauuugauuauccagaacaccacaugggaagaccauugccaguuuagccgaccgucucccauuggguaccucucccuguuaucacaacguacuagagauaucuauaucagcaggcggcgccggggaaccuucacauggacccuuagugacucugagggcaaugcuacgccugguggguacugucugacucgcuggauguugauugaagccgagcuaaagugcuuuggaaacacagcgguggcaaaauguaaugagaagcacgaugaagaguucugcgacaugcugagacucuuugauuucaacaaacaggccauauccaggcugcggagccccgcucagaugucgauccagcuuauuaauaaggccguaaacgcacugaucaaugaccaauugauaaugaaaaaccaccuccgcgacauuaugugcaucccauauugcaauuacucuaaguauugguaccugaaccauaccguuacuggccgaacauccuuacccaaguguuggcuggugucaaaugggaguuaccuaaacgagacccacuucagcgaugacaucgaacagcaggcugauaauaugauuacggagaugcuccaaaaagaguauauggacagacagggaaagaccccucugggucuugucgauuuguuuguguucuccacaucuuuuuaccugaucagcauuuuccuccaucuggugaaaauaccaacucacaggcauaucgucggcaagcccugcccuaaaccacaccggcuuaaccguauggggauuuguucaugcggacuguauaagcagccgggcguucccgugaaauggaagcgcuga

SEQ ID NO: 5088 - RNA, 1473 nt, Artificial Sequence; identical to SEQ ID NO: 4842
  derived and/or modified protein sequence (opt3) from LASV(Alzey;Clade VI)__SCA79105__GPCstabilized

SEQ ID NO: 5089 - RNA, 1473 nt, Artificial Sequence
  derived and/or modified protein sequence (opt3) from LASV(Lassa/H.sapiens-wt/TGO/2016/201600568;Clade VI)__AVN98153__GPCstabilized
augggccagaucauuaccuucuuucaagaggugccccacgucauagaagagguuaugaacaucgugcugauugcccucagccuucuggcuaucuugaaggggguauacaauguggcaacaugcggaauuaucgguuuagucacuuuccuguuucuauguggcagauccugcucucucauauauaaagggucauacgaacugcagacgcuugagcugaacauggaaaccuugaauaugacaaugccucucaguuguacuaagaacagcucccaucacuauaucagggugggaaaugagaccggccuggagcugacacucaccaacacuucuauuaucaaucauaaauucugcaacuuaucggacgcccacaagcggaaucuguacgaucaugcgcuuaugucaauuuugagcacauuucaccugaguaucccaaacuucaaucaguaugaagcuauguccugugacuuuaacggugggaaaauaucuguucaguacaaucuaagccacgccuaugcaguggaugccgcugagcauugcggaaccgucgcaaacggcgugcuccaaacguucaugcgcauggccuggggcggguccuacauugcucuggacucaggaugcgguaauugggauuguaucaugaccaguuaccaguaucuuauuauccagaacacuacaugggaagaccacugccaguuuagccguccgucucccaucggcuaccugggguugcucucccaaagaacuagggauauuuauauaucacggcgccgccggggaaccuucacauggacccugagcgacagugagggcaacgagacgccugguggguacugucucacuagauggaugcuuaucgaagccgagcugaagugcuuuggaaauacagcgguagcaaaguguaacgaaaaacaugaugaggaguucugcgacauguugaggcuauuugauuucaauaagcaggccauucagcggcugaaaucucccgcucagauguccauccaacucauaaacaaggccguuaaugcacugauuaacgaccagcuuaucaugaaaaaucaucugcgcgauaugaugugcaucccauauugcaacuacagcaaguauugguacuugaaucacaccucgucuggccgagcuucccuccccaaguguuggcuggugucaaacgggaguuacuuaaaugagacucacuucagcgacgacauugaacagcaagccgauaacaugaucacagagaugcugcagaaagaauauauugacagacagggaaagaccccucuaggucucgucgaucuguuuguguucuccacgucuuuuuaccuuauaagcaucuucuugcaccugauuaaaaucccaacccauaggcacaucgugggcaagcccugcccuaaaccacaucggcucaaucacauggggauuuguucaugcggacuguauaagcagccgggcguccccacacguuggaaacgcuga

SEQ ID NO: 5090 - RNA, 1473 nt, Artificial Sequence
  derived and/or modified protein sequence (opt3) from LASV(NIGERIA IKEJI;Clade II)__AMZ00373__GPCstabilized
augggccagaucauuaccuucuuucaagaggugccccacgucauagaagagguuaugaacaucgugcugauugcccucagccuucuggcuaucuugaaggggauuuacaauguagcaacaugcggauuauucggucugaucuccuuucuauuccucuguggcagaucuugcucaacuauguauaaagggguguacgaacugcagacgcuugagcuggacauggccaacuugaauaugaccaugccucucaguuguacaaagaacaauagccaucacuauauaauggucggaaacgaaacuggccuggagcugacccucacaaaucaguccaucauuaaccauaaauuuugcaauuuaucugaugcgcacaagaaaaaccuguacgaccauacccuuaugucgaucauuucaacuuuccacuugagcaucccaaauuuuaaccaguaugaggcuaugaguugugauuucaauggugggaagauauccgugcaauacaaccugucucacagcuaugccguugacgcagccaaucauugcggaacaguggcuaacggcguccuacagaccuuuaugaggauggcauggggcggguccuacauugcccucgauucaggaugcgguaacugggacuguaucaugacgaguuaccaguaucugauuauccagaauacuaccugggaagaucacugccaauucagccggccgucucccaucggcuaccuugggcuguugucccagcgcacacgagacauuuauauaucacguagacgccggggaacuuuuaccuggacauuaagcgauagugagggcaacgacgcuccugguggguacugucugaccagguggaugcucaucgaagccgagcuuaaaugcuucggaaauacggcgauugcaaaguguaacgagaaacaugaugaagaguuuugcgacaugcugcgguuguucgauuucaauaagcaggccaucaaacgccuaaaggcucccgcccagaugucuauacaacugauuaacaaggcagugaaugcucucaucaacgaccagcugaucaugaaaaaucaccuuagagacauuaugugcaucccauauugcaacuacuccaaguauugguaccugaauaacacuguaacaggcaaaagcucguugcccaaguguuggcucguuucuaauggguccuaccugaacgagacccacuuuucagaugacauugaacagcaagccgauaauaugauaacugagauguuacagaaagaguauauggacaggcagggaaagacaccucugggucuaguggaucucuucgucuuuaguaccagcuucuaccugaucuccauuuuucuucauuuggugaaaaucccaacgcaccggcauaucaccggcaagcccugcccuaagccacaccgccugaaccauauggggauuuguucuugcggacucuauaaacagccgggcgugcccgucaaguggaaacgauga

SEQ ID NO: 5091 - RNA, 1476 nt, Artificial Sequence
  derived and/or modified protein sequence (opt4) from LASV(Josiah;Clade IV)__NP_694870__GPCstabilized
augggccagaucgugaccuucuuccaggaggugccccacgugaucgaggaggugaugaacaucgugcugaucgcccugagcgugcuggccgugcugaagggccuguacaacuucgccaccugcggccuggugggccuggugaccuuccugcugcugugcggcagaagcugcaccaccagccuguacaagggcguguacgagcugcagacccuggagcugaacauggagacccugaacaugaccaugccccugagcugcaccaagaacaacagccaccacuacaucauggugggcaacgagaccggccuggagcugacccugaccaacaccagcaucaucaaccacaaguucugcaaccugagcgacgcccacaagaagaaccuguacgaccacgcccugaugagcaucaucagcaccuuccaccugagcauccccaacuucaaccaguacgaggccaugagcugcgacuucaacggcggcaagaucagcgugcaguacaaccugagccacagcuacgccggcgacgccgccaaccacugcggcaccguggccaacggcgugcugcagaccuucaugagaauggccuggggcggcagcuacaucgcccuggacagcggcugcggcaacugggacugcaucaugaccagcuaccaguaccugaucauccagaacaccaccugggaggaccacugccaguucagcagacccagccccaucggcuaccugggccugcugagccagagaaccagagacaucuacaucagcagaagacgccggggcaccuucaccuggacccugagcgacagcgagggcaaggacacccccggcggcuacugccugaccagauggaugcugaucgaggccgagcugaagugcuucggcaacaccgccguggccaagugcaacgagaagcacgacgaggaguucugcgacaugcugagacuguucgacuucaacaagcaggccauccagagacugaaggcccccgcccagaugagcauccagcugaucaacaaggccgugaacgcccugaucaacgaccagcugaucaugaagaaccaccugagagacaucaugugcauccccuacugcaacuacagcaaguacugguaccugaaccacaccaccaccggcagaaccagccugcccaagugcuggcuggugagcaacggcagcuaccugaacgagacccacuucagcgacgacaucgagcagcaggccgacaacaugaucaccgagaugcugcagaaggaguacauggagagacagggcaagaccccccugggccugguggaccuguucguguucagcaccagcuucuaccugaucagcaucuuccugcaccuggugaagauccccacccacagacacaucgugggcaagagcugccccaagccccacagacugaaccacaugggcaucugcagcugcggccuguacaagcagcccggcgugcccgugaaguggaagagauga

SEQ ID NO: 5092 - RNA, 1473 nt, Artificial Sequence
  derived and/or modified protein sequence (opt4) from LASV(LP;Clade I)__AAF86701__GPCstabilized
augggccagaucaucaccuucuuccaggaggugccccacgugaucgaggaggugaugaacaucgugcugaucgcccugagccugcuggccauccugaagggccuguacaacaucgccaccugcggcaucaucggccugguggccuuccuguuccugugcggcaagagcugcagccugacccugaagggcggcuacgagcugcagacccuggagcugaacauggagacccugaacaugaccaugccccugagcugcaccaagaacagcagccaccacuacaucagagugggcaacgagaccggccuggagcugacccugaccaacaccagcaucaucaaccacaaguucugcaaccugagcgacgcccacaagaagaaccuguacgaccacgcccugaugagcaucaucagcaccuuccaccugagcauccccaacuucaaccaguacgaggccaugagcugcgacuucaacggcggcaagaucagcgugcaguacaaccugagccacagcuacgccggcgacgccgccgagcacugcggcaccguggccaacggcgugcugcagaccuucaugagaauggccuggggcggcagauacaucgcccuggacagcggcugcggcaacugggacugcaucaugaccagcuaccaguaccugaucauccagaacaccaccugggaggaccacugccaguucagcagacccagccccaucggcuaccugggccugcugagccagagaaccagagacaucuacaucagcagaagacgccggggcaccuucaccuggacccugagcgacagcgagggcaacgagacccccggcggcuacugccugaccagauggaugcugaucgaggccgagcugaagugcuucggcaacaccgccguggccaagugcaacgagaagcacgacgaggaguucugcgacaugcugagacuguucgacuucaacaagcaggccaucagaagacugaaggcccccgcccagaugagcauccagcugaucaacaaggccgugaacgcccugaucaacgaccagcugaucaugaagaaccaccugagagacaucaugugcauccccuacugcaacuacagcaaguacugguaccugaaccacaccagcagcggcagaaccagccugcccaagugcuggcugaucagcaacggcagcuaccugaacgagacccaguucagcgacgacaucgagcagcaggccgacaacaugaucaccgagaugcugcagaaggaguacaucgagagacagggcaagaccccccugggccugguggacaucuucaucuucagcaccagcuucuaccugaucagcaucuuccugcaccugaucaagauccccacccacagacacaucgugggcaagcccugccccaagccccacagacugaaccacaugggcgugugcagcugcggccuguacaagcaccccggcgugcccaccaaguggaagagauga

SEQ ID NO: 5093 - RNA, 1473 nt, Artificial Sequence
  derived and/or modified protein sequence (opt4) from LASV(803213;Clade II)__AAF86703__GPCstabilized
augggccagaucaucaccuucuuccaggaggugccccacgugaucgaggaggugaugaacaucgugcugaucgcccugagccugcuggccauccugaagggcaucuacaacguggccaccugcggccuguucggccugaucagcuuccugcugcugugcggcagaagcugcagcgugaccuacaagggcguguacgagcugcagacccuggagcugaacauggccaaccugaacaugaccaugccccugagcugcaccaagaacaacagccaccacuacaucauggugggcaacgagaccggccuggagcugacccugaccaacaccagcaucaucaaccacaaguucugcaaccugagcgacgcccacaagaagaaccuguacgaccacgcccugaugagcaucaucagcaccuuccaccugagcauccccaacuucaaccaguacgaggccaugagcugcgacuucaacggcggcaagaucagcgugcaguacaaccugagccacagcuucgccguggacgccgccaaccacugcggcaccaucgccaacggcgugcugcagaccuucaugagaauggccuggggcggcagcuacaucgcccuggacagcggcugcggcaacugggacugcaucaugaccagcuaccaguaccugaucauccagaacaccaccugggaggaccacugccaguucagcagacccagccccaucggcuaccugggccugcugagccagagaaccagagacaucuacaucagcagaagacgccggggcaccuucaccuggacccugagcgacagcgagggcaacgaggcccccggcggcuacugccugaccagauggaugcugaucgaggccgagcugaagugcuucggcaacaccgccguggccaagugcaacgagaagcacgacgaggaguucugcgacaugcugagacuguucgacuucaacaagcaggccaucaagagacugaagacccccgcccagaugagcauccagcugaucaacaaggccgugaacgcccugaucaacgaccagcugaucaugaagaaccaccugagagacaucaugugcauccccuacugcaacuacagcagauacugguaccugaaccacaccgugaccggcaagaccagccugcccagaugcuggcuggugagcaacggcagcuaccugaacgagacccacuucagcgacgacaucgagcagcaggccgacaacaugaucaccgagaugcugcagaaggaguacauggacagacagggcaagaccccccugggccugguggaccuguucguguucagcaccagcuucuaccugaucagcaucuuccugcaccuggugaagauccccacccacagacacaucgugggcaagcccugccccaagccccacagacugaaccacaugggcaucugcagcugcggccuguacaagcaccccggcgugcccgugaaguggaagagauga

SEQ ID NO: 5094 - RNA, 1473 nt, Artificial Sequence
  derived and/or modified protein sequence (opt4) from LASV(GA391;Clade III)__CAA36645__GPCstabilized
augggccagaucgugaccuucuuccaggaggugccccacgugaucgaggaggugaugaacaucgugcugaucgcccugagcauccuggccauccugaagggccuguacaacguggccaccugcggccugaucggccuggugaccuuccugcugcugagcggcagaagcugcagccugaucuacaagggcaccuacgagcugcagacccuggagcugaacauggagacccugaacaugaccaugccccugagcugcaccaagaacaacagccaccacuacaucagagugggcaacgagaccggccuggagcugacccugaccaacaccagcauccugaaccacaaguucugcaaccugagcgacgcccacaagagaaaccuguacgaccacagccugaugagcaucaucagcaccuuccaccugagcauccccaacuucaaccaguacgaggccaugagcugcgacuucaacggcggcaagaucaccgugcaguacaaccugagccacagcuucgccguggacgccgccggccacugcggcacccuggccaacggcgugcugcagaccuucaugagaauggccuggggcggcagcuacaucgcccuggacagcggcugcggcaacugggacugcaucaugaccagcuaccaguaccugaucauccagaacaccaccugggacgaccacugccaguucagcagacccagccccaucggcuaccugggccugcugagccagagaaccagagacaucuacaucagcagaagacgccggggcaccuucaccuggacccugagcgacagcgagggcaacgagacccccggcggcuacugccugaccagauggaugcugaucgaggccgagcugaagugcuucggcaacaccgccguggccaagugcaacgagaagcacgacgaggaguucugcgacaugcugagacuguucgacuucaacaagcaggccaucagaagacugaagacccccgcccagaugagcauccagcugaucaacaaggccgugaacgcccugaucaacgaccagcugaucaugaagaaccaccugagagacaucaugugcauccccuacugcaacuacagcagauacugguaccugaaccacaccagcaccggcaagaccagccugcccagaugcuggcugaucagcaacggcagcuaccugaacgagaccaaguucagcgacgacaucgagcagcaggccgacaacaugaucaccgagaugcugcagaaggaguacaucgacagacagggcaagaccccccugggccugguggaccuguucguguucagcaccagcuucuaccugaucagcaucuuccugcaccuggugaagauccccacccacagacacaucgugggcaagcccugccccaagccccacagacugaaccacaugggcaucugcagcugcggccuguacaagcagcccggcgugcccgugagauggaagagauga

SEQ ID NO: 5095 - RNA, 1476 nt, Artificial Sequence
  derived and/or modified protein sequence (opt4) from LASV(AV;Clade V)__CCA30314__GPCstabilized
augggccagaucgugaccuucuuccaggaggugccccacgugaucgaggaggugaugaacaucgugcugaucgcccugagcauccuggccgugcugaagggccuguacaacaucgccaccugcggccugaucggccugaucaccuuccugcugcugugcggcagaagcugcagcagcaaccuguacaagggcguguacgagcugcagagccuggaccugaacauggagacccugaacaugaccaugccccugagcugcaccaagaacaacagccaccacuacaucagagugggcaacgacaccggccuggagcugacccugaccaacaccagcauccugaaccacaaguucugcaaccugagcgacgcccacaagaaggaccuguacgaccacgcccugaugagcaucaucagcaccuuccaccugagcauccccaacuucaaccaguacgaggccaugagcugcgacuucaacggcggcaagaucagcgugcaguacaaccugagccacagcuacgccaucgacgccgccaaccacugcggcaccguggccaacggcauccugcagaccuucaugagaauggccuggggcggcagcuacaucgcccuggacagcggcugcggcaacugggacugcaucaugaccagcuaccaguaccugaucauccagaacaccaccugggagaaccacugccaguucagcagacccagccccaucggcuaccugggccugcugagccagagaaccagagacaucuacaucagcagaagacgccggggcaccuucaccuggacccugagcgacagcgagggcaacgccacccccggcggcuacugccugaccagauggaugcugaucgaggccgagcugaagugcuucggcaacaccgccguggccaagugcaacgagaagcacgacgaggaguucugcgacaugcugagacuguucgacuucaacaagcaggccaucagcagacugaagagccccgcccagaugagcauccagcugaucaacaaggccgugaacgcccugaucaacgaccagcugaucaugaagaaccaccugagagacaucaugugcauccccuacugcaacuacagcaaguacugguaccugaaccacaccaucaccggcaagaccagccugcccaagugcuggcuggugagcaacggcagcuaccugaacgagacccacuucagcgacgacaucgagcagcaggccgacaacaugaucaccgagaugcugcagaaggaguacauggagagacagggcaagaccccccugggccugguggaccuguucguguucagcaccagcuucuaccugaucagcaucuuccugagacuggugaagauccccacccacagacacaucgugggcaagcccugccccaagccccacagacugaaccacaugggcaucugcagcugcggccuguacaagcagcccggcgugcccgugagauggaagagauga

SEQ ID NO: 5096 - RNA, 1473 nt, Artificial Sequence
  derived and/or modified protein sequence (opt4) from LASV(Togo/2016/7082;Clade VI)__AMR44577__GPCstabilized
augggccagaucaucaccuucuuccaggaggugccccacgugaucgaggaggugaugaacaucgugcugaucgcccugagccugcuggccauccugaagggcguguacaacguggccaccugcggcaucaucggccuggugaccuuccuguuccugugcggcagaagcugcagccugaucuacaagggcagcuacgagcugcagacccuggagcugaacauggagacccugaacaugaccaugccccugagcugcaccaagaacagcagccaccacuacaucagagugggcaacgagaccggccuggagcugacccugaccaacaccagcaucaucaaccacaaguucugcaaccugagcgacgcccacaagagaaaccuguacgaccacgcccugaugagcauccugagcaccuuccaccugagcauccccaacuucaaccaguacgaggccaugagcugcgacuucaacggcggcaagaucagcgugcaguacaaccugagccacgccuacgccguggacgccgccgagcacugcggcaccguggccaacggcgugcugcagaccuucaugagaauggccuggggcggcagcuacaucgcccuggacagcggcugcggcaacugggacugcaucaugaccagcuaccaguaccugaucauccagaacaccaccugggaggaccacugccaguucagcagacccagccccaucggcuaccugggccugcugagccagagaaccagagacaucuacaucagcagaagacgccggggcaccuucaccuggacccugagcgacagcgagggcaacgagacccccggcggcuacugccugaccagauggaugcugaucgaggccgagcugaagugcuucggcaacaccgccguggccaagugcaacgagaagcacgacgaggaguucugcgacaugcugagacuguucgacuucaacaagcaggccauccagagacugaagagccccgcccagaugagcauccagcugaucaacaaggccgugaacgcccugaucaacgaccagcugaucaugaagaaccaccugagagacaugaugugcauccccuacugcaacuacagcaaguacugguaccugaaccacaccagcagcggcagaaccagccugcccaagugcuggcuggugagcaacggcagcuaccugaacgagacccacuucagcgacgacaucgagcagcaggccgacaacaugaucaccgagaugcugcagaaggaguacaucgacagacagggcaagaccccccugggccugguggaccuguucguguucagcaccagcuucuaccugaucagcaucuuccugcaccugaucaagauccccacccacagacacaucgugggcaagcccugccccaagccccacagacugaaccacaugggcaucugcagcugcggccuguacaagcagcccggcgugcccaccagauggaagagauga

SEQ ID NO: 5097 - RNA, 1473 nt, Artificial Sequence
  derived and/or modified protein sequence (opt4) from LASV(KAK-428;Clade n.d. (VII))__ANH09740__GPCstabilized
augggccagaucgugaccuucuuccaggaggugccccacgugaucgaggaggugaugaacaucgugcugaucgcccugagccugcuggccauccugaagggccuguacaacuucgccaccugcggcgugaucggccugaucaccuuccugcugcugugcggcagaagcugcagcgccaccuacaagggccaguacgagcugcagacccuggagcugaacauggagagccugaacaugaccaugccccugagcugcaccaagaacaacagccaccacuacaucagagccggcaacaacaccggccuggagcugacccugaccaacaccagcaucaucagccacaaguucugcaaccugagcgacgcccacaagaagaaccuguacgaccacacccugaugagcaucaucaccaccuuccaccugagcauccccaacuucaaccaguacgaggccaugagcugcgacuucaacggcggcaagaucagcauccaguacaaccugagccacagcuacgccggcgacgccgcccagcacugcggcaccguggccaacggcgugcugcagaccuucaugagaauggccuggggcggcagcuaccuggcccuggacagcggcugcagaggcugggacugcaucaucagcagcuaccaguaccugaucauccagaacaccaccugggacgaccacugccaguucagcagacccagccccaucggcuaccugggcuucgugagccagaagaccagagacaucuacaucagcagaagacgccggggcaccuucaccuggacccugagcgacagcgagggccacgacaugcccggcggcuacugccugaccagauggaugcugaucgaggccgaccugaagugcuucggcaacaccgccguggccaagugcaacgagaagcacgacgaggaguucugcgacauguggagacuguucgacuucaacaagcaggccauccagagacugaaggcccccgcccagaugaacauccagcugaucaacaaggccgugaacgcccugaucaacgaccagcugaugaugaagaaccaccugagagacaucaugugcauccccuacugcaacuacagcaaguucugguaccugaacaacaccaccaccggcagaaccagccugcccagaugcuggcugaucagcaacggcagcuaccugaacgagacccacuucagcgacgacaucgagcagcaggccgacaacaugaucaccgagaugcugcagaaggaguacauggacagacagggcaagaccccccugggccugguggaccuguucguguucagcaccagcuucuaccugaucaccaucuuccugcaccuggugaagauccccacccacagacacaucgugggcaagcccugccccaagccccacagacugaaccacaugggcaucugcagcugcggccuguacaagcagcccggcgugcccgugagauggaagagauga

SEQ ID NO: 5098 - RNA, 1473 nt, Artificial Sequence
  derived and/or modified protein sequence (opt4) from LASV(Acar 3080;Clade I)__AAT49014__GPCstabilized
augggccagaucaucaccuucuuccaggaggugccccacgugaucgaggaggugaugaacaucgugcugaucgcccugagccugcuggccauccugaagggccuguacaacaucgccaccugcggcaucaucggccugguggccuuccuguuccugugcggcaagagcugcagccugacccugaagggcggcuacgagcugcagacccuggagcugaacauggagacccugaacaugaccaugccccugagcugcaccaagaacagcagccaccacuacaucagagugggcaacgagaccggccuggagcugacccugaccaacaccagcaucaucaaccacaaguucugcaaccugagcgacgcccacaagaagaaccuguacgaccacgcccugaugagcaucaucagcaccuuccaccugagcauccccaacuucaaccaguacgaggccaugagcugcgacuucaacggcggcaagaucagcgugcaguacaaccugagccacagcuacgccggcgacgccgccgagcacugcggcaccguggccaacggcgugcugcagaccuucaugagaauggccuggggcggcagauacaucgcccuggacagcggcugcggcaacugggacugcaucaugaccagcuaccaguaccugaucauccagaacaccaccugggaggaccacugccaguucagcagacccagccccaucggcuaccugggccugcugagccagagaaccagagacaucuacaucagcagaagacgccggggcaccuucaccuggacccugagcgacagcgagggcaacgagacccccggcggcuacugccugaccagauggaugcugaucgaggccgagcugaagugcuucggcaacaccgccguggccaagugcaacgagaagcacgacgaggaguucugcgacaugcugagacuguucgacuucaacaagcaggccaucagaagacugaaggcccccgcccagaugagcauccagcugaucaacaaggccgugaacgcccugaucaacgaccagcugaucaugaagaaccaccugagagacaucaugugcauccccuacugcaacuacagcaaguacugguaccugaaccacaccagcagcggcagaaccagccugcccaagugcuggcugaucagcaacggcagcuaccugaacgagacccaguucagcgacgacaucgagcagcaggccgaccacaugaucaccgagaugcugcagaaggaguacaucgagagacagggcaagaccccccugggccugguggacaucuucaucuucagcaccagcuucuaccugaucagcaucuuccugcaccugaucaagauccccacccacagacacaucgugggcaagcccugccccaagccccacagacugaaccacaugggcgugugcagcugcggccuguacaagcaccccggcgugcccaccaaguggaagagauga

SEQ ID NO: 5099 - RNA, 1473 nt, Artificial Sequence; identical to SEQ ID NO: 5092
  derived and/or modified protein sequence (opt4) from LASV(Pinneo-NIG-1969;Clade I)__AIT17836__GPCstabilized

SEQ ID NO: 5100 - RNA, 1473 nt, Artificial Sequence
  derived and/or modified protein sequence (opt4) from LASV(ISTH0009-NIG-2011;Clade II)__AIT17404__GPCstabilized
augggccagaucaucaccuucuuccaggaggugccccacgugaucgaggaggugaugaacaucgugcugaucgcccugagccugcuggccauccugaagggcaucuacaacguggccaccugcggccuguucggccuggugagcuuccugcugcugugcggcagaagcugcagcaccaccuacaagggcguguacgagcugcagacccuggagcuggacauggccagccugaacaugaccaugccccugagcugcaccaagaacaacagccaccacuacaucauggugggcaacgagaccggccuggagcugacccugaccaacaccagcaucaucaaccacaaguucugcaaccugagcgacgcccacaagaagaaccuguacgaccacgcccugaugagcaucaucagcaccuuccaccugagcauccccaacuucaaccaguacgaggccaugagcugcgacuucaacggcggcaagaucagcgugcaguacaaccugagccacgccuacgccguggacgccgccaaccacugcggcaccaucgccaacggcgugcugcagaccuucaugagaauggccuggggcggcagcuacaucgcccuggacagcggcugcggcagcugggacugcaucaugaccagcuaccaguaccugaucauccagaacaccaccugggaggaccacugccaguucagcagacccagccccaucggcuaccugggccugcugagccagagaaccagagacaucuacaucagcagaagacgccggggcaccuucaccuggacccugagcgacagcgagggcaacgagacccccggcggcuacugccugaccagauggaugcugaucgaggccgagcugaagugcuucggcaacaccgccguggccaagugcaacgagaagcacgacgaggaguucugcgacaugcugagacuguucgacuucaacaagcaggccaucagaagacugaagacccccgcccagaugagcauccagcugaucaacaaggccgugaacgcccugaucaacgaccagcugaucaugaagaaccaccugagagacaucaugugcauccccuacugcaacuacagcaaguacugguaccugaaccacaccgugaccggcaagaccagccugcccagaugcuggcuggugagcaacggcagcuaccugaacgagacccacuucagcgacgacaucgagcagcaggccgacaacaugaucaccgagcugcugcagaaggaguacauggacagacagggcaagaccccccugggccugguggaccuguucguguucagcaccagcuucuaccugaucagcaucuuccugcaccugaucaagauccccacccacagacacaucaccggcaagcccugccccaagccccacagacugaaccacaugggcaucugcagcugcggccuguacaagcaccccggcgugcccgugaaguggaagagauga

SEQ ID NO: 5101 - RNA, 1473 nt, Artificial Sequence
  derived and/or modified protein sequence (opt4) from LASV(ISTH0012-NIG-2011;Clade II)__AIT17408__GPCstabilized
augggccagaucaucaccuucuuccaggaggugccccacgugaucgaggaggugaugaacaucgugcugaucgcccugagccugcuggccauccugaagggcaucuacaacguggccaccugcggccuguucggccuggugagcuuccugcugcugugcggcagaagcugcagcaccaccuacaagggcguguacgagcugcagacccuggagcuggacauggccagccugaacaugaccaugccccugagcugcaccaagaacaacagccaccacuacaucauggugggcaacgagaccggccuggagcugacccugaccaacaccagcaucaucaaccacaaguucugcaaccugagcgacgcccacaagaagaaccuguacgaccacgcccugaugagcaucaucagcaccuuccaccugagcauccccaacuucaaccaguacgaggccaugagcugcgacuucaacggcggcaagaucagcgugcaguacaaccugagccacaccuacgccguggacgccgccaaccacugcggcaccguggccaacggcgugcugcagaccuucaugagaauggccuggggcggcagcuacaucgcccuggacagcggcugcggcagcugggacugcaucaugaccagcuaccaguaccugaucauccagaacaccaccugggaggaccacugccaguucagcagacccagccccaucggcuaccugggccugcugagccagagaaccagagacaucuacaucagcagaagacgccggggcaccuucaccuggacccugagcgacagcgagggcaacgagacccccggcggcuacugccugaccagauggaugcugaucgaggccgagcugaagugcuucggcaacaccgccguggccaagugcaacgagaagcacgacgaggaguucugcgacaugcugagacuguucgacuucaacaagcaggccaucagaagacugaagacccccgcccagaugagcauccagcugaucaacaaggccgugaacgcccugaucaacgaccagcugaucaugaagaaccaccugagagacaucaugugcauccccuacugcaacuacagcaaguacugguaccugaaccacaccgugaccggcaagaccagccugcccagaugcuggcuggugagcaacggcagcuaccugaacgagacccacuucagcgacgacaucgagcagcaggccgacaacaugaucaccgagcugcugcagaaggaguacauggacagacagggcaagaccccccugggccugguggaccuguucguguucagcaccagcuucuaccugaucagcaucuuccugcaccuggugaagauccccacccacagacacgugaucggcaagcccugccccaagccccacagacugaaccacaugggcaucugcagcugcggccuguacaagcaccccggcgugcccgugaaguggaagagauga

SEQ ID NO: 5102 - RNA, 1473 nt, Artificial Sequence
  derived and/or modified protein sequence (opt4) from LASV(ISTH0047-NIG-2011;Clade II)__AIT17412__GPCstabilized
augggccagaucaucaccuucuuccaggaggugccccacgugaucgaggaggugaugaacaucgugcugaucgcccugagccugcuggccauccugaagggcaucuacaacguggccaccugcggccuguucggccuggugagcuuccugcugcugugcggcagaagcugcagcaccaccuacaagggcguguacgagcugcagacccuggagcuggacauggccagccugaacaugaccaugccccugagcugcaccaagaacaacagccaccacuacaucauggugggcaacgagaccggccuggagcugacccugaccaacaccagcaucaucaaccacaaguucugcaaccugagcgacgcccacaagaagaaccuguacgaccacgcccugaugagcaucaucagcaccuuccaccugagcauccccaacuucaaccaguacgaggccaugagcugcgacuucaacggcggcaagaucagcgugcaguacaaccugagccacgccuacgccguggacgccgccaaccacugcggcaccaucgccaacggcgugcugcagaccuucaugagaauggccuggggcggcagcuacaucgcccuggacagcggcugcggcagcugggacugcaucaugaccagcuaccaguaccugaucauccagaacaccagcugggaggaccacugccaguucagcagacccagccccaucggcuaccugggccugcugagccagagaaccagagacaucuacaucagcagaagacgccggggcaccuucaccuggacccugagcgacagcgagggcaacgagacccccggcggcuacugccugaccagauggaugcugaucgaggccgagcugaagugcuucggcaacaccgccguggccaagugcaacgagaagcacgacgaggaguucugcgacaugcugagacuguucgacuucaacaagcaggccaucagaagacugaagacccccgcccagaugagcauccagcugaucaacaaggccgugaacgcccugaucaacgaccagcugaucaugaagaaccaccugagagacaucaugugcauccccuacugcaacuacagcaaguacugguaccugaaccacaccgugaccggcaagaccagccugcccagaugcuggcuggugagcaacggcagcuaccugaacgagacccacuucagcgacgacaucgagcagcaggccgacaacaugaucaccgagcugcugcagaaggaguacaucgacagacagggcaagaccccccugggccugguggaccuguucguguucagcaccagcuucuaccugaucagcaucuuccugcaccuggugaagauccccacccacagacacgugaucggcaagcccugccccaagccccacagacugaaccacaugggcaucugcagcugcggccuguacaagcaccccggcgugcccgugaaguggaagagauga

SEQ ID NO: 5103 - RNA, 1473 nt, Artificial Sequence
  derived and/or modified protein sequence (opt4) from LASV(ISTH0073-NIG-2011;Clade II)__AIT17416__GPCstabilized
augggccagaucaucaccuucuuccaggaggugccccacgugaucgaggaggugaugaacaucgugcugaucgcccugagccugcuggccauccugaagggcaucuacaacguggccaccugcggccuguucggccuggugagcuuccugcugcugugcggcagaagcugcagcaccaccuacaagggcguguacgagcugcagacccuggagcuggacauggccagccugaacaugaccaugccccugagcugcaccaagaacaacagccaccacuacaucauggugggcaacgagaccggccuggagcugacccugaccaacaccagcaucaucaaccacaaguucugcaaccugagcgacgcccacagaaagaaccuguacgaccacgcccugaugagcaucaucagcaccuuccaccugagcauccccaacuucaaccaguacgaggccaugagcugcgacuucaacggcggcaagaucagcgugcaguacaaccugagccacgccuacgccguggacgccgccaaccacugcggcaccaucgccaacggcgugcugcagaccuucaugagaauggccuggggcggcagcuacaucgcccuggacagcggcugcggcagcugggacugcaucaugaccagcuaccaguaccugaucauccagaacaccagcugggaggaccacugccaguucagcagacccagccccaucggcuaccugggccugcugagccagagaaccagagacaucuacaucagcagaagacgccggggcaccuucaccuggacccugagcgacagcgagggcaacgagacccccggcggcuacugccugaccagauggaugcugaucgaggccgagcugaagugcuucggcaacaccgccguggccaagugcaacgagaagcacgacgaggaguucugcgacaugcugagacuguucgacuucaacaagcaggccaucagaagacugaagacccccgcccagaugagcauccagcugaucaacaaggccgugaacgcccugaucaacgaccagcugaucaugaagaaccaccugagagacaucaugugcauccccuacugcaacuacagcaaguacugguaccugaaccacaccgugaccggcaagaccagccugcccagaugcuggcuggugagcaacggcagcuaccugaacgagacccacuucagcgacgacaucgagcagcaggccgacaacaugaucaccgagcugcugcagaaggaguacaucgacagacagggcaagaccccccugggccugguggaccuguucguguucagcaccagcuucuaccugaucagcaucuuccugcaccuggugaagauccccacccacagacacgugaucggcaagcccugccccaagccccacagacugaaccacaugggcaucugcagcugcggccuguacaagcaccccggcgugcccgugaaguggaagagauga

SEQ ID NO: 5104 - RNA, 1473 nt, Artificial Sequence
  derived and/or modified protein sequence (opt4) from LASV(ISTH0230-NIG-2011;Clade II)__AIT17420__GPCstabilized
augggccagaucaucaccuucuuccaggaggugccccacgugaucgaggaggugaugaacaucgugcugaucgcccugagccugcuggccauccugaagggcaucuacaacguggccaccugcggccuguucggccuggugagcuuccugcugcugugcggcagaagcugcagcaccaccuacaagggcguguacgagcugcagacccuggagcuggacauggccagccugaacaugaccaugccccugagcugcaccaagaacaacagccaccacuacaucauggugggcaacgagaccggccuggagcugacccugaccaacaccagcaucaucaaccacaaguucugcaaccugagcgacgcccacaagaagaaccuguacgaccacgcccugaugagcaucaucagcaccuuccaccugagcauccccaacuucaaccaguacgaggccaugagcugcgacuucaacggcggcaagaucagcgugcaguacaaccugagccacaccuacgccguggacgccgccaaccacugcggcaccaucgccaacggcgugcugcagaccuucaugagaauggccuggggcggcagcuacaucgcccuggacagcggcugcggcagcugggacugcaucaugaccagcuaccaguaccugaucauccagaacaccaccugggaggaccacugccaguucagcagacccagccccaucggcuaccugggccugcugagccagagaaccagagacaucuacaucagcagaagacgccggggcaccuucaccuggacccugagcgacagcgagggcaacgagacccccggcggcuacugccugaccagauggaugcugaucgaggccgagcugaagugcuucggcaacaccgccguggccaagugcaacgagaagcacgacgaggaguucugcgacaugcugagacuguucgacuucaacaagcaggccaucagaagacugaagacccccgcccagaugagcauccagcugaucaacaaggccgugaacgcccugaucaacgaccagcugaucaugaagaaccaccugagagacaucaugugcauccccuacugcaacuacagcaaguacugguaccugaaccacaccgugaccggcaagaccagccugcccagaugcuggcuggugagcaacggcagcuaccugaacgagacccacuucagcgacgacaucgagcagcaggccgacaacaugaucaccgagcugcugcagaaggaguacauggacagacagggcaagaccccccugggccugguggaccuguucguguucagcaccagcuucuaccugaucagcaucuuccugcaccugaucaagauccccacccacagacacaucaccggcaagcccugccccaagccccacagacugaaccacaugggcaucugcagcugcggccuguacaagcaccccggcgugcccgugaaguggaagagauga

SEQ ID NO: 5105 - RNA, 1473 nt, Artificial Sequence
  derived and/or modified protein sequence (opt4) from LASV(ISTH0531-NIG-2011;Clade II)__AIT17424__GPCstabilized
augggccagaucaucaccuucuuccaggaggugccccacgugaucgaggaggugaugaacaucgugcugaucgcccugagccugcuggccauccugaagggcaucuacaacguggccaccugcggccuguucggccuggugagcuuccugcugcugugcggcagaagcugcagcaccaccuacaagggcguguacgagcugcagacccuggagcuggacaugaccaaccugaacaugaccaugccccugagcugcaccaagaacaacagccaccacuacaucauggugggcaacgagaccggccuggagcugacccugaccaacaccagcaucaucaaccacaaguucugcaaccugagcgacgcccacaagaagaaccuguacaaccacgcccugaugagcaucaucagcaccuuccaccugagcauccccaacuucaaccaguacgaggccaugagcugcgacuucaacggcggcaagaucagcgugcaguacaaccugagccacgccuacgccguggacgccgccaaccacugcggcaccaucgccaacggcgugcugcagaccuucaugagaauggccuggggcggcagcuacaucgcccuggacagcggcugcggcagcugggacugcaucaugaccagcuaccaguaccugaucauccagaacaccaccugggaggaccacugccaguucagcagacccagccccaucggcuaccugggccugcugagccagagaaccagagacaucuacaucagcagaagacgccggggcaccuucaccuggacccugagcgacagcgagggcaacgagacccccggcggcuacugccugaccagauggaugcugaucgaggccgagcugaagugcuucggcaacaccgccguggccaagugcaacgagaagcacgacgaggaguucugcgacaugcugagacuguucgacuucaacaagcaggccaucagaagacugaagacccccgcccagaccaacauccagcugaucaacaaggccgugaacgcccugaucaacgaccagcugaucaugaagaaccaccugagagacaucaugugcauccccuacugcaacuacagcaaguacugguaccugaaccacaccgugaccggcaagaccagccugcccagaugcuggcuggugagcaacggcagcuaccugaacgagacccacuucagcgacgacaucgagcagcaggccgacaacaugaucaccgagcugcugcagaaggaguacauggacagacagggcaagaccccccugggccugguggaccuguucguguucagcaccagcuucuaccugaucagcaucuuccugcaccuggugaagauccccacccacagacacaucaucggcaagcccugccccaagccccacagacugaaccacaugggcaucugcagcugcggccuguacaagcaccccggcgugcccgugaaguggaagagauga

SEQ ID NO: 5106 - RNA, 1473 nt, Artificial Sequence
  derived and/or modified protein sequence (opt4) from LASV(ISTH0595-NIG-2011;Clade II)__AIT17428__GPCstabilized
augggccagaucaucaccuucuuccaggaggugccccacgugaucgaggaggugaugaacaucgugcugaucgcccugagccugcuggccauccugaagggcaucuacaacguggccaccugcggccuguucggccuggugagcuuccugcugcugugcggcagaagcugcagcaccaccuacaagggcguguacgagcugcagacccuggagcuggacauggccagccugaacaugaccaugccccugagcugcaccaagaacaacagccaccacuacaucauggugggcaacgagaccggccuggagcugacccugaccaacaccagcaucaucaaccacaaguucugcaaccugagcgacgcccacaagaagaaccuguacgaccacgcccugaugagcaucaucagcaccuuccaccugagcauccccaacuucaaccaguacgaggccaugagcugcgacuucaacggcggcaagaucagcgugcaguacaaccugagccacaccuacgccguggacgccgccaaccacugcggcaccaucgccaacggcgugcugcagaccuucaugagaauggccuggggcggcagcuacaucgcccuggacagcggcugcggcagcugggacugcaucaugaccagcuaccaguaccugaucauccagaacaccaccugggaggaccacugccaguucagcagacccagccccaucggcuaccugggccugcugagccagagaaccagagacaucuacaucagcagaagacgccggggcaccuucaccuggacccugagcgacagcgagggcaacgagacccccggcggcuacugccugaccagauggaugcugaucgccgccgaccugaagugcuucggcaacaccgccguggccaagugcaacgagaagcacgacgaggaguucugcgacaugcugagacuguucgacuucaacaagcaggccaucgagagacugaagacccccgcccagaugagcauccagcugaucaacaaggccgugaacgcccugaucaacgaccagcugaucaugaagaaccaccugagagacaucaugugcauccccuacugcaacuacagcaaguacugguaccugaaccacaccgugaccggcagaaccagccugcccagaugcuggcuggugagcaacggcagcuaccugaacgagacccacuucagcgacgacaucgagcagcaggccgacaacaugaucaccgagcugcugcagaaggaguacauggacagacagggcaagaccccccugggccugguggaccuguucguguucagcaccagcuucuaccugaucagcaucuuccugcaccuggugagaauccccacccacagacacgugaucggcaagcccugccccaagccccacagacugaaccacaugggcaucugcagcugcggccuguacaagcaccccggcgugcccgugaaguggaagagauga

SEQ ID NO: 5107 - RNA, 1473 nt, Artificial Sequence
  derived and/or modified protein sequence (opt4) from LASV(ISTH0964-NIG-2011;Clade II)__AIT17430__GPCstabilized
augggccagaucaucaccuucuuccaggaggugccccacgugaucgaggaggugaugaacaucgugcugaucgcccugagccugcuggccauccugaagggcaucuacaacguggccaccugcggccuguucggccuggugagcuuccugcugcugugcggcagaagcugcagcaccaccuacaagggcguguacgagcugcagacccuggagcuggacauggccagccugaacaugaccaugccccugagcugcaccaagaacaacagccaccacuacaucauggugggcaacgagaccggccuggagcugacccugaccaacaccagcaucaucaaccacaaguucugcaaccugagcgacgcccacaagaagaaccuguacgaccacgcccugaugagcaucaucagcaccuuccaccugagcauccccaacuucaaccaguacgaggccaugagcugcgacuucaacggcggcagaaucagcgugcaguacaaccugagccacaccuacgccguggacgccgccaagcacugcggcaccaucgccaacggcgugcugcagaccuucaugagaauggccuggggcggcagcuacaucgcccuggacagcggcugcggcagcugggacugcaucaugaccagcuaccaguaccugaucauccagaacaccaccugggaggaccacugccaguucagcagacccagccccaucggcuaccugggccugcugagccagagaaccagagacaucuacaucagcagaagacgccggggcaccuucaccuggacccugagcgacagcgagggcaacgagacccccggcggcuacugccugaccagauggaugcugaucgaggccgagcugaagugcuucggcaacaccgccguggccaagugcaacgagaagcacgacgaggaguucugcgacaugcugagacuguucgacuucaacaagcaggccaucagaagacugaagacccccgcccagaugagcauccagcugaucaacaaggccgugaacgcccugaucaacgaccagcugaucaugaagaaccaccugagagacaucaugugcauccccuacugcaacuacagcaaguacugguaccugaaccacaccgugaccggcaagaccagccugcccagaugcuggcuggugagcaacggcagcuaccugaacgagacccacuucagcgacgacaucgagcagcaggccgacaacaugaucaccgagcugcugcagaaggaguacaucgacagacagggcaagaccccccugggccugguggaccuguucguguucagcaccagcuucuaccugaucagcaucuuccugcaccuggugaagauccccacccacagacacgugaucggcaagcccugccccaagccccacagacugaaccacaugggcaucugcagcugcggccuguacaagcaccccggcgugcccgugaaguggaagagauga

SEQ ID NO: 5108 - RNA, 1473 nt, Artificial Sequence
  derived and/or modified protein sequence (opt4) from LASV(ISTH1038-NIG-2011;Clade II)__AIT17438__GPCstabilized
augggccagaucaucaccuucuuccaggaggugccccacgugaucgaggaggugaugaacaucgugcugaucgcccugagccugcuggccauccugaagggcaucuacaacguggccaccugcggccuguucggccuggugagcuuccugcugcugugcggcagaagcugcagcaccaccuacaagggcguguacgagcugcagacccuggagcuggacauggccaaccugaacaugaccaugccccugagcugcaccaagaacaacagccaccacuacaucagagugggcaacgagaccggccuggagcugacccugaccaacaccagcaucaucagccacaaguucugcaaccugagcgacgcccacaagaagaaccuguacgaccacgcccugaugagcaucaucagcaccuuccaccugagcauccccaacuucaaccaguacgaggccaugagcugcgacuucaacggcggcaagaucagcgugcaguacaaccugagccacaccuacgccguggacgccgccaaccacugcggcaccaucgccaacggcgugcugcagaccuucaugagaauggccuggggcggcagcuacaucgcccuggacagcggcugcggcagcugggacugcaucaugaccagcuaccaguaccugaucauccagaacaccaccugggaggaccacugccaguucagcagacccagccccaucggcuaccugggccugcugagccagagaaccagagacaucuacaucagcagaagacgccggggcaccuucaccuggacccugagcgacagcgagggcaaggagacccccggcggcuacugccugaccagauggaugcugaucgaggccgagcugaagugcuucggcaacaccgccguggccaagugcaacgagaagcacgacgaggaguucugcgacaugcugagacuguucgacuucaacaagcaggccaucagaagacugaagacccccgcccagaugaacauccagcugaucaacaaggccgugaacgcccugaucaacgaccagcugaucaugaagaaccaccugagagacaucaugugcauccccuacugcaacuacagcaaguacugguaccugaaccacaccgugaccggcaagaccagccugcccagaugcuggcuggugagcaacggcagcuaccugaacgagacccacuucagcgacgacaucgagcagcaggccgacaacaugaucaccgagcugcugcagaaggaguacaucgacagacagggcaagaccccccugggccugguggaccuguucguguucagcaccagcuucuaccugaucagcaucuuccugcaccuggugaagauccccacccacagacacgugaucggcaagcccugccccaagccccacagacugaaccagaugggcaucugcagcugcggccuguacaagcagcccggcgugcccgugaaguggaagagauga

SEQ ID NO: 5109 - RNA, 1473 nt, Artificial Sequence
  derived and/or modified protein sequence (opt4) from LASV(ISTH1048-NIG-2011;Clade II)__AIT17442__GPCstabilized
augggccagaucaucaccuucuuccaggaggugccccacgugaucgaggaggugaugaacaucgugcugaucgcccugagccugcuggccauccugaagggcaucuacaacguggccaccugcggccuguucggccuggugagcuuccugcugcugugcggcagaagcugcagcaccaccuacaagggcguguacgagcugcagacccuggagcuggacauggccagccugaacaugaccaugccccugagcugcaccaagaacaacagccaccacuacaucauggugggcaacgagaccggccuggagcugacccugaccaacaccagcaucaucaaccacaaguucugcaaccugagcgacgcccacagaaagaaccuguacgaccacgcccugaugagcaucaucagcaccuuccaccugagcauccccaacuucaaccaguacgaggccaugagcugcgacuucaacggcggcaagaucagcgugcaguacaaccugagccacgccuacgccguggacgccgccaaccacugcggcaccaucgccaacggcgugcugcagaccuucaugagaauggccuggggcggcagcuacaucgcccuggacagcggcugcggcagcugggacugcaucaugaccagcuaccaguaccugaucauccagaacaccagcugggaggaccacugccaguucagcagacccagccccaucggcuaccugggccugcugagccagagaaccagagacaucuacaucagcagaagacgccggggcaccuucaccuggacccugagcgacagcgagggcaacgagacccccggcggcuacugccugaccagauggaugcugaucgaggccgagcugaagugcuucggcaacaccgccguggccaagugcaacgagaagcacgacgaggaguucugcgacaugcugagacuguucgacuucaacaagcaggccaucagaagacugaagacccccgcccagaugagcauccagcugaucaacaaggccgugaacgcccugaucaacgaccagcugaucaugaagaaccaccugagagacaucaugugcauccccuacugcaacuacagcaaguacugguaccugaaccacaccgugaccggcaagaccagccugcccagaugcuggcuggugagcaacggcagcuaccugaacgagacccacuucagcgacgacaucgagcagcaggccgacaacaugaucaccgagcugcugcagaaggaguacaucgacagacagggcaagaccccccugggccugguggaccuguucguguucagcaccagcuucuaccugaucagcaucuuccugcaccuggugaagauccccacccacagacacgugaucggcaagcccugccccaagccccacagaaucaaccacaugggcaucugcagcugcggccuguacaagcaccccggcgugcccgugaaguggaagagauga

SEQ ID NO: 5110 - RNA, 1473 nt, Artificial Sequence
  derived and/or modified protein sequence (opt4) from LASV(ISTH1058-NIG-2011;Clade II)__AIT17446__GPCstabilized
augggccagaucaucaccuucuuccaggaggugccccacgugaucgaggaggugaugaacaucgugcugaucgcccugagccugcuggccauccugaagggcaucuacaacguggccaccugcggccuguucggccuggugagcuuccugcugcugugcggcagaagcugcagcaccaccuacaagggcguguacgagcugcagacccuggagcuggacauggccagccugaacaugaccaugccccugagcugcaccaagaacaacagccaccacuacaucauggugggcaacgagaccggccuggagcugacccugaccaacaccagcaucaucaaccacaaguucugcaaccugagcgacgcccacaagaagaaccuguacgaccacgcccugaugagcaucaucagcaccuuccaccugagcauccccaacuucaaccaguacgaggccaugagcugcgacuucaacggcggcaagaucagcgugcaguacaaccugagccacaccuacgccguggacgccgccagccacugcggcaccguggccaacggcgugcugcagaccuucaugagaauggccuggggcggcagcuacaucgcccuggacagcggcugcggcagcugggacugcaucaugaccagcuaccaguaccugaucauccagaacaccaccugggaggaccacugccaguucagcagacccagccccaucggcuaccugggccugcugagccagagaaccagagacaucuacaucagcagaagacgccggggcaccuucaccuggacccugagcgacagcgagggcaacgagacccccggcggcuacugccugaccagauggaugcugaucgaggccgagcugaagugcuucggcaacaccgccguggccaagugcaacgagaagcacgacgaggaguucugcgacaugcugagacuguucgacuucaacaagcaggccaucagaagacugaagacccccgcccagaugagcauccagcugaucaacaaggccgugaacgcccugaucaacgaccagcugaucaugaagaaccaccugagagacaucaugugcauccccuacugcaacuacagcaaguacugguaccugaaccacaccgugaccggcaagaccagccugcccagaugcuggcuggugagcaacggcagcuaccugaacgagacccacuucagcgacgacaucgagcagcaggccgacaacaugaucaccgagcugcugcagaaggaguacauggacagacagggcaagaccccccugggccugguggaccuguucguguucagcaccagcuucuaccugaucagcaucuuccugcaccuggugaagauccccacccacagacacgugaucggcaagcccugccccaagccccacagacugaaccacaugggcaucugcagcugcggccuguacaagcaccccggcgugcccgugaaguggaagagauga

SEQ ID NO: 5111 - RNA, 1473 nt, Artificial Sequence
  derived and/or modified protein sequence (opt4) from LASV(ISTH1064-NIG-2011;Clade II)__AIT17450__GPCstabilized
augggccagaucaucaccuucuuccaggaggugccccacgugaucgaggaggugaugaacaucgugcugaucgcccugagccugcuggccauccugaagggcaucuacaacguggccaccugcggccuguucggccuggugagcuuccugcugcugugcggcagaagcugcagcaccaccuacaagggcguguacgagcugcagacccuggagcuggacauggccagccugaacaugaccaugccccugagcugcaccaagaacaacagccaccacuacaucauggugggcaacgagaccggccuggagcugacccugaccaacaccagcaucaucaaccacaaguucugcaaccugagcgacgcccacaagaagaaccuguacgaccacgcccugaugagcaucaucagcaccuuccaccugagcauccccaacuucaaccaguacgaggccaugagcugcgacuucaacggcggcaagaucagcgugcaguacaaccugagccacaccuacgccguggacgccgccaaccacugcggcaccaucgccaacggcgugcugcagaccuucaugagaauggccuggggcggcagcuacaucgcccuggacagcggcugcggcagcugggacugcaucaugaccagcuaccaguaccugaucauccagaacaccaccugggaggaccacugccaguucagcagacccagccccaucggcuaccugggccugcugagccagagaaccagagacaucuacaucagcagaagacgccggggcaccuucaccuggacccugagcgacagcgagggcaacgagacccccggcggcuacugccugaccagauggaugcugaucgaggccgagcugaagugcuucggcaacaccgccguggccaagugcaacgagaagcacgacgaggaguucugcgacaugcugagacuguucgacuucaacaagcaggccaucagaagacugaagacccccgcccagaugagcauccagcugaucaacaaggccgugaacgcccugaucaacgaccagcugaucaugaagaaccaccugagagacaucaugugcauccccuacugcaacuacagcaaguacugguaccugaaccacaccgugaccggcaagaccagccugcccagaugcuggcuggugagcaacggcagcuaccugaacgagacccacuucagcgacgacaucgagcagcaggccgacaacaugaucaccgagcugcugcagaaggaguacaucgacagacagggcaagaccccccugggccugguggaccuguucguguucagcaccagcuucuaccugaucagcaucuuccugcaccuggugaagauccccacccacagacacaucaucggcaagcccugccccaagccccacagacugaaccacaugggcaucugcagcugcggccuguacaagcaccccggcgugcccgugaaguggaagagauga

SEQ ID NO: 5112 - RNA, 1473 nt, Artificial Sequence
  derived and/or modified protein sequence (opt4) from LASV(ISTH1069-NIG-2011;Clade II)__AIT17454__GPCstabilized
augggccagaucaucaccuucuuccaggaggugccccacgugaucgaggaggugaugaacaucgugcugaucgccuucagccugcuggccauccugaagggcaucuacaacguggccaccugcggccuguucggccuggugagcuuccugcugcugugcggcagaagcugcagcaccaccuacaagggcguguacgagcugcagacccuggagcuggacauggccagccugaacaugaccaugccccugagcugcaccaagaacaacagccaccacuacaucauggugggcaacgagaccggccuggagcugacccugaccaacaccagcaucaucaaccacaaguucugcaaccugagcgacgcccacaagagaaaccuguacgaccacgcccugaugagcaucaucagcaccuuccaccugagcauccccaacuucaaccaguacgaggccaugagcugcgacuucaacggcggcaagaucagcgugcaguacaaccugagccacaccuacgccguggacgccgccggccacugcggcaccaucgccaacggcgugcugcagaccuucaugagaauggccuggggcggcagcuacaucgcccuggacagcggcugcggcagcugggacugcaucaugaccagcuaccaguaccugaucauccagaacaccaccugggaggaccacugccaguucagcagacccagccccaucggcuaccugggccugcugagccagagaaccagagacaucuacaucagcagaagacgccggggcaccuucaccuggacccugagcgacagcgagggcaacgagacccccggcggcuacugccugaccagauggaugcugaucgaggccgagcugaagugcuucggcaacaccgccguggccaagugcaacgagaagcacgacgaggaguucugcgacaugcugagacuguucgacuucaacaagcaggccaucagaagacugaagacccccgcccagaugagcauccagcugaucaacaaggccgugaacgcccugaucaacgaccagcugaucaugaagaaccaccugagagacaucaugugcauccccuacugcaacuacagcaaguacugguaccugaaccacaccaucaccggcaagaccagccugcccagaugcuggcuggugagcaacggcagcuaccugaacgagacccacuucagcgacgacaucgagcagcaggccgacaacaugaucaccgagcugcugcagaaggaguacauggacagacagggcaagaccccccugggccugguggaccuguucguguucagcaccagcuucuaccugaucagcaucuuccugcaccuggugaagauccccacccacagacacaucaucggcaagcccugccccaagccccacagacugaaccacaugggcaucugcagcugcggccuguacaagcaccccggcgugcccgugagauggaagagauga

SEQ ID NO: 5113 - RNA, 1473 nt, Artificial Sequence
  derived and/or modified protein sequence (opt4) from LASV(ISTH1096-NIG-2012;Clade II)__AIT17458__GPCstabilized
augggccagaucaucaccuucuuccaggaggugccccacgugaucgaggaggugaugaacaucgugcugaucgcccugagccugcuggccauccugaagggcaucuacaacguggccaccugcggccuguucggccuggugagcuuccugcugcugugcggcagaagcugcagcaccaccuacaagggcguguacgagcugcagacccuggagcuggacauggccagccugaacaugaccaugccccugagcugcaccaagaacaacagccaccacuacaucauggugggcaacgagaccggccuggagcugacccugaccaacaccagcaucaucaaccacaaguucugcaaccugagcgacgcccacaagaagaaccuguacgaccacgcccugaugagcaucaucagcaccuuccaccugagcauccccaacuucaaccaguacgaggccaugagcugcgacuucaacggcggcaagaucagcgugcaguacaaccugagccacaccuacgccaucgacgccgccaaccacugcggcaccaucgccaacggcgugcugcagaccuucaugagaauggccuggggcggcagcuacaucgcccuggacagcggcugcggcagcugggacugcaucaugaccaccuaccaguaccugaucauccagaacaccaccugggaggaccacugccaguucagcagacccagccccaucggcuaccugggccugcugagccagagaaccagagacaucuacaucagcagaagacgccggggcaccuucaccuggacccugagcgacagcgagggcaacgagacccccggcggcuacugccugaccagauggaugcugaucgaggccgagcugaagugcuucggcaacaccgccguggccaagugcaacgagaagcacgacgaggaguucugcgacaugcugagacuguucgacuucaacaagcaggccaucagaagacugaagacccccgcccagaugagcauccagcugaucaacaaggccgugaacgcccugaucaacgaccagcugaucaugaagaaccaccugagagacaucaugugcauccccuacugcaacuacagcaaguacugguaccugaaccacaccgugaccggcaagaccagccugcccagaugcuggcuggugagcaacggcagcuaccugaacgagacccacuucagcgacgacaucgagcagcaggccgacaacaugaucaccgagcugcugcagaaggaguacauggacagacagggcaagaccccccugggccugguggaccuguucguguucagcaccagcuucuaccugaucagcaucuuccugcaccuggugaagauccccacccacagacacgugaucggcaagcccugccccaagccccacagacugaaccacaugggcaucugcagcugcggccuguacaagcaccccggcgugcccgugaaguggaagagauga

SEQ ID NO: 5114 - RNA, 1473 nt, Artificial Sequence
  derived and/or modified protein sequence (opt4) from LASV(ISTH1107-NIG-2012;Clade II)__AIT17462__GPCstabilized
augggccagaucaucaccuucuuccaggaggugccccacgugaucgaggaggugaugaacaucgugcugaucgcccugagccugcuggccauccugaagggcaucuacaacguggccaccugcggccuguucggccuggugagcuuccugcugcugugcggcagaagcugcagcaccaccuacaagggcguguacgagcugcagacccuggagcuggacauggccagccugaacaugaccaugccccugagcugcaccaagaacaacagccaccacuacaucauggugggcaacgagaccggccuggagcugacccugaccaacaccagcaucaucaaccacaaguucugcaaccugagcgacgcccacaagaagaaccuguacgaccacgcccugaugagcaucaucagcaccuuccaccugagcauccccaacuucaaccaguacgaggccaugagcugcgacuucaacggcggcaagaucagcgugcaguacaaccugagccacgccuacgccguggacgccgccaaccacugcggcaccaucgccaacggcgugcugcagaccuucaugagaauggccuggggcggcagcuacaucgcccuggacagcggcugcggcagcugggacugcaucaugaccagcuaccaguaccugaucauccagaacaccaccugggaggaccacugccaguucagcagacccagccccaucggcuaccugggccugcugagccagagaaccagagacaucuacaucagcagaagacgccggggcaccuucaccuggacccugagcgacagcgagggcaacgagacccccggcggcuacugccugaccagauggaugcugaucgaggccgagcugaagugcuucggcaacaccgccguggccaagugcaacgagaagcacgacgaggaguucugcgacaugcugagacuguucgacuucaacaagcaggccaucagaagacugaagacccccgcccagaugagcauccagcugaucaacaaggccgugaacgcccugaucaacgaccagcugaucaugaagaaccaccugagagacaucaugugcauccccuacugcaacuacagcaaguacugguaccugaaccacaccgugaccggcaagaccagccugcccaagugcuggcuggugagcaacggcagcuaccugaacgagacccacuucagcgacgacaucgagcagcaggccgacaacaugaucaccgagcugcugcagaaggaguacaucgacagacagggcaagaccccccugggccugguggaccuguucguguucagcaccagcuucuaccugaucagcaucuuccugcaccuggugaagauccccacccacagacacgugaucggcaagcccugccccaagccccacagacugaaccacaugggcaucugcagcugcggccuguacaagcaccccggcgugcccgugaaguggaagagauga

SEQ ID NO: 5115 - RNA, 1473 nt, Artificial Sequence
  derived and/or modified protein sequence (opt4) from LASV(ISTH1111-NIG-2011;Clade II)__AIT17466__GPCstabilized
augggccagaucaucaccuucuuccaggaggugccccaggugaucgaggaggugaugaacaucgugcugaucgcccugagccugcuggccauccugaagggcaucuacaacguggccaccugcggccuguucggccuggugagcuuccugcugcugugcggcagaagcugcagcaccaccuacaagggcguguacgagcugcagacccuggagcuggacauggccagccugaacaugaccaugccccugagcugcaccaagaacaacagccaccacuacaucauggugggcaacgagaccggccuggagcugacccugaccaaccagagcaucaucaaccacaaguucugcaaccugagcgacgcccacaagaagaaccuguacgaccacgcccugaugagcaucaucagcaccuuccaccugagcauccccaacuucaaccaguacgaggccaugagcugcgacuucaacggcggcaagaucagcgugcaguacaaccugagccacaccuucgccguggacgccgccaaccacugcggcaccaucgccaacggcgugcugcagaccuucaugagaauggccuggggcggcagcuacaucgcccuggacagcggcugcggcagcugggacugcaucaugaccagcuaccaguaccugaucauccagaacaccaccugggaggaccacugccaguucagcagacccagccccaucggcuaccugggccugcugagccagagaaccagagacaucuacaucagcagaagacgccggggcaccuucaccuggacccugagcgacagcgagggcaacgagacccccggcggcuacugccugaccagauggaugcugaucgaggccgagcugaagugcuucggcaacaccgccguggccaagugcaacgagaagcacgacgaggaguucugcgacaugcugagacuguucgacuucaacaagcaggccaucagaagacugaagacccccgcccagaugagcauccagcugaucaacaaggccgugaacgcccugaucaacgaccagcugaucaugaagaaccaccugagagacaucaugugcauccccuacugcaacuacagcaaguacugguaccugaaccacaccaucaccggcaagaccagccugcccagaugcuggcuggugagcaacggcagcuaccugaacgagacccacuucagcgacgacaucgagcagcaggccgacaacaugaucaccgagcugcugcagaaggaguacauggacagacagggcaagaccccccugggccugguggaccuguucguguucagcaccagcuucuaccugaucagcaucuuccugcaccuggugaagauccccacccacagacacgugaucggcaagcccugccccaagccccacagacugaaccacaugggcaucugcagcugcggccuguacaagcaccccggcgugcccgugaaguggaagagauga

SEQ ID NO: 5116 - RNA, 1473 nt, Artificial Sequence
  derived and/or modified protein sequence (opt4) from LASV(ISTH1121-NIG-2012;Clade II)__AIT17470__GPCstabilized
augggccagaucaucaccuucuuccaggaggugccccacgugaucgaggaggugaugaacaucgugcugaucgcccugagccugcuggccauccugaagggcaucuacaacguggccaccugcggccuguucggccuggugagcuuccugcugcugugcggcagaagcugcagcaccaccuacaagggcguguacgagcugcagacccuggagcuggacauggccagccugaacaugaccaugccccugagcugcaccaagaacaacagccaccacuacaucauggugggcaacgagaccggccuggagcugacccugaccaacaccagcaucaucaaccacaaguucugcaaccugagcgacgcccacagaaagaaccuguacgaccacgcccugaugagcaucaucagcaccuuccaccugagcauccccaacuucaaccaguacgaggccaugagcugcgacuucaacggcggcaagaucagcgugcaguacaaccugagccacaccuacgccguggacgccgccaaccacugcggcaccaucgccaacggcgugcugcagaccuucaugagaauggccuggggcggcagcuacaucgcccuggacagcggcugcggcagcugggacugcaucaugaccagcuaccaguaccugaucauccagaacaccaccugggaggaccacugccaguucagcagacccagccccaucggcuaccugggccugcugagccagagaaccagagacaucuacaucagcagaagacgccggggcaccuucaccuggacccugagcgacagcgagggcaacgagacccccggcggcuacugccugaccagauggaugcugaucgaggccgagcugaagugcuucggcaacaccgccguggccaagugcaacgagaagcacgacgaggaguucugcgacaugcugagacuguucgacuucaacaagcaggccaucagaagacugaagacccccgcccagaugagcauccagcugaucaacaaggccgugaacgcccugaucaacgaccagcugaucaugaagaaccaccugagagacaucaugugcauccccuacugcaacuacagcaaguacugguaccugaaccacaccgugaccggcaagaccagccugcccagaugcuggcuggugagcaacggcagcuaccugaacgagacccacuucagcgacgacaucgagcagcaggccgacaacaugaucaccgagcugcugcagaaggaguacaucgacagacagggcaagaccccccugggccugguggaccuguucguguucagcaccagcuucuaccugaucagcaucuuccugcaccuggugaagauccccacccacagacacgugaucggcaagcccugccccaagccccacagacugaaccacaugggcaucugcagcugcggccuguacaagcaccccggcgugcccgugaaguggaagagauga

SEQ ID NO: 5117 - RNA, 1473 nt, Artificial Sequence
  derived and/or modified protein sequence (opt4) from LASV(ISTH1129-NIG-2012;Clade II)__AIT17474__GPCstabilized
augggccagaucaucaccuucuuccaggaggugccccacgugaucgaggaggugaugaacaucgugcugaucgcccugagccugcuggccauccugaagggcaucuacaacguggccaccugcggccuguucggccuggugagcuuccugcugcugugcggcagaagcugcagcaccaccuacaagggcguguacgagcugcagacccuggagcuggacauggccagccugaacaugaccaugccccugagcugcaccaagaacaacagccaccacuacaucauggugggcaacgagaccggccuggagcugacccugaccaacaccagcaucaucaaccacaaguucugcaaccugagcgacgcccacaagaagaaccuguacgaccacgcccugaugagcaucaucagcaccuuccaccugagcauccccaacuucaaccaguacgaggccaugagcugcgacuucaacggcggcaagaucagcauccaguacaaccugagccacaccuacgccguggacgccgccaaccacugcggcaccaucgccaacggcgugcugcagaccuucaugagaauggccuggggcggcagcuacaucgcccuggacagcggcugcggcagcugggacugcaucaugaccagcuaccaguaccugaucauccagaacaccaccugggaggaccacugccaguucagcagacccagccccaucggcuaccugggccugcugagccagagaaccagagacaucuacaucagcagaagacgccggggcaccuucaccuggacccugagcgacagcgagggcaacgagacccccggcggcuacugccugaccagauggaugcugaucgaggccgagcugaagugcuucggcaacaccgccguggccaagugcaacgagaagcacgacgaggaguucugcgacaugcugagacuguucgacuucaacaagcaggccaucagaagacugaagacccccgcccagaugagcauccagcugaucaacaaggccgugaacgcccugaucaacgaccagcugaucaugaagaaccaccugagagacaucaugugcauccccuacugcaacuacagcaaguacugguaccugaaccacaccaucaccggcaagaccagccugcccagaugcuggcuggugagcaacggcagcuaccugaacgagacccacuucagcgacgacaucgagcagcaggccgacaacaugaucaccgagcugcugcagaaggaguacaucgacagacagggcaagaccccccugggccugguggaccuguucguguucagcaccagcuucuaccugaucagcaucuuccugcaccuggugaagauccccacccacagacacaucaccggcaagcccugccccaagccccacagacugaaccacaugggcaucugcagcugcggccuguacaagcaccccggcgugcccgugagauggaagagauga

SEQ ID NO: 5118 - RNA, 1473 nt, Artificial Sequence
  derived and/or modified protein sequence (opt4) from LASV(ISTH1137-NIG-2011;Clade II)__AIT17478__GPCstabilized
augggccagaucaucaccuucuuccaggaggugccccacgugaucgaggaggugaugaacaucgugcugaucgcccugagccugcuggccauccugaagggcaucuacaacguggccaccugcggccuguucggccuggugagcuuccugcugcugugcggcagaagcugcagcaccaccuacaagggcguguacgagcugcagacccuggagcuggacauggccagccugaacaugaccaugccccugagcugcaccaagaacaacagccaccacuacaucauggugggcaacgagaccggccuggagcugacccugaccaacaccagcaucaucaaccacaaguucugcaaccugagcgacgcccacaagaagaaccuguacgaccacgcccugaugagcaucaucagcaccuuccaccugagcauccccaacuucaaccaguacgaggccaugagcugcgacuucaacggcggcaagaucagcgugcaguacaaccugagccacaccuacgccguggacgccgccgaccacugcggcaccaucgccaacggcgugcugcagaccuucaugagaauggccuggggcggcagcuacaucgcccuggacagcggcugcggcagcugggacugcaucaugaccagcuaccaguaccugaucauccagaacaccaccugggaggaccacugccaguucagcagacccagccccaucggcuaccugggccugcugagccagagaaccagagacaucuacaucagcagaagacgccggggcaccuucaccuggacccugagcgacagcgagggcaacgagacccccggcggcuacugccugaccagauggaugcugaucgaggccgagcugaagugcuucggcaacaccgccguggccaagugcaacgagaagcacgacgaggaguucugcgacaugcugagacuguucgacuucaacaagcaggccaucagcagacugaagacccccgcccagaugagcauccagcugaucaacaaggccgugaacgcccugaucaacgaccagcugaucaugaagaaccaccugagagacaucaugugcauccccuacugcaacuacagcaaguacugguaccugaaccacaccgugaccggcaagaccagccugcccagaugcuggcuggugagcaacggcagcuaccugaacgagacccacuucagcgacgacaucgagcagcaggccgacaacaugaucaccgagaugcugcagaaggaguacaucgacagacagggcaagaccccccugggccugguggaccuguucguguucagcaccagcuucuaccugaucagcaucuuccugcaccuggugaagauccccacccacagacacgugaucggcaagcccugccccaagccccacagacugaaccacaugggcaucugcagcugcggccuguacaagcaccccggcgugcccgugaaguggaagagauga

SEQ ID NO: 5119 - RNA, 1473 nt, Artificial Sequence
  derived and/or modified protein sequence (opt4) from LASV(ISTH2010-NIG-2012;Clade II)__AIT17482__GPCstabilized
augggccagaucaucaccuucuuccaggaggugccccacgugaucgaggaggugaugaacaucgugcugaucgcccugagccugcuggccauccugaagggcaucuacaacguggccaccugcggccuguucggccuggugagcuuccugcugcugugcggcagaagcugcagcaccaccuacaagggcguguacgagcugcagacccuggagcuggacauggccagccugaacaugaccaugccccugagcugcaccaagaacaacagccaccacuacaucauggugggcaacgagaccggccuggagcugacccugaccaacaccagcaucaucaaccacaaguucugcaaccugagcgacgcccacaagaagaaccuguacgaccacgcccugaugagcaucaucagcaccuuccaccugagcauccccaacuucaaccaguacgaggccaugagcugcgacuucaacggcggcaagaucagcgugcaguacaaccugagccacgccuacgccguggacgccgccaaccacugcggcaccaucgccaacggcgugcugcagaccuucaugagaauggccuggggcggcagcuacaucgcccuggacagcggcugcggcagcugggacugcaucaugaccagcuaccaguaccugaucauccagaacaucaccugggaggaccacugccaguucagcagacccagccccaucggcuaccugggccugcugagccagagaaccagagacaucuacaucagcagaagacgccggggcaccuucaccuggacccugagcgacagcgagggcaacgagacccccggcggcuacugccugaccagauggaugcugaucgaggccgagcugaagugcuucggcaacaccgccguggccaagugcaacgagaagcacgacgaggaguucugcgacaugcugagacuguucgacuucaacaagcaggccaucagaagacugaagacccccgcccagaugagcauccagcugaucaacaaggccgugaacgcccugaucaacgaccagcugaucaugaagaaccaccugagagacaucaugugcauccccuacugcaacuacagcaaguacugguaccugaaccacaccgugaccggcaagaccagccugcccagaugcuggcuggugagcaacggcagcuaccugaacgagacccacuucagcgacgacaucgagcagcaggccgacaacaugaucaccgagcugcugcagaaggaguacaucgacagacagggcaagaccccccugggccugguggaccuguucguguucagcaccagcuucuaccugaucagcaucuuccugcaccuggugaagauccccacccacagacacguggugggcaagcccugccccaagccccacagacugaaccacaugggcaucugcagcugcggccuguacaagcaccccggcgugcccgugaaguggaagagauga

SEQ ID NO: 5120 - RNA, 1473 nt, Artificial Sequence
  derived and/or modified protein sequence (opt4) from LASV(ISTH2016-NIG-2012;Clade II)__AIT17486__GPCstabilized
augggccagaucaucaccuucuuccaggaggugccccacgugaucgaggaggugaugaacaucgugcugaucgcccugagccugcuggccauccugaagggcaucuacaacguggccaccugcggccuguucggccuggugagcuuccugcugcugugcggcagaagcugcagcaccaccuacaagggcguguacgagcugcagacccuggagcuggacauggccagccugaacaugaccaugccccugagcugcaccaagaacaacagccaccacuacaucauggugggcaacgagaccggccuggagcugacccugaccaacaccagcaucaucaaccacaaguucugcaaccugagcgacgcccacaagaagaaccuguacgaccacgcccugaugagcaucaucagcaccuuccaccugagcauccccaacuucaaccaguacgaggccaugagcugcgacuucaacggcggcaagaucagcgugcaguacaaccugagccacaccuacgccguggacgccgccaaccacugcggcaccaucgccaacggcgugcugcagaccuucaugagaauggccuggggcggcagcuacaucgcccuggacagcggcugcggcagcugggacugcaucaugaccagcuaccaguaccugaucauccagaacaccaccugggaggaccacugccaguucagcagacccagccccgugggcuaccugggccugcugagccagagaaccagagacaucuacaucagcagaagacgccggggcaccuucaccuggacccugagcgacagcgagggcaacgagacccccggcggcuacugccugaccagauggaugcugaucgaggccgagcugaagugcuucggcaacaccgccguggccaagugcaacgagaagcacgacgaggaguucugcgacaugcugagacuguucgacuucaacaagcaggccaucagaagacugaagacccccgcccagaugagcauccagcugaucaacaaggccgugaacgcccugaucaacgaccagcugaucaugaagaaccaccugagagacaucaugugcauccccuacugcaacuacagcaaguacugguaccugaaccacaccgugaccggcaagaccagccugcccagaugcuggcuggugagcaacggcagcuaccugaacgagacccacuucagcgacgacaucgagcagcaggccgacaacaugaucaccgagcugcugcagaaggaguacaucgacagacagggcaagaccccccugggccugguggaccuguucguguucagcaccagcuucuaccugaucagcaucuuccugcaccuggugaagauccccacccacagacacgugaucggcaagcccugccccaagccccacagacugaaccacaugggcaucugcagcugcggccuguacaagcaccccggcgugcccgugaaguggaagagauga

SEQ ID NO: 5121 - RNA, 1473 nt, Artificial Sequence
  derived and/or modified protein sequence (opt4) from LASV(ISTH2020-NIG-2012;Clade II)__AIT17490__GPCstabilized
augggccagaucaucaccuucuuccaggaggugccccacgugaucgaggaggugaugaacaucgugcugaucacccugagccugcuggccauccugaagggcaucuacaacguggccaccugcggccuguucggccuggugagcuuccugcugcugugcggcagaagcugcagcaccaccuacaagggcguguacgagcugcagacccuggagcuggacauggccaaccugaacaugaccaugccccugagcugcaccaagaacaacagccaccacuacaucauggugggcaacgagaccggccuggagcugacccugaccaacaccagcaucaucaaccacaaguucugcaaccugagcgacgcccacaagaagaaccuguacgaccacgcccugaugagcaucaucagcaccuuccaccugagcauccccaacuucaaccaguacgaggccaugagcugcgacuucaacggcggcaagaucagcgugcaguacaaccugagccacaccuucgccguggacgccgccaaccacugcggcaccaucgccaacggcgugcugcagaccuucaugagaauggccuggggcggcagcuacaucgcccuggacagcggcugcggcagcugggacugcaucaugaccagcuaccaguaccugaucauccagaacaccaccugggaggaccacugccaguucagcagacccagccccaucggcuaccugggccugcugagccagagaaccagagacaucuacaucagcagaagacgccggggcaccuucaccuggacccugagcgacagcgagggcaacgagacccccggcggcuacugccugaccagauggaugcugaucgaggccgagcugaagugcuucggcaacaccgccguggccaagugcaacgagaagcacgacgaggaguucugcgacaugcugagacuguucgacuucaacaagcaggccaucagaagacugaagacccccgcccagaugagcauccagcugaucaacaaggccgugaacgcccugaucaacgaccagcugaucaugaagaaccaccugagagacaucaugugcauccccuacugcaacuacagcaaguacugguaccugaaccacaccgugaccggcaagaccagccugcccagaugcuggcuggugagcaacggcagcuaccugaacgagacccacuucagcgacgacaucgagcagcaggccgacaacaugaucaccgagcugcugcagaaggaguacauggacagacagggcaagaccccccugggccugguggaccuguucguguucagcaccagcuucuaccugaucagcaucuuccugcaccuggugaagauccccacccacagacacaucaucggcaagcccugccccaagccccacagacugaaccacaugggcaucugcagcugcggccuguacaagcaccccggcgugcccgugaaguggaagagauga

SEQ ID NO: 5122 - RNA, 1473 nt, Artificial Sequence
  derived and/or modified protein sequence (opt4) from LASV(ISTH2025-NIG-2012;Clade II)__AIT17494__GPCstabilized
augggccagaucaucaccuucuuccaggaggugccccacgugaucgaggaggugaugaacaucgugcugaucgcccugagccugcuggccauccugaagggcguguacaacguggccaccugcggccuguucggccuggugagcuuccugcugcugugcggcagaagcugcagcaccaucuacaagggcguguacgagcugcagacccuggagcuggacauggccagccugaacaugaccaugccccugagcugcaccaagaacaacagccaccacuacaucauggugggcaacgagaccggccuggagcugacccugaccaacaccagcaucaucaaccacaaguucugcaaccugagcgacgcccacaagaagaaccuguacgaccacgcccugaugagcaucaucagcaccuuccaccugagcauccccaacuucaaccaguacgaggccaugagcugcgacuucaacggcggcaagaucagcgugcaguacaaccugagccacaccuacgccguggacgccgccaaccacugcggcaccaucgccaacggcgugcugcagaccuucaugagaauggccuggggcggcagcuacaucgcccuggacagcggcugcggcagcugggacugcaucaugaccagcuaccaguaccugaucauccagaacaccagcugggaggaccacugccaguucagcagacccagccccaucggcuaccugggccugcugagccagagaaccagagacaucuacaucagcagaagacgccggggcaccuucaccuggacccugagcgacagcgagggcaacgagacccccggcggcuacugccugaccagauggaugcugaucgaggccgagcugaagugcuucggcaacaccgccguggccaagugcaacgagaagcacgacgaggaguucugcgacaugcugagacuguucgacuucaacaagcaggccaucagaagacugaagacccccgcccagaugagcauccagcugaucaacaaggccgugaacgcccugaucaacgaccagcugaucaugaagaaccaccugagagacaucaugugcauccccuacugcaacuacagcaaguacugguaccugaaccacaccgugaccggcaagaccagccugcccagaugcuggcuggugagcaacggcagcuaccugaacgagacccacuucagcgacgacaucgagcagcaggccgacaacaugaucaccgagcugcugcagaaggaguacaucgacagacagggcaagaccccccugggccugguggaccuguucguguucagcaccagcuucuaccugaucagcaucuuccugcaccuggugaagauccccacccacagacacgugaucggcaagcccugccccaagccccacagacugaaccacaugggcaucugcagcugcggccuguacaagcaccccggcgugcccgugaaguggaagagauga

SEQ ID NO: 5123 - RNA, 1473 nt, Artificial Sequence
  derived and/or modified protein sequence (opt4) from LASV(ISTH2031-NIG-2012;Clade II)__AIT17498__GPCstabilized
augggccagaucaucaccuucuuccaggaggugccccacgugaucgaggaggugaugaacaucgugcugaucgcccugagccugcuggccauccugaagggcaucuacaacguggccaccugcggccuguucggccuggugagcuuccugcugcugugcggcagaagcugcagcaccaccuacaagggcguguacgagcugcagacccuggagcuggacauggccagccugaacaugaccaugccccugagcugcaccaagaacaacagccaccacuacaucauggugggcaacgagaccggccuggagcugacccugaccaacaccagcaucaucaaccacaaguucugcaaccugagcgacgcccacaagaagaaccuguacgaccacgcccugaugagcaucaucagcaccuuccaccugagcauccccaacuucaaccaguacgaggccaugagcugcgacuucaacggcggcaagaucagcgugcaguacaaccugagccacaccuacgccguggacgccgccaaccacugcggcaccaucgccaacggcgugcugcagaccuucaugagaauggccuggggcggcagcuacaucgcccuggacagcggcugcggcaacugggacugcaucaugaccagcuaccaguaccugaucauccagaacaccaccugggaggaccacugccaguucagcagacccagccccaucggcuaccugggccugcugagccagagaaccagagacaucuacaucagcagaagacgccggggcaccuucaccuggacccugagcgacagcgagggcaacgagacccccggcggcuacugccugaccagauggaugcugaucgagaccgagcugaagugcuucggcaacaccgccguggccaagugcaacgagaagcacgacgaggaguucugcgacaugcugagacuguucgacuucaacaagcaggccaucagcagacugagaagccccgcccagaugagcauccagcugaucaacaaggccgugaacgcccugaucaacgaccagcugaucaugaagaaccaccugagagacaucaugugcauccccuacugcaacuacagcaaguacugguaccugaaccacaccgugaccggcaagaccagccugcccaagugcuggcuggugagcaacggcagcuaccugaacgagacccacuucagcgacgacaucgagcagcaggccgacaacaugaucaccgagaugcugcagaaggaguacaucgacagacagggcaagaccccccugggccugguggaccuguucguguucagcaccagcuucuaccugaucagcaucuuccugcaccuggugaagauccccacccacagacacaucaccggcaagcccugccccaagccccacagacugaaccacaugggcaucugcagcugcggccuguacaagcaccccggcgugcccgugaaguggaagagauga

SEQ ID NO: 5124 - RNA, 1473 nt, Artificial Sequence
  derived and/or modified protein sequence (opt4) from LASV(ISTH2037-NIG-2012;Clade II)__AIT17502__GPCstabilized
augggccagaucaucaccuucuuccaggagaucccccacgugaucgaggaggugaugaacaucgugcugaucacccugagccugcuggccauccugaagggcaucuacaacguggccaccugcggccuguucggccuggugagcuuccugcugcugugcggcaagagcugcagcaccaccuacaagggcguguacgagcugcagacccuggagcuggacauggccagccugaacaugaccaugccccugagcugcaccaagaacaacagccaccacuacaucauggugggcaacgagaccggccuggagcugacccugaccaacaccagcaucaucaaccacaaguucugcaaccugagcgacgcccacagaaagaaccuguacgaccacacccugaugagcaucaucagcaccuuccaccugagcauccccaacuucaaccaguacgaggccaugagcugcgacuucaacggcggcaagaucagcgugcaguacaaccugagccacgccuacgccaucgacgccgccacccacugcggcaccaucgccaacggcgugcugcagaccuucaugagaauggccuggggcggcagcuacaucgcccuggacagcggcugcggcggcugggacugcaucaugaccagcuaccaguaccugaucauccagaacaccaccugggaggaccacugccaguucagcagacccagccccaucggcuaccugggccugcugagccagagaaccagagacaucuacaucagcagaagacgccggggcaccuucaccuggacccugagcgacagcgagggcaacgagacccccggcggcuacugccugaccagauggaugcugaucgaggccgagcugaagugcuucggcaacaccgccguggccaagugcaacgagaagcacgacgaggaguucugcgacaugcugagacuguucgacuucaacaagcaggccaucagaagacugaagacccccgcccagaugagcauccagcugaucaacaaggccgugaacgcccugaucaacgaccagcugaucaugagaaaccaccugagagacaucaugugcauccccuacugcaacuacagcaaguacugguaccugaaccacaccgugaccggcaagaccagccugcccaagugcuggcuggugagcaacggcagcuaccugaacgagacccacuucagcgacgacaucgagcagcaggccgacaacaugaucaccgagcugcugcagaaggaguacauggacagacagggcaagaccccccugggccugguggaccuguucguguucagcaccagcuucuaccugaucagcaucuuccugcaccuggugaagauccccacccacagacacgugaucggcaagcccugccccaagccccacagacugaaccacaugggcgugugcagcugcggccuguacaagcaccccggcgugcccgugaaguggaagagauga

SEQ ID NO: 5125 - RNA, 1473 nt, Artificial Sequence
  derived and/or modified protein sequence (opt4) from LASV(ISTH2042-NIG-2012;Clade II)__AIT17506__GPCstabilized
augggccagaucaucaccuucuuccaggaggugccccacgugaucgaggaggugaugaacaucgugcugaucgcccugagccugcuggccauccugaagggcaucuacaacguggccaccugcggccuguucggccuggugagcuuccugcugcugugcggcagaagcugcagcaccaccuacaagggcguguacgagcugcagacccuggagcuggacauggccagccugaacaugaccaugccccugagcugcaccaagaacaacagccaccacuacaucauggugggcaacgagaccggccuggagcugacccugaccaacaccagcaucaucaaccacaaguucugcaaccugagcgacgcccacaagaagaaccuguacgaccacgcccugaugagcaucaucagcaccuuccaccugagcauccccaacuucaaccaguacgaggccaugagcugcgacuucaacggcggcaagaucagcgugcaguacaaccugagccacgccuacgccguggacgccgccgagcacugcggcaccaucgccaacggcgugcugcagaccuucaugagaauggccuggggcggcagcuacaucgcccuggacagcggcugcggcagcugggacugcgugaugaccagcuaccaguaccugaucauccagaacaccaccugggaggaccacugccaguucagcagacccagccccaucggcuaccugggccugcugagccagagaaccagagacaucuacaucagcagaagacgccggggcaccuucaccuggacccugagcgacagcgagggcaacgagacccccggcggcuacugccugaccagauggaugcugaucgaggccgagcugaagugcuucggcaacaccgccguggccaagugcaacgagaagcacgacgaggaguucugcgacaugcugagacuguucgacuucaacaagcaggccaucgagagacugaagacccccgcccagaugagcauccagcugaucaacaaggccgugaacgcccugaucaacgaccagcugaucaugaagaaccaccugagagacaucaugugcauccccuacugcaacuacagcaaguacugguaccugaaccacaccgugaccggcaagaccagccugcccagaugcuggcuggugagcaacggcagcuaccugaacgagacccacuucagcgacgacaucgagcagcaggccgacaacaugaucaccgagaugcugcagaaggaguacaucgacagacagggcaagaccccccugggccugguggaccuguucguguucagcaccagcuucuaccugaucagcaucuuccugcaccuggugaagauccccacccacagacacgugaucggcaagcccugccccaagccccacagacugaaccacaugggcaucugcagcugcggccuguacaagcaccccggcgugcccgugaaguggaagagauga

SEQ ID NO: 5126 - RNA, 1473 nt, Artificial Sequence
  derived and/or modified protein sequence (opt4) from LASV(ISTH2046-NIG-2012;Clade II)__AIT17510__GPCstabilized
augggccagaucaucaccuucuuccaggaggugccccacgugaucgaggaggugaugaacaucgugcugaucgcccugagccugcuggccauccugaagggcaucuacaacguggccaccugcggccuguucggccuggugagcuuccugcugcugugcggcagaagcugcagcaccaccuacaagggcguguacgagcugcagacccuggagcuggacauggccagccugaacaugaccaugccccugagcugcaccaagaacaacagccaccacuacaucauggugggcaacgagaccggccuggagcugacccugaccaacaccagcaucaucaaccacaaguucugcaaccugagcgacgcccacaagaagaaccuguacgaccacgcccugaugagcaucaucagcaccuuccaccugagcauccccaacuucaaccaguacgaggccaugagcugcgacuucaacggcggcaagaucagcgugcaguacaaccugagccacaccuacgccguggacgccgccaaccacugcggcaccaucgccaacggcgugcugcagaccuucaugagaauggccuggggcggcagcuacaucgcccuggacagcggcugcggcagcugggacugcaucaugaccagcuaccaguaccugaucauccagaacaccaccugggaggaccacugccaguucagcagacccagccccaucggcuaccugggccugcugagccagagaaccaaggacaucuacaucagcagaagacgccggggcaccuucaccuggacccugagcgacagcgagggcaacgagacccccggcggcuacugccugaccagauggaugcugaucgaggccgagcugaagugcuucggcaacaccgccguggccaagugcaacgagaagcacgacgaggaguucugcgacaugcugagacuguucgacuucaacaagcaggccaucagaagacugaagacccccgcccagaugagcauccagcugaucaacaaggccgugaacgcccugaucaacgaccagcugaucaugaagaaccaccugagagacaucaugugcauccccuacugcaacuacagcaaguacugguaccugaaccacaccgugaccggcaagaccagccugcccagaugcuggcuggugagcaacggcagcuaccugaacgagacccacuucagcgacgacaucgagcagcaggccgacaacaugaucaccgagcugcugcagaaggaguacaucgacagacagggcaagaccccccugggccugguggaccuguucguguucagcaccagcuucuaccugaucagcaucuuccugcaccuggugaagauccccacccacagacacgugaucggcaagcccugccccaagccccacagacugaaccacaugggcaucugcagcugcggccuguacaagcaccccggcgugcccgugaaguggaagagauga

SEQ ID NO: 5127 - RNA, 1473 nt, Artificial Sequence
  derived and/or modified protein sequence (opt4) from LASV(ISTH2050-NIG-2012;Clade II)__AIT17514__GPCstabilized
augggccagaucaucaccuucuuccaggaggugccccacgugaucgaggaggugaugaacaucgugcugaucgcccugagccugcuggccgugcugaagggcaucuacaacguggccaccugcggccuguucggccuggugagcuuccugcugcugugcggcagaagcugcagcaccaccuacaagggcguguacgagcugcagacccuggagcuggacauggccagccugaacaugaccaugccccugagcugcaccaagaacaacagccaccacuacaucauggugggcaacgagaccggccuggagcugacccugaccaacaccagcaucaucaaccacaaguucugcaaccugagcgacgcccacaagaagaaccuguacgaccacgcccugaugagcaucaucagcaccuuccaccugagcauccccaacuucaaccaguacgaggccaugagcugcgacuucaacggcggcaagaucagcgugcaguacaaccugagccacaccuacgccguggacgccgccaaccacugcggcaccaucgccaacggcgugcugcagaccuucaugagaauggccuggggcggcagcuacaucgcccuggacagcggcugcggcagcugggacugcaucaugaccagcuaccaguaccugaucauccagaacaccaccugggaggaccacugccaguucagcagacccagccccaucggcuaccugggccugcugagccagagaaccagagacaucuacaucagcagaagacgccggggcaccuucaccuggacccugagcgacagcgagggcaacgagacccccggcggcuacugccugaccagauggaugcugaucgaggccgagcugaagugcuucggcaacaccgccguggccaagugcaacgagaagcacgacgaggaguucugcgacaugcugagacuguucgacuucaacaagcaggccaucagaagacugaagacccccgcccagaugagcauccagcugaucaacaaggccgugaacgcccugaucaacgaccagcugaucaugaagaaccaccugagagacaucaugugcauccccuacugcaacuacagcaaguacugguaccugaaccacaccgugaccggcaagaccagccugcccagaugcuggcuggugagcaacggcagcuaccugaacgagacccacuucagcgacgacaucgagcagcaggccgacaacaugaucaccgagcugcugcagaaggaguacaucgacagacagggcaagaccccccugggccugguggaccuguucguguucagcaccagcuucuaccugaucagcaucuuccugcaccuggugaagauccccacccacagacacgugaucggcaagcccugccccaagccccacagacugaaccacaugggcaucugcagcugcggccuguacagacaccccggcgugcccgugaaguggaagagauga

SEQ ID NO: 5128 - RNA, 1473 nt, Artificial Sequence
  derived and/or modified protein sequence (opt4) from LASV(ISTH2057-NIG-2012;Clade II)__AIT17518__GPCstabilized
augggccagaucaucaccuucuuccaggaggugccccacgugaucgaggaggugaugaacaucgugcugaucgcccugagccugcuggccauccugaagggcaucuacaacguggccaccugcggccuguucggccuggugagcuuccugcugcugugcggcagaagcugcagcaccaccuacaagggcguguacgagcugcagacccuggagcuggacauggccagccugaacaugaccaugccccugagcugcaccaagaacaacagccaccacuacaucauggugggcaacgagaccggccuggagcugacccugaccaacaccagcaucaucaaccacaaguucugcaaccugagcgacgcccacaagaagaaccuguacgaccacgcccugaugagcaucaucagcaccuuccaccugagcauccccaacuucaaccaguacgaggccaugagcugcgacuucaacggcggcaagaucagcgugcaguacaaccugagccacgccuacgccguggacgccgccaaccacugcggcaccaucgccaacggcgugcugcagaccuucaugagaauggccuggggcggcagcuacaucgcccuggacagcggcugcggcagcugggacugcaucaugaccagcuaccaguaccugaucauccagaacaccaccugggaggaccacugccaguucagcagacccagccccaucggcuaccugggccugcugagccagagaaccagagacaucuacaucagcagaagacgccggggcaccuucaccuggacccugagcgacagcgagggcaacgagacccccggcggcuacugccugaccagauggaugcugaucgaggccgagcugaagugcuucggcaacaccgccguggccaagugcaacgagaagcacgacgaggaguucugcgacaugcugagacuguucgacuucaacaagcaggccaucagaagacugaagacccccgcccagaugagcauccagcugaucaacaaggccgugaacgcccugaucaacgaccagcugaucaugaagaaccaccugagagacaucaugugcauccccuacugcaacuacagcaaguacugguaccugaaccacaccgugaccggcaagaccagccugcccagaugcuggcuggugagcaacggcagcuaccugaacgagacccacuucagcgacgacaucgagcagcaggccgacaacaugaucaccgagcugcugcagaaggaguacauggacagacagggcaagaccccccugggccugguggaccuguucguguucagcaccagcuucuaccugaucagcaucuuccugcaccuggugaagauccccacccacagacacgugaucggcaagcccugccccaagccccacagacugaaccacaugggcaucugcagcugcggccuguacaagcaccccggcgugcccgugaaguggaagagauga

SEQ ID NO: 5129 - RNA, 1473 nt, Artificial Sequence
  derived and/or modified protein sequence (opt4) from LASV(ISTH2064-NIG-2012;Clade II)__AIT17524__GPCstabilized
augggccagaucaucaccuucuuccaggaggugccccacgugaucgaggaggugaugaacaucgugcugaucgcccugagccugcuggccauccugaagggcaucuacaacguggccaccugcggccuguucggccuggugagcuuccugcugcugugcggcagaagcugcagcaccaccuacaagggcguguacgagcugcagacccuggagcuggacauggccagccugaacaugaccaugccccugagcugcaccaagaacaacagccaccacuacaucauggugggcaacgagaccggccuggagcugacccugaccaacaccagcaucaucaaccacaaguucugcaaccugagcgacgcccacaagaagaaccuguacgaccacgcccugaugagcaucaucagcaccuuccaccugagcauccccaacuucaaccaguacgaggccaugagcugcgacuucaacggcggcaagaucagcgugcaguacaaccugagccacaccuacgccaucgacgccgccaaccacugcggcaccaucgccaacggcgugcugcagaccuucaugagaauggccuggggcggcagcuacaucgcccuggacagcggcugcggcagcugggacugcaucaugaccagcuaccaguaccugaucauccagaacaccaccugggaggaccacugccaguucagcagacccagccccaucggcuaccugggccugcugagccagagaaccagagacaucuacaucagcagaagacgccggggcaccuucaccuggacccugagcgacagcgagggcaacgagacccccggcggcuacugccugaccagauggaugcugaucgaggccgagcugaagugcuucggcaacaccgccguggccaagugcaacgagaagcacgacgaggaguucugcgacaugcugagacuguucgacuucaacaagcaggccaucagaagacugaagacccccgcccagaugagcauccagcugaucaacaaggccgugaacgcccugaucaacgaccagcugaucaugaagaaccaccugagagacaucaugugcauccccuacugcaacuacagcaaguacugguaccugaaccacaccgugaccggcaagaccagccugcccagaugcuggcuggugagcaacggcagcuaccugaacgagacccacuucagcgacgacaucgagcagcaggccgacaacaugaucaccgagaugcugcagaaggaguacauggacagacagggcaagaccccccugggccugguggaccuguucguguucagcaccagcuucuaccugaucagcaucuuccugcaccuggugaagauccccacccacagacacgugaucggcaagcccugccccaagccccacagacugaaccacaugggcaucugcagcugcggccuguacaagcaccccggcgugcccgugaaguggaagagauga

SEQ ID NO: 5130 - RNA, 1473 nt, Artificial Sequence
  derived and/or modified protein sequence (opt4) from LASV(ISTH2065-NIG-2012;Clade II)__AIT17528__GPCstabilized
augggccagaucaucaccuucuuccaggaggugccccacgugaucgaggaggugaugaacaucgugcugaucgcccugagccugcuggccaugcugaagggcaucuacaacaucgccaccugcggccuguucggccugaucagcuuccugcugcugugcggcagaagcugcagcaccaccuacaagggcguguacgagcugcaggcccuggagcuggacauggccaaccugaacaugaccaugccccugagcugcaccaagaacaacagccaccacuacaucauggugggcaacgagaccggccuggagcugacccugaccaacaccagcaucaucaaccacaaguucugcaaccugagcgacgcccacaagaagaaccuguacgaccacgcccugaugagcaucaucagcaccuuccaccugagcauccccaacuucaaccaguacgaggccaugagcugcgacuucaacggcggcaagaucagcgugcaguacaaccugagccacaccuacgccggcgacgccgccaagcacugcggcaccaucgccaacggcgugcugcagaccuucaugagaauggccuggggcggcagcuacaucgcccuggacagcggcugcggcaacugggacugcaucaugaccagcuaccaguaccugaucauccagaacaccaccugggaggaccacugccaguucagcagacccagccccaucggcuaccugggccugcugagccagagaaccagagacaucuacaucagcagaagacgccggggcaccuucaccuggacccugagcgacagcgagggcaacgagacccccggcggcuacugccugaccagauggaugcugaucgaggccgagcugaagugcuucggcaacaccgccguggccaagugcaacgagaagcacgacgaggaguucugcgacaugcugagacuguucgacuucaacaagcaggccaucagaagacugaagacccccgcccagaugagcauccagcugaucaacaaggccgugaacgcccugaucaacgaccagcugaucaugaagaaccaccugagagacaucaugugcauccccuacugcaacuacagcaaguacugguaccugaaccacagcgugaccggcagaaccagccugcccagaugcuggcuggugagcaacggcagcuaccugaacgagacccaguucagcgacgacaucgagcagcaggccgacaacaugaucaccgagaugcugcagaaggaguacaucgacagacagggcaagaccccccugggccugguggaccuguucguguucagcaccagcuucuaccugaucagcaucuuccugcaccugaucaagauccccacccacagacacaucgugggcaagcccugccccaagccccacagacugaaccacaugggcaucugcagcugcggccuguacaagcaccccggcauccccgugaaguggaagagauga

SEQ ID NO: 5131 - RNA, 1473 nt, Artificial Sequence
  derived and/or modified protein sequence (opt4) from LASV(ISTH2094-NIG-2012;Clade II)__AIT17538__GPCstabilized
augggccagaucaucaccuucuuccaggaggugccccacgugaucgaggaggugaugaacaucgugcugaucgcccugagccugcuggccauccugaagggcaucuacaacaucgccaccugcggccuguucggccugaucagcuuccugcugcugugcggcagaagcugcagcaccaccuacaagggcguguacgagcugcagacccuggagcuggacauggccaaccugaacaugaccaugccccugagcugcaccaagaacaacagccaccacuacaucauggugggcaacgagaccggccuggagcugacccugaccaacaccagcaucaucaaccacaaguucugcaaccugagcgacgcccacaagaagaaccuguacgaccacgcccugaugagcaucaucagcaccuuccaccugagcauccccaacuucaaccaguacgaggccaugagcugcgacuucaacgagggcaagaucagcgugcaguacaaccugagccacagcuacgccaucgacgccgccggccacugcggcaccaucgccaacggcgugcugcagaccuucaugagaauggccuggggcggcagcuacaucgcccuggacagcggcugcggcaacugggacugcaucaugaccagcuaccaguaccugaucauccagaacaccaccugggaggaccacugccaguucagcagacccagccccaucggcuaccugggccugcugagccagagaaccagagacaucuacaucagcagaagacgccggggcaccuucaccuggacccugagcgacagcgagggcaacgaggcccccggcggcuacugccugaccagauggaugcugaucgaggccgagcugaagugcuucggcaacaccgccaucgccaagugcaacgagaagcacgacgaggaguucugcgacaugcugagacuguucgacuucaacaagcaggccaucaagagacugaaggcccccgcccagaugagcauccaccugaucaacaaggccgugaacgcccugaucaacgaccagcugaucaugaagaaccaccugagagacaucaugugcauccccuacugcaacuacagcaaguacugguaccugaaccacaccgugaccggcaagaccagccugcccaagugcuggcuggugagcaacggcagcuaccugaacgagacccacuucagcgacgacaucgagcagcaggccgacaacaugaucaccgagcugcugcagaaggaguacauggacagacagggcaagaccccccugggccugguggaccuguucguguucagcaccagcuucuaccugaucagcaucuuccugcaccuggugaagauccccacccacagacacaucgugggcagacccugccccaagccccacagacugaaccacaugggcaucugcagcugcggccuguacaagcaccccggcgugcccgugaaguggaagagauga

SEQ ID NO: 5132 - RNA, 1473 nt, Artificial Sequence
  derived and/or modified protein sequence (opt4) from LASV(ISTH2129-NIG-2012;Clade II)__AIT17544__GPCstabilized
augggccagaucaucaccuucuuccaggaggugccccacgugaucgaggaggugaugaacaucgugcugaucgcccugagccugcuggccauccugaagggcaucuacaacguggccaccugcggccuguucggccuggugagcuuccugcugcugugcggcagaagcugcagcaccaccuacaagggcguguacgagcugcagacccuggagcuggacaugggcagccugaacaugaccaugccccugagcugcaccaagaacaacagccaccacuacaucauggugggcaacgagaccggccuggagcugacccugaccaacaccagcaucaucaaccacaaguucugcaaccugagcgacgcccacaagaagaaccuguacgaccacgcccugaugagcaucaucagcaccuuccaccugagcauccccaacuucaaccaguacgaggccaugagcugcgacuucaacggcggcaagaucagcgugcaguacaaccugagccacagcuacgccguggacgccgccaaccacugcggcaccaucgccaacggcgugcugcagaccuucaugagaauggccuggggcggcagcuacaucgcccuggacagcggcugcggcagcugggacugcaucaugaccagcuaccaguaccugaucauccagaacaccaccugggaggaccacugccaguucagcagacccagccccaucggcuaccugggccugcugagccagagaaccagagacaucuacaucagcagaagacgccggggcaccuucaccuggacccugagcgacagcgagggcaacgagacccccggcggcuacugccugaccagauggaugcugaucgaggccgagcugaagugcuucggcaacaccgccguggccaagugcaacgagaagcacgacgaggaguucugcgacaugcugagacuguucgacuucaacaagcaggccaucagaagacugaagacccccgcccagaugagcauccagcugaucaacaaggccgugaacgcccugaucaacgaccagcugaucaugaagaaccaccugagagacaucaugugcauccccuacugcaacuacagcaaguacugguaccugaaccacaccgugaccggcaagaccagccugcccagaugcuggcuggugagcaacggcagcuaccugaacgagacccacuucagcgacgacaucgagcagcaggccgacaacaugaucaccgagcugcugcagaaggaguacauggacagacagggcaagaccccccugggccugguggaccuguucguguucagcaccagcuucuaccugaucagcaucuuccugcaccuggugaagauccccacccacagacacaucaucggcaagcccugccccaagccccacagacugaaccacaugggcaucugcagcugcggccuguacaagcaccccggcgugcccgugaaguggaagagauga

SEQ ID NO: 5133 - RNA, 1473 nt, Artificial Sequence
  derived and/or modified protein sequence (opt4) from LASV(ISTH2217-NIG-2012;Clade II)__AIT17548__GPCstabilized
augggccagaucaucaccuucuuccaggaggugccccacgugaucgaggaggugaugaacaucgugcugaucgcccugagccugcuggccauccugaagggcaucuacaacguggccaccugcggccuguucggccuggugagcuuccuguuccugugcggcagaagcugcagcaccaccuacaagggcguguacgagcugcagacccuggagcuggacauggccagccugaacaugaccaugccccugagcugcaccaagaacaacagccaccacuacaucauggugggcaacgagaccggccuggagcugacccugaccaacaccagcaucaucaaccacaaguucugcaaccugagcgacgcccacaagagaaaccuguacgaccacgcccugaugagcaucaucagcaccuuccaccugagcauccccaacuucaaccaguacgaggccaugagcugcgacuucaacggcggcaagaucagcgugcaguacaaccugagccacgccuacgccggcgacgccgccaagcacugcggcaccaucgccaacggcgugcugcagaccuucaugagaauggccuggggcggcagcuacaucgcccuggacagcggcugcggcagcugggacugcaucaugaccagcuaccaguaccugaucauccagaacaccaccugggaggaccacugccaguucagcagacccagccccaucggcuaccugggccugcugagccagagaaccagagacaucuacaucagcagaagacgccggggcaccuucaccuggacccugagcgacagcgagggcaacgagacccccggcggcuacugccugaccagauggaugcugaucgaggccgagcugaagugcuucggcaacaccgccguggccaagugcaacgagaagcacgacgaggaguucugcgacaugcugagacuguucgacuucaacaagcaggccaucagaagacugagaacccccgcccagaugagcauccagcugaucaacaaggccgugaacgcccugaucaacgaccagcugaucaugaagaaccaccugagagacaucaugugcauccccuacugcaacuacagcaaguacugguaccugaaccacaccgugaccggcaagaccagccugcccaagugcuggcuggugagcaacggcagcuaccugaacgagacccacuucagcgacgacaucgagcagcaggccgacaacaugaucaccgagaugcugcagaaggaguacaucgacagacagggcaagaccccccugggccugguggaccuguucguguucagcaccagcuucuaccugaucagcaucuuccugcaccuggugaagauccccacccacagacacgugaucggcaagcccugccccaagccccacagacugaaccacaugggcaucugcagcugcggccuguacaagcaccccggcgugcccgugaaguggaagagauga

SEQ ID NO: 5134 - RNA, 1473 nt, Artificial Sequence
  derived and/or modified protein sequence (opt4) from LASV(ISTH2271-NIG-2012;Clade II)__AIT17552__GPCstabilized
augggccagaucaucaccuucuuccaggaggugccccacgugaucgaggaggugaugaacaucgugcugaucgcccugagccugcuggccauccugaagggcaucuacaacguggccaccugcggccuguucggccuggugagcuuccugcugcugugcggcagaagcugcagcaccaccuacaagggcguguacgagcugcagacccuggagcuggacauggccagccugaacaugaccaugccccugagcugcaccaagaacaacagccaccacuacaucauggugggcaacgagaccggccuggagcugacccugaccaacaccagcaucaucaaccacaaguucugcaaccugagcgacgcccacaagaagaaccuguacgaccacgcccugaugagcaucaucagcaccuuccaccugagcauccccaacuucaaccaguacgaggccaugagcugcgacuucaacggcggcaagaucagcgugcaguacaaccugagccacgccuacgccgugaacgccgccaaccacugcggcaccaucgccaacggcgugcugcagaccuucaugagaauggccuggggcggcagcuacaucgcccuggacagcggcugcggcagcugggacugcaucaugaccagcuaccaguaccugaucauccagaacaccaccugggaggaccacugccaguucagcagacccagccccaucggcuaccugggccugcugagccagagaaccagagacaucuacaucagcagaagacgccggggcaccuucaccuggacccugagcgacagcgagggcaacgagacccccggcggcuacugccugaccagauggaugcugaucgaggccgagcugaagugcuucggcaacaccgccguggccaagugcaacgagaagcacgacgaggaguucugcgacaugcugagacuguucgacuucaacaagcaggccaucagaagacugaagacccccgcccagaugagcauccagcugaucaacaaggccgugaacgcccugaucaacgaccagcugaucaugaagaaccaccugagagacaucaugugcauccccuacugcaacuacagcaaguacugguaccugaaccacaccgugaccggcaagaccagccugcccagaugcuggcuggugagcaacggcagcuaccugaacgagacccacuucagcgacgacaucgagcagcaggccgacaacaugaucaccgagcugcugcagaaggaguacauggacagacagggcaagaccccccugggccugguggaccuguucguguucagcaccagcuucuaccugaucagcaucuuccugcaccuggugaagauccccacccacagacacgugaucggcaagcccugccccaagccccacagacugaaccacaugggcaucugcagcugcggccuguacaagcaccccggcgugcccgugaaguggaagaaguga

SEQ ID NO: 5135 - RNA, 1473 nt, Artificial Sequence
  derived and/or modified protein sequence (opt4) from LASV(ISTH2304-NIG-2012;Clade II)__AIT17556__GPCstabilized
augggccagaucaucaccuucuuccaggaggugccccacgugaucgaggaggugaugaacaucgugcugaucgcccugagccugcuggccauccugaagggcaucuacaacguggccaccugcggccuguucggccuggugagcuuccugcugcugugcggcagaagcugcagcaccaccuacaagggcguguacgagcugcagacccuggagcuggacauggccagccugaacaugaccaugccccugagcugcaccaagaacaacagccaccacuacaucauggugggcaacgagaccggccuggagcugacccugaccaacaccagcaucaucaaccacaaguucugcaaccugagcgacgcccacaagaagaaccuguacgaccacgcccugaugagcaucaucagcaccuuccaccugagcauccccaacuucaaccaguacgaggccaugagcugcgacuucaacggcggcaagaucagcgugcaguacaaccugagccacaccuacgccguggacgccgccaaccacugcggcaccaucgccaacggcgugcugcagaccuucaugagaauggccuggggcggcagcuacaucgcccuggacagcggcugcggcagcugggacugcaucaugaccagcuaccaguaccugaucauccagaacaccaccugggaggaccacugccaguucagcagacccagccccaucggcuaccugggccugcugagccagagaaccagagacaucuacaucagcagaagacgccggggcaccuucaccuggacccugagcgacagcgagggcaacgagacccccggcggcuacugccugaccagauggaugcugaucgaggccgagcugaagugcuucggcaacaccgccguggccaagugcaacgagaagcacgacgaggaguucugcgacaugcugagacuguucgacuucaacaagcaggccaucagaagacugaagacccccgcccagaugagcauccagcugaucaacaaggccgugaacgcccugaucaacgaccagcugaucaugaagaaccaccugagagacaucaugugcauccccuacugcaacuacagcaaguacugguaccugaaccacaccaucaccggcaagaccagccugcccagaugcuggcuggugagcaacggcagcuaccugaacgagacccacuucagcgacgacaucgagcagcaggccgacaacaugaucaccgagcugcugcagaaggaguacaucgacagacagggcaagaccccccugggccugguggaccuguucguguucagcaccagcuucuaccugaucagcaucuuccugcaccuggugaagauccccacccacagacacaucaccggcaagcccugccccaagccccacagacugaaccacaugggcaucugcagcugcggccuguacaagcaccccggcgugcccgugagauggaagagauga

SEQ ID NO: 5136 - RNA, 1473 nt, Artificial Sequence
  derived and/or modified protein sequence (opt4) from LASV(ISTH2312-NIG-2012;Clade II)__AIT17560__GPCstabilized
augggccagaucaucaccuucuuccaggaggugccccacgugaucgaggaggugaugaacaucgugcugaucgcccugagccugcuggccgugcugaagggcaucuacaacguggccaccugcggccuguucggccuggugagcuuccugcugcugugcggcagaagcugcagcaccaccuacaagggcguguacgagcugcagacccuggagcuggacauggccagccugaacaugaccaugccccugagcugcaccaccaacaacagccaccacuacaucauggugggcaacgagaccggccuggagcugacccugaccaacaccagcaucaucaaccacaaguucugcaaccugagcgacgcccacaagaagaaccuguacgaccacgcccugaugagcaucaucagcaccuuccaccugagcauccccaacuucaaccaguacgaggccaugagcugcgacuucaacggcggcaagaucagcgugcaguacaaccugagccacgccuacgccggcgaggccgccaaccacugcggcaccaucgccaacggcgugcugcagaccuucaugagaauggccuggggcggcagcuacaucgcccuggacagcggcugcggcagcugggacugcaucaugaccagcuacaaguaccugaucauccagaacaccaccuggggcgaccacugccaguucagcagacccagccccaucggcuaccugggccugcugagccagagaaccagagacaucuacaucagcagaagacgccggggcaccuucaccuggacccugagcgacagcgagggcaacgagacccccggcggcuacugccugaccagauggaugcugaucgaggccgagcugaagugcuucggcaacaccgccguggccaagugcaacgagaagcacgacgaggaguucugcgacaugcugagacuguucgacuucaacaagcaggccaucagaaagcugaagacccccgcccagaugagcauccagcugaucaacaaggccgugaacgcccugaucaacgaccagcugaucaugaagaaccaccugagagacaucaugugcauccccuacugcaacuacagcagauacugguaccugaaccacaccgugaccggcagaaccagccugcccagaugcuggcuggugagcaacggcagcuaccugaacgagacccacuucagcgacgacaucgagcagcaggccgacaacaugaucaccgagcugcugcagaaggaguacaucgacagacagggcaagaccccccugggccugguggaccuguucguguucagcaccagcuucuaccugaucagcaucuuccugcaccuggugaagauccccacccacagacacaucaucggcaagcccugccccaagccccacagacugaaccacaugggcaucugcagcugcggccuguacaagcaccccggcgugcccgugaaguggaagagauga

SEQ ID NO: 5137 - RNA, 1473 nt, Artificial Sequence
  derived and/or modified protein sequence (opt4) from LASV(ISTH2316-NIG-2012;Clade II)__AIT17564__GPCstabilized
augggccagaucaucaccuucuuccaggaggugccccacgugaucgaggaggugaugaacaucgugcugaucgcccugagccugcuggccauccugaagggcaucuacaacguggccaccugcggccuguucggccugcugagcuuccugcugcugugcggcagaagcugcagcaccaccuacaagggcguguacgagcugcagacccuggagcuggacauggccagccugaacaugaccaugccccugagcugcaccaagaacaacagccaccacuacaucauggugggcaacgagaccggccuggagcugacccugaccaacaccagcaucaucaaccacaaguucugcaaccugagcgacgcccacaagaaggaccuguacgaccacgcccugaugagcaucaucagcaccuuccaccugagcauccccaacuucaaccaguacgaggccaugagcugcgacuucaacggcggcaagaucagcgugcaguacaaccugagccacgccuacgccguggacgccgccaagcacugcggcaccaucgccaacggcgugcugcagaccuucaugagaauggccuggggcggcagcuacaucgcccuggacagcggcugcggcagcugggacugcaucaugaccagcuaccaguaccugaucauccagaacaccagcugggaggaccacugccaguucagcagacccagccccaucggcuaccugggccugcugagccagagaaccagagacaucuacaucagcagaagacgccggggcaccuucaccuggacccugagcgacagcgagggcaacgagacccccggcggcuacugccugaccagauggaugcugaucgaggccgagcugaagugcuucggcaacaccgccguggccaagugcaacgagaagcacgacgaggaguucugcgacaugcugagacuguucgacuucaacaagcaggccaucaagagacugaagacccccgcccagaugagcauccagcugaucaacaaggccgugaacgcccugaucaacgaccagcugaucaugaagaaccaccugagagacaucaugugcauccccuacugcaacuacagcaaguacugguaccugaaccacaccgugaccggcaagaccagccugcccagaugcuggcuggugagcaacggcagcuaccugaacgagacccacuucagcgacgacaucgagcagcaggccgacaacaugaucaccgagcugcugcagaaggaguacaucgacagacagggcaagaccccccugggccugguggaccuguucguguucagcaccagcuucuaccugaucagcaucuuccugcaccuggugaagauccccacccacagacacgugaucggcaagcccugccccaagccccacagacugaaccacaugggcaucugcagcugcggccuguacaagcaccccggcgugcccgugaaguggaagagauga

SEQ ID NO: 5138 - RNA, 1473 nt, Artificial Sequence
  derived and/or modified protein sequence (opt4) from LASV(ISTH2358-NIG-2012;Clade II)__AIT17572__GPCstabilized
augggccagaucaucaccuucuuccaggaggugccccacgugaucgaggaggugaugaacaucgugcugaucgcccugagccugcuggccauccugaagggcaucuacaacguggccaccugcggccuguucggccuggugagcuuccugcugcugugcggcagaagcugcagcaccaccuacaagggcguguacgagcugcagacccuggagcuggacauggccaaccugaacaugaccaugccccugagcugcaccaagaacaacagccaccacuacaucauggugggcaacgagaccggccuggagcugacccugaccaacaccagcaucaucaaccacaaguucugcaaccugagcgacgcccacaagaagaaccuguacgaccacgcccugaugagcaucaucagcaccuuccaccugagcauccccaacuucaaccaguacgaggccaugagcugcgacuucaacggcggcaagaucagcgugcaguacaaccugagccacaacuacgccguggacgccgccaaccacugcggcaccaucgccaacggcgugcugcagaccuucaugagaauggccuggggcggcagcuacaucgcccuggacagcggcugcggcaacugggacugcaucaugaccagcuaccaguaccugaucauccagaacaccaccugggaggaccacugccaguucagcagacccagccccaucggcuaccugggccugcugagccagagaaccagagacaucuacaucagcagaagacgccggggcaccuucaccuggacccugagcgacagcgagggcaacgacaugcccggcggcuacugccugaccagauggaugcugaucgaggccgagcugaagugcuucggcaacaccgccguggccaagugcaacgagaagcacgacgaggaguucugcgacaugcugagacuguucgacuucaacaagcaggccaucagaagacugaagacccccgcccagaugaacauccagcugaucaacaaggccgugaacgcccugaucaacgaccagcugaucaugaagaaccaccugagagacaucaugugcauccccuacugcaacuacagcaaguacugguaccugaaccacaccgugaccggcaagaccagccugcccagaugcuggcuggugagcaacggcagcuaccugaacgagacccacuucagcgacgacaucgagcagcaggccgacaacaugaucaccgagcugcugcagaaggaguacauggacagacagggcaagaccccccugggccugguggaccuguucguguucagcaccagcuucuaccugaucagcaucuuccugcaccuggugaagauccccacccacagacacaucaucggcaagcccugccccaagccccacagacugaaccacaugggcaucugcagcugcggccuguacaagcaccccggcgugcccgugaaguggaagagauga

SEQ ID NO: 5139 - RNA, 1473 nt, Artificial Sequence
  derived and/or modified protein sequence (opt4) from LASV(ISTH2376-NIG-2012;Clade II)__AIT17576__GPCstabilized
augggccagaucaucaccuucuuccaggaggugccccacgugaucgaggaggugaugaacaucgugcugaucgcccugagccugcuggccauccugaagggcaucuacaacguggccaccugcggccuguucggccuggugagcuuccugcugcugugcggcagaagcugcagcaccaccuacaagggcguguacgagcugcagacccuggagcuggacauggccagccugaacaugaccaugccccugagcugcaccaagaacaacagccaccacuacaucauggugggcaacgagaccggccuggagcugacccugaccaacaccagcaucaucaaccacaaguucugcaaccugagcgacgcccacaagaagaaccuguacgaccacgcccugaugagcaucaucagcaccuuccaccugagcauccccaacuucaaccaguacgaggccaugagcugcgacuucaacggcggcaagaucagcgugcaguacaaccugagccacaccuacgccguggacgccgccaaccacugcggcaccaucgccaacggcgugcugcagaccuucaugagaauggccuggggcggcagcuacaucgcccuggacagcggcugcggcaacugggacugcaucaugaccagcuaccaguaccugaucauccagaacaccaccugggaggaccacugccaguucagcagacccagccccaucggcuaccugggccugcugagccagagaaccagagacaucuacaucagcagaagacgccggggcaccuucaccuggacccugagcgacagcgagggcaacgagacccccggcggcuacugccugaccagauggaugcugaucgaggccgagcugaagugcuucggcaacaccgccguggccaagugcaacgagaagcacgacgaggaguucugcgacaugcugagacuguucgacuucaacaagcaggccaucagcagacugaagacccccgcccagaugagcauccagcugaucaacaaggccgugaacgcccugaucaacgaccagcugaucaugaagaaccaccugagagacaucaugugcauccccuacugcaacuacagcaaguacugguaccugaaccacaccgugaccggcaagaccagccugcccagaugcuggcuggugagcaacggcagcuaccugaacgagacccacuucagcgacgacaucgagcagcaggccgacaacaugaucaccgagaugcugcagaaggaguacaucgacagacagggcaagaccccccugggccugguggaccuguucguguucagcaccagcuucuaccugaucagcaucuuccugcaccuggugaagauccccacccacagacacaucaccggcaagcccugccccaagccccacagacugaaccacaugggcaucugcagcugcggccuguacaagcaccccggcgugcccgugaaguggaagagauga

SEQ ID NO: 5140 - RNA, 1473 nt, Artificial Sequence
  derived and/or modified protein sequence (opt4) from LASV(Lassa virus/H.sapiens-wt/NGA/2015/ISTH_0543;Clade II)__AVO03639__GPCstabilized
augggccagaucaucaccuucuuccaggaggugccccacgugaucgaggaggugaugaacaucgugcugaucgcccugagccugcuggccauccugaagggcaucuacaacguggccaccugcggccuguucggccuggugagcuuccugcugcugugcggcagaagcugcagcaccaccuacaagggcguguacgagcugcagacccuggagcuggacauggccaaccugaacaugaccaugccccugagcugcaccaagaacaacagccaccacuacaucauggugggcaacgagaccggccuggagcugacccugaccaacaccagcaucaucaaccacaaguucugcaaccugagcgacgcccacaagaagaaccuguacgaccacgcccugaugagcaucaucagcaccuuccaccugagcauccccaacuucaaccaguacgaggccaugagcugcgacuucaacggcggcaagaucagcgugcaguacaaccugagccacaccuacgccguggacgccgccaaccacugcggcaccaucgccaacggcgugcugcagaccuucaugagaauggccuggggcggcagcuacaucgcccuggacagcggcugcggcagcugggacugcaucaugaccagcuaccaguaccuggugauccagaacaccaccugggaggaccacugccaguucagcagacccagccccaucggcuaccugggccugcugagccagagaaccagagacaucuacaucagcagaagacgccggggcaccuucaccuggacccugagcgacagcgagggcaacgagacccccggcggcuacugccugaccagauggaugcugaucgaggccgagcugaagugcuucggcaacaccgccguggccaagugcaacgagaagcacgacgaggaguucugcgacaugcugagacuguucgacuucaacaagcaggccaucagaagacugaagacccccgcccagaugagcauccagcugaucaacaaggccgugaacgcccugaucaacgaccagcugaucaugaagaaccaccugagagacaucaugugcauccccuacugcaacuacagcaaguacugguaccugaaccacaccgugaccggcaagaccagccugcccagaugcuggcuggugagcaacggcagcuaccugaacgagacccacuucagcgacgacaucgagcagcaggccgacaacaugaucaccgagcugcugcagaaggaguacaucgacagacagggcaagaccccccugggccugguggaccuguucguguucagcaccagcuucuaccugaucagcaucuuccugcaccuggugaagauccccacccacagacacaucaccggcaagcccugccccaagccccacagacugaaccacaugggcaucugcagcugcggccuguacaagcaccccggcgugcccgugaaguggaagagauga

SEQ ID NO: 5141 - RNA, 1473 nt, Artificial Sequence
  derived and/or modified protein sequence (opt4) from LASV(Lassa virus/H.sapiens-wt/NGA/2015/ISTH_0547;Clade II)__AVO03583__GPCstabilized
augggccagaucaucaccuucuuccaggaggugccccacgugaucgaggaggugaugaacaucgugcugaucgcccugagccugcuggccauccugaagggcaucuacaacguggccaccugcggccuguucggccuggugagcuuccugcugcugugcggcagaagcugcagcaccaccuacaagggcguguacgagcugcagacccuggagcuggacauggccagccugaacaugaccaugccccugagcugcaccaagaacaacagccaccacuacaucauggugggcaacgagaccggccuggagcugacccugaccaacaccagcaucaucaaccacaaguucugcaaccugagcgacgcccacaagaagaaccuguacgaccacgcccugaugagcaucaucagcaccuuccaccugagcauccccaacuucaaccaguacgaggccaugagcugcgacuucaacggcggcaagaucagcgugcaguacaaccugagccacaccuacgccguggacgccgccaaccacugcggcaccaucgccaacggcgugcugcagaccuucaugagaauggccuggggcggcagcuacaucgcccuggacagcggcugcggcagcugggacugcaucaugaccagcuaccaguaccugaucauccagaacaccaccugggaggaccacugccaguucagcagacccagccccaucggcuaccugggccugcugagccagagaaccagagacaucuacaucagcagaagacgccggggcaccuucaccuggacccugagcgacagcgagggcaacgagacccccggcggcuacugccugaccagauggaugcugaucgaggccgagcugaagugcuucggcaacaccgccguggccaagugcaacgagaagcacgacgaggaguucugcgacaugcugagacuguucgacuucaacaagcaggccaucagaagacugaagacccccgcccagaugagcauccagcugaucaacaaggccgugaacgcccugaucaacgaccagcugaucaugaagaaccaccugagagacaucaugugcauccccuacugcaacuacagcaaguacugguaccugaaccacaccgugaccggcaagaccagccugcccagaugcuggcuggugagcaacggcagcuaccugaacgagacccacuucagcgacgacaucgagcagcaggccgacaacaugaucaccgagcugcugcagaaggaguacaucgagagacagggcaagaccccccugggccugguggaccuguucguguucagcaccagcuucuaccugaucagcaucuuccugcaccuggugaagauccccacccacagacacaucaccggcaagcccugccccaagccccacagacugaaccacaugggcaucugcagcugcggccuguacaagcaccccggcgugcccgugaaguggaagagauga

SEQ ID NO: 5142 - RNA, 1473 nt, Artificial Sequence
  derived and/or modified protein sequence (opt4) from LASV(Lassa virus/H.sapiens-wt/NGA/2015/ISTH_0574;Clade II)__AVO03657__GPCstabilized
augggccagaucaucaccuucuuccaggaggugccccacgugaucgaggaggugaugaacaucgugcugaucgcccugagccugcuggccauccugaagggcaucuacaacguggccaccugcggccuguucggccugguggccuuccugcugcugugcggcagaagcugcagcaccaccuacaagggcguguacgagcugcagacccuggagcuggacauggccagccugaacaugaccaugccccugagcugcaccaagaacaacagccaccacuacaucauggugggcaacgagaccggccuggagcugacccugaccaacaccagcaucaucaaccacaaguucugcaaccugagcgacgcccacaagaagaaccuguacgaccacgcccugaugagcaucaucagcaccuuccaccugagcauccccaacuucaaccaguacgaggccaugagcugcgacuucaacggcggcaagaucagcgugcaguacaaccugagccacaccuacgccguggacgccgccaaccacugcggcaccaucaccaacggcgugcugcagaccuucaugagaauggccuggggcggcagcuacaucgcccuggacagcggcugcggcagcugggacugcaucaugaccagcuaccaguaccugaucauccagaacaccaccugggaggaccacugccaguucagcagacccagccccaucggcuaccugggccugcugagccagagaaccagagacaucuacaucagcagaagacgccggggcaccuucaccuggacccugagcgacagcgagggcaacgagacccccggcggcuacugccugaccagauggaugcugaucgaggccgagcugaagugcuucggcaacaccgccguggccaagugcaacgagaagcacgacgaggaguucugcgacaugcugagacuguucgacuucaacaagcaggccaucagaagacugaagacccccgcccagaugagcauccagcugaucaacaaggccgugaacgcccugaucaacgaccagcugaucaugaagaaccaccugagagacaucaugugcauccccuacugcaacuacagcaaguacugguaccugaaccacaccgugaccggcagaaccagccugcccagaugcuggcuggugagcaacggcagcuaccugaacgagacccacuucagcgacgacaucgagcagcaggccgacaacaugaucaccgagcugcugcagaaggaguacauggacagacagggcaagaccccccugggccugguggaccuguucguguucagcaccagcuucuaccugaucagcaucuuccugcaccugaucaagauccccacccacagacacgugaucggcaagcccugccccaagccccacagacugaaccacaugggcaucugcagcugcggccuguacaagcaccccggcgugcccgugaaguggaagagauga

SEQ ID NO: 5143 - RNA, 1473 nt, Artificial Sequence
  derived and/or modified protein sequence (opt4) from LASV(Lassa virus/H.sapiens-wt/NGA/2015/ISTH_0681;Clade II)__AVO03617__GPCstabilized
augggccagaucaucaccuucuuccaggaggugccccacgugaucgaggaggugaugaacaucgugcugaucgcccugagccugcuggccauccugaagggcaucuacaacguggccaccugcggccuguucggccuggugagcuuccugcugcugugcggcagaagcugcagcaccaccuacaagggcguguacgagcugcagacccuggagcuggacauggccagccugaacaugaccaugccccugagcugcaccaagaacaacagccaccacuacaucauggugggcaacgagaccggccuggagcugacccugaccaacaccagcaucaucaaccacaaguucugcaaccugagcgacgcccacaagaagaaccuguacgaccacgcccugaugagcaucaucagcaccuuccaccugagcauccccaacuucaaccaguacgaggccaugagcugcgacuucaacggcggcaagaucagcgugcaguacaaccugagccacaccuacgccgagggcgccgccaaccacugcggcaccaucgccaacggcgugcugcagaccuucaugagaauggccuggggcggcagcuacaucgcccuggacagcggcugcggcagcugggacugcaucaugaccagcuaccaguaccugaucauccagaacaccaccugggaggaccacugccaguucagcagacccagccccaucggcuaccugggccugcugagccagagaaccagagacaucuacaucagcagaagacgccggggcaccuucaccuggacccugagcgacagcgagggcaacgagacccccggcggcuacugccugaccagauggaugcugaucgaggccgagcugaagugcuucggcaacaccgccguggccaagugcaacgagaagcacgacgaggaguucugcgacaugcugagacuguucgacuucaacaagcaggccaucaugagacugaagacccccgcccagaugagcauccagcugaucaacaaggccgugaacgcccugaucaacgaccagcugaucaugaagaaccaccugagagacaucaugugcauccccuacugcaacuacagcaaguacugguaccugaaccacaccgugaccggcaagaccagccugcccagaugcuggcuggugagcaacggcagcuaccugaacgagacccacuucagcgacgacaucgagcagcaggccgacaacaugaucaccgagaugcugcagaaggaguacauggacagacagggcaagaccccccugggccugguggaccuguucguguucagcaccagcuucuaccugaucagcaucuuccugcaccuggugaagauccccacccacagacacgugaucggcaagcccugccccaagccccacagacugaaccacaugggcaucugcagcugcggccuguacaagcaccccggcgugcccgugaaguggaagagauga

SEQ ID NO: 5144 - RNA, 1473 nt, Artificial Sequence
  derived and/or modified protein sequence (opt4) from LASV(Lassa virus/H.sapiens-wt/NGA/2015/ISTH_0682;Clade II)__AVO03625__GPCstabilized
augggccagaucaucaccuucuuccaggaggugccccacgugaucgaggaggugaugaacaucgugcugaucgcccugagccugcuggccauccugaagggcaucuacaacguggccaccugcggccuguucggccuggugagcuuccugcugcugugcggcagaagcugcagcaccaccuacaagggcguguacgagcugcagacccuggagcuggacauggccagccugaacaugaccaugccccugagcugcaccaagaacaacagccaccacuacaucauggugggcaacgagaccggccuggagcugacccugaccaacaccagcaucaucaaccacaaguucugcaaccugagcgacgcccacaagaagaaccuguacgaccacgcccugaugagcaucaucagcaccuuccaccugagcauccccaacuucaaccaguacgaggccaugagcugcgacuucaacggcggcaagaucagcgugcaguacaaccugagccacgccuacgccguggacgccgccaaccacugcggcaccaucgccaacggcgugcugcagaccuucaugagaauggccuggggcggcagcuacaucgcccuggacagcggcugcggcagcugggacugcaucaugaccagcuaccacuaccugaucauccagaacaccaccugggaggaccacugccaguucagcagacccagccccaucggcuaccugggccugcugagccagagaaccagagacaucuacaucagcagaagacgccggggcaccuucaccuggacccugagcgacagcgagggcaacgagacccccggcggcuacugccugaccagauggaugcugaucgaggccgagcugaagugcuucggcaacaccgccguggccaagugcaacgagaagcacgacgaggaguucugcgacaugcugagacuguucgacuucaacaagcaggccaucagaagacugaagacccccgcccagaugagcauccagcugaucaacaaggccgugaacgcccugaucaacgaccagcugaucaugaagaaccaccugagagacaucaugugcauccccuacugcaacuacagcaaguacugguaccugaaccacaccgugaccggcaagaccagccugcccagaugcuggcuggugagcaacggcagcuaccugaacgagacccacuucagcgacgacaucgagcagcaggccgacaacaugaucaccgagcugcugcagaaggaguacaucgacagacagggcaagaccccccugggccugguggaccuguucguguucagcaccagcuucuaccugaucagcaucuuccugcaccuggugaagauccccacccacagacacgugaucggcaagcccugccccaagccccacagacugaaccacaugggcaucugcagcugcggccuguacaagcaccccggcgugcccgugaaguggaagagauga

SEQ ID NO: 5145 - RNA, 1473 nt, Artificial Sequence
  derived and/or modified protein sequence (opt4) from LASV(Lassa virus/H.sapiens-wt/NGA/2015/ISTH_0687;Clade II)__AVO03581__GPCstabilized
augggccagaucaucaccuucuuccaggaggugccccacgugaucgaggaggugaugaacaucgugcugaucgcccugagccugcuggccauccugaagggcaucuacaacguggccaccugcggccuguucggccuggugagcuuccugcugcugugcggcagaagcugcagcaccaccuacaagggcguguacgagcugcagacccuggagcuggacaugaccaaccugaacaugaccaugccccugagcugcaccaagaacaacagccaccacuacaucauggugggcaacgagaccggccuggagcugacccugaccaacaccagcaucaucaaccacaaguucugcaaccugagcgacgcccacaagaagaaccuguacaaccacgcccugaugagcaucaucagcaccuuccaccugagcauccccaacuucaaccaguacgaggccaugagcugcgacuucaacggcggcaagaucagcgugcaguacaaccugagccacaccuacgccguggacgccgccaaccacugcggcaccguggccaacggcgugcugcagaccuucaugagaauggccuggggcggcagcuacaucgcccuggacagcggcugcggcggcugggacugcaucaugaccagcuaccaguaccugaucauccagaacaccaccugggaggaccacugccaguucagcagacccagccccaucggcuaccugggccugcugagccagagaaccagagacaucuacaucagcagaagacgccggggcaccuucaccuggacccugagcgacagcgagggcaacgagacccccggcggcuacugccugaccagauggaugcugaucgaggccgagcugaagugcuucggcaacaccgccguggccaagugcaacgagaagcacgacgaggaguucugcgacaugcugagacuguucgacuucaacaagcaggccaucagaaagcugaaggcccccgcccagaugagcauccagcugaucaacaaggccgugaacgcccugaucaacgaccagcugaucaugaagaaccaccugagagacaucaugugcauccccuacugcaacuacagcaaguacugguaccugaaccacaccgugaccggcaagaccagccugcccaagugcuggcuggugagcaacggcagcuaccugaacgagacccacuucagcgacgacaucgagcagcaggccgacaacaugaucaccgagcugcugcagaaggaguacauggacagacagggcaagaccccccugggccugguggaccuguucguguucagcaccagcuucuaccugaucagcaucuuccugcaccuggugaagauccccacccacagacacaucaucggcaagcccugccccaagccccacagacugaaccacaugggcaucugcagcugcggccuguacaagcaccccggcgugcccgugaaguggaagagauga

SEQ ID NO: 5146 - RNA, 1473 nt, Artificial Sequence
  derived and/or modified protein sequence (opt4) from LASV(Lassa virus/H.sapiens-wt/NGA/2015/ISTH_0736;Clade II)__AVO03573__GPCstabilized
augggccagaucaucaccuucuuccaggaggugccccacgugaucgaggaggugaugaacaucgugcugaucgcccugagccugcuggccgugcugaagggcaucuacaacguggccaccugcggccuguucggccuggugagcuuccugcugcugugcggcagaagcugcagcaccaccuacaagggcguguacgagcugcagacccuggagcuggacauggccagccugaacaugaccaugccccugagcugcaccaagaacaacagccaccacuacaucauggugggcaacgagaccggccuggagcugacccugaccaacaccagcaucaucaaccacaaguucugcaaccugagcgacgcccacaagaagaaccuguacgaccacgcccugaugagcaucaucagcaccuuccaccugagcauccccaacuucaaccaguacgaggccaugagcugcgacuucaacggcggcaagaucagcgugcaguacaaccugagccacacccacgccguggacgccgccaaccacugcggcaccaucgccaacggcgugcugcagaccuucaugagaauggccuggggcggcagcuacaucgcccuggacagcggcugcggcagcugggacugcaucaugaccagcuaccaguaccugaucauccagaacaccaccugggaggaccacugccaguucagcagacccagccccaucggcuaccugggccugcugagccagagaaccagagacaucuacaucagcagaagacgccggggcaccuucaccuggacccugagcgacagcgagggcaacgagacccccggcggcuacugccugaccagauggaugcugaucgaggccgagcugaagugcuucggcaacaccgccguggccaagugcaacgagaagcacgacgaggaguucugcgacaugcugagacuguucgacuucaacaagcaggccaucagaagacugaagacccccgcccagaugagcauccagcugaucaacaaggccgugaacgcccugaucaacgaccagcugaucaugaagaaccaccugagagacaucaugugcauccccuacugcaacuacagcagauacugguaccugaaccacaccgugaccggcaagaccagccugcccagaugcuggcuggugagcaacggcagcuaccugaacgagacccacuucagcgacgacaucgagcagcaggccgacaacaugaucaccgagcugcugcagaaggaguacaucgacagacagggcagaaccccccugggccugguggaccuguucguguucagcaccagcuucuaccugaucagcaucuuccugcaccuggugaagauccccacccacagacacgugaucggcaagcccugccccaagccccacagacugaaccacaugggcaucugcagcugcggccuguacaagcaccccggcgugcccgugaaguggaagagauga

SEQ ID NO: 5147 - RNA, 1473 nt, Artificial Sequence
  derived and/or modified protein sequence (opt4) from LASV(Lassa virus/H.sapiens-wt/NGA/2015/ISTH_0789;Clade II)__AVO03551__GPCstabilized
augggccagaucgugaccuucuuccaggaggugccccacgugaucgaggagaucaugaacaucgugcugaucacccugagccugcuggccauccugaagggcguguacaaccuggccaccugcggccugaucggccugaucaccuuccuguuccugugcggcagaagcugcagcaccaucuacaagggcagcuaccaguuccagacccuggagcugaacauggagacccugaacaugaccaugccccugagcugcaccaagaacagcagccaccacuacaucagagugagcaacgagaccggccuggagcugacccugaccaacaccagcaucaucaaccacaaguucugcaaccugagcgacgcccacaagaagaaccuguacgaccacacccugaugagcaucaucagcaccuuccaccugagcauccccaacuucaaccaguacgaggccaugagcugcgacuucaacggcggcaagaucagcgugcaguacaaccugagccacagcuacgccguggacgccgccaaccacugcggcaccguggccaacggcgugcugcagaccuucaugagaauggccuggggcggcagcuacaucgcccuggacagcggcugcggcaacugggacugcaucaugaccagcuaccaguaccugaucauccagaacaccaccugggaggaccacugccaguucagcagacccagccccaucggcuaccugggccugcugagccagagaaccagagacaucuacaucagcagaagacgccggggcaccuucaccuggacccugagcgacagcgagggcaaggagacccccggcggcuacugccugaccagauggaugcugaucgaggccgagcugaagugcuucggcaacaccgccguggccaagugcaacgagaagcacgacgaggaguucugcgacaugcugagacuguucgacuucaacaagcaggccauccagagacugaaggcccccgcccagaugagcauccagcugaucaacaaggccgugaacgcccugaucaacgaccagcugaucaugaagaaccaccugagagacaucaugugcauccccuacugcaacuacagcaaguacugguaccugaaccacaccagcaccggcagaaccagccugcccaagugcuggcuggugagcaacggcagcuaccugaacgagacccacuucagcgacgacaucgagcagcaggccgacaacaugaucaccgagaugcugcagaaggaguacaucgacagacagggcaagaccccccugggccugguggaccuguucguguucagcaccagcuucuaccugaucagcaucuuccugcaccuggugaagauccccacccacagacacaucgugggcaagagcugccccaagccccacagacugaaccacaugggcaucugcagcugcggccuguacaagagacccggcgugcccgugaaguggaagagauga

SEQ ID NO: 5148 - RNA, 1473 nt, Artificial Sequence
  derived and/or modified protein sequence (opt4) from LASV(Lassa virus/H.sapiens-wt/NGA/2015/ISTH_0821;Clade II)__AVO03641__GPCstabilized
augggccagaucaucaccuucuuccaggaggugccccacgugaucgaggaggugaugaacaucgugcugaucgcccugagccugcuggccauccugaagggcaucuacaacguggccaccugcggccuguucggccuggugagcuuccugcugcugugcggcagaagcugcagcaccaccuacaagggcguguacgagcugcagacccuggagcuggacauggccagccugaacaugaccaugccccugagcugcaccaagaacaacagccaccacuacaucauggugggcaacgagaccggccuggagcugacccugaccaacaccagcaucaucaaccacaaguucugcaaccugagcgacgcccacaagaagaaccuguacgaccacacccugaugagcaucaucagcaccuuccaccugagcauccccaacuucaaccaguacgaggccaugagcugcgacuucaacggcggcaagaucagcgugcaguacaaccugagccacaccuacgccguggacgccgccaaccacugcggcaccaucgccaacggcgugcugcagaccuucaugagaauggccuggggcggcagcuacaucgcccuggacagcggcugcggcaacugggacugcaucaugaccagcuaccaguaccugaucauccagaacaccaccugggaggaccacugccaguucagcagacccagccccaucggcuaccugggccugcugagccagagaaccagagacaucuacaucagcagaagacgccggggcaccuucaccuggacccugagcgacagcgagggcaacgagacccccggcggcuacugccugaccagauggaugcugaucgaggccgagcugaagugcuucggcaacaccgccguggccaagugcaacgagaagcacgacgaggaguucugcgacaugcugagacuguucgacuucaacaagcaggccaucagcagacugaagacccccgcccagaugagcauccagcugaucaacaaggccgugaacgcccugaucaacgaccagcugaucaugaagaaccaccugagagacaucaugugcauccccuacugcaacuacagcaaguacugguaccugaaccacaccgugaccggcaagaccagccugcccagaugcuggcuggugagcaacggcagcuaccugaacgagacccacuucagcgacgacaucgagcagcaggccgacaacaugaucaccgagaugcugcagaaggaguacaucgacagacagggcaagaccccccugggccugguggaccuguucguguucagcaccagcuucuaccugaucagcaucuuccugcaccuggugaagauccccacccacagacacgugaucggcaagcccugccccaagccccacagacugaaccacaugggcaucugcagcugcggccuguacaagcaccccggcgugcccgugaaguggaagagauga

SEQ ID NO: 5149 - RNA, 1473 nt, Artificial Sequence
  derived and/or modified protein sequence (opt4) from LASV(Lassa virus/H.sapiens-wt/NGA/2015/ISTH_0831;Clade II)__AVO03545__GPCstabilized
augggccagaucgugaccuucuuccaggaggugccccacgugaucgaggagaucaugaacaucgugcugaucacccugagccugcuggccauccugaagggcguguacaaccuggccaccugcggccugaucggccugaucaccuuccuguuccugugcggcagaagcugcagcaugaccuacaagggcagcuaccagcuggagacccuggagcugaacauggagacccugaacaugaccaugccccugagcugcaccaagaacaccagccaccacuacaucagagugggcaacgagaccggccuggagcugacccugaccaacaccagcaucaucaaccacaaguucugcaaccugagcgacgcccacaagaagaaccuguacgaccacagccugaugagcaucgugagcaccuuccaccugagcauccccaacuucaaccaguacgaggccaugagcugcgacuucaacggcggcaagaucagcauccaguacaaccugagccacgccuacgccggcgacgccgccaagcacugcggcacccuggccaacggcgugcugcagaccuucaugagaauggccuggggcggcagcuacaucgcccuggacagcggcugcggcaacugggacugcaucaugaccagcuaccaguaccugaucauccagaacaccaccugggacgaccacugccaguucagcagacccagccccaucggcuaccugggccugcugagccagagaaccagagagaucuacaucagcagaagacgccggggcaccuucaccuggacccugagcgacagcgagggcaacgaggcccccggcggcuacugccugaccagauggaugcugaucgaggccgagcugaagugcuucggcaacaccgccguggccaagugcaacgagaagcacgacgaggaguucugcgacaugcugagacuguucgacuucaacaagcaggccauccagagacugaagacccccgcccagaugagcauccagcugaucaacaaggccgugaacgcccugaucaacgaccagcugaucaugaagaaccaccugagagacaucaugugcauccccuacugcaacuacagcaaguacugguaccugaaccacaccaccaccggcagaaccagccugcccagaugcuggcuggugagcaacggcagcuaccugaacgagacccacuucagcgacgacaucgagcagcaggccgacaacaugaucaccgagaugcugcagaaggaguacaucgacagacagggcaagaccccccugggccugguggaccuguucguguucagcaccagcuucuaccugaucagcaucuuccugcaccuggugaagauccccacccacagacacaucgugggcaagagcugccccaagccccacagacugaaccacaugggcaucugcagcugcggccuguacaagcagcccggcgugcccgugagauggaagagauga

SEQ ID NO: 5150 - RNA, 1473 nt, Artificial Sequence
  derived and/or modified protein sequence (opt4) from LASV(Lassa virus/H.sapiens-wt/NGA/2016/ISTH_0009;Clade II)__AVO03571__GPCstabilized
augggccagaucaucaccuucuuccaggaggugccccacgugaucgaggaggugaugaacaucgugcugaucgcccugagccugcuggccauccugaagggcaucuacaacguggccaccugcggccugcugggccuggugagcuuccugcugcugugcggcagaagcugcagcaccaccuacaagggcguguacgagcugcagacccuggagcuggacauggccagccugaacaugaccaugccccugagcugcaccaagaacaacagccaccacuacaucauggugggcaacgagaccggccuggagcugacccugaccaacaccagcaucaucaaccacaaguucugcaaccugagcgacgcccacaagaagaaccuguacgaccacgcccugaugagcaucaucagcaccuuccaccugagcauccccaacuucaaccaguacgaggccaugagcugcgacuucaacggcggcagaaucagcgugcaguacaaccugagccacagcuacgccguggacgccgccaaccacugcggcaccaucgccaacggcgugcugcagaccuucaugagaauggccuggggcggcagcuacaucgcccuggacagcggcugcggcagcugggacugcaucaugaccagcuaccaguaccugaucauccagaacaccaccugggaggaccacugccaguucagcagacccagccccaucggcuaccugggccugcugagccagagaaccagagacaucuacaucagcagaagacgccggggcaccuucaccuggacccugagcgacagcgagggcaacgagacccccggcggcuacugccugaccagauggaugcugaucgaggccgagcugaagugcuucggcaacaccgccguggccaagugcaacgagaagcacgacgaggaguucugcgacaugcugagacuguucgacuucaacaagcaggccaucagaagacugaagacccccgcccagaugagcauccagcugaucaacaaggccgugaacgcccugaucaacgaccagcugaucaugaagaaccaccugagagacaucaugugcauccccuacugcaacuacagcaaguacugguaccugaaccacaccgugaccggcaagaccagccugcccagaugcuggcuggugagcaacggcagcuaccugaacgagacccacuucagcgacgacaucgagcagcaggccgacaacaugaucaccgagcugcugcagaaggaguacaucgacagacagggcaagaccccccugggccugguggaccuguucguguucagcaccagcuucuaccugaucagcaucuuccugcaccuggugaagauccccacccacagacacaucaccggcaagcccugccccaagccccacagacugaaccacaugggcaucugcagcugcggccuguacaaccaccccggcgugcccgugaaguggaagagauga

SEQ ID NO: 5151 - RNA, 1473 nt, Artificial Sequence
  derived and/or modified protein sequence (opt4) from LASV(Lassa virus/H.sapiens-wt/NGA/2016/ISTH_0017;Clade II)__AVO03567__GPCstabilized
augggccagaucaucaccuucuuccaggaggugccccacgugaucgaggaggugaugaacaucgugcugaucgcccugagccugcuggccauccugaagggcaucuacaacguggccaccugcggccuguucggccuggugagcuuccugcugcugugcggcagaagcugcagcaccaccuacaagggcguguacgagcugcagacccuggagcuggacauggccagccugaacaugaccaugccccugagcugcaccaagaacaacagccaccacuacaucauggugggcaacgagaccggccuggagcugacccugaccaacaccagcaucaucaaccacaaguucugcaaccugagcgacgcccacaagaagaaccuguacgaccacgcccugaugagcaucaucagcaccuuccaccugagcauccccaacuucaaccaguacgaggccaugagcugcgacuucaacggcggcaagaucagcgugcaguacaaccugagccacaccuacgccaucgacgccgccaaccacugcggcaccaucgccaacggcgugcugcagaccuucaugagaauggccuggggcggcagcuacaucgcccuggacagcggcugcggcagcugggacugcaucaugaccagcuaccaguaccugaucauccagaacaccaccugggaggaccacugccaguucagcagacccagccccaucggcuaccugggccugcugagccagagaaccagagacaucuacaucagcagaagacgccggggcaccuucaccuggacccugagcgacagcgagggcaacgagacccccggcggcuacugccugaccagauggaugcugaucgaggccgagcugaagugcuucggcaacaccgccguggccaagugcaacgagaagcacgacgaggaguucugcgacaugcugagacuguucgacuucaacaagcaggccaucagaagacugaagacccccgcccagaugagcauccagcugaucaacaaggccgugaacgcccugaucaacgaccagcugaucaugaagaaccaccugagagacaucaugugcauccccuacugcaacuacagcaaguacugguaccugaaccacaccgugaccggcaagaccagccugcccagaugcuggcuggugagcaacggcagcuaccugaacgagacccacuucagcgacgacaucgagcagcaggccgacaacaugaucaccgagcugcugcagaaggaguacauggacagacagggcaagaccccccugggccugguggaccuguucguguucagcaccagcuucuaccugaucagcaucuuccugcaccuggugagaauccccacccacagacacgugaucggcaagcccugccccaagccccacagacugaaccacaugggcaucugcagcugcggccuguacaagcaccccggcgugcccgugaaguggaagagauga

SEQ ID NO: 5152 - RNA, 1473 nt, Artificial Sequence
  derived and/or modified protein sequence (opt4) from LASV(Lassa virus/H.sapiens-wt/NGA/2016/ISTH_0035;Clade II)__AVO03619__GPCstabilized
augggccagaucaucaccuucuuccaggaggugccccacgugaucgaggaggugaugaacaucgugcugaucgcccugagccugcuggccauccugaagggcaucuacaacguggccaccugcggccuguucggccuggugagcuuccugcugcugugcggcagaagcugcagcaugaccuacaagggcguguacgagcugcagacccuggagcuggacauggccagccugaacaugaccaugccccugagcugcaccaagaacaacagccaccacuacaucauggugggcaacgagaccggccuggagcugacccugaccaacaccagcaucaucaaccacaaguucugcaaccugagcgacgcccacaagaagaaccuguacgaccacgcccugaugagcaucaucagcaccuuccaccugagcauccccaacuucaaccaguacgaggccaugagcugcgacuucaacggcggcaagaucagcgugcaguacaaccugagccacaccuacgccguggacgccgccaaccacugcggcaccaucgccaacggcgugcugcagaccuucaugagaauggccuggggcggcagcuacaucgcccuggacagcggcugcggcagcugggacugcaucaugaccagcuaccaguaccugaucauccagaacaccaccugggaggaccacugccaguucagcagacccagccccaucggcuaccugggccugcugagccagagaaccagagacaucuacaucagcagaagacgccggggcaccuucaccuggacccugagcgacagcgagggcaacgagacccccggcggcuacugccugaccagauggaugcugaucgaggccgagcugaagugcuucggcaacaccgccguggccaagugcaacgagaagcacgacgaggaguucugcgacaugcugagacuguucgacuucaacaagcaggccaucagaagacugaagacccccgcccagaugagcauccagcugaucaacaaggccgugaacgcccugaucaacgaccagcugaucaugaagaaccaccugagagacaucaugugcauccccuacugcaacuacagcaaguacugguaccugaaccacaccaucaccggcaagaccagccugcccagaugcuggcuggugagcaacggcagcuaccugaacgagacccacuucagcgacgacaucgagcagcaggccgacaacaugaucaccgagcugcugcagaaggaguacauggacagacagggcaagaccccccugggccugguggaccuguucguguucagcaccagcuucuaccugaucagcaucuuccugcaccuggugaagauccccacccacagacacgugaucggcaagcccugccccaagccccacagacugaaccacaugggcaucugcagcugcggccuguacaagcaccccggcgugcccgugaaguggaagagauga

SEQ ID NO: 5153 - RNA, 1473 nt, Artificial Sequence
  derived and/or modified protein sequence (opt4) from LASV(Lassa virus/H.sapiens-wt/NGA/2016/ISTH_0104;Clade II)__AVO03631__GPCstabilized
augggccaggugaucaccuucuuccaggaggugccccacgugaucgaggaggugaugaacaucgugcugaucgcccugagccugcuggccauccugaagggcaucuacaacguggccaccugcggccuguucggccugaucagcuuccugcugcugugcggcagaagcugcagcaccaccuacaagggcguguacgagcugcagacccuggagcugaacaugcagaaccugaacaugaccaugccccugagcugcaccaagaacagcagccaccacuacaucauggugggcaacgagaccggccuggagcugacccugaccaacaccagcaucaucaaccacaaguucugcaaccugagcgacgcccacaagaagaaccuguacgaccacgcccugaugagcaucaucagcaccuuccaccugagcauccccaacuucaaccaguacgaggccaugagcugcgacuucaacggcggcaagaucagcgugcaguacaaccugagccacaccuacgccaucgacgccgccaaccacugcggcaccguggccaacggcgugcugcagaccuucaugagaauggccuggggcggcagcuacaucgcccuggacagcggcugcggcaacugggacugcaucaugaccagcuaccaguaccugaucauccagaacaccaccugggaggaccacugccaguucagcagacccagccccaucggcuaccugggccugcugagccagagaaccagagacaucuacaucagcagaagacgccggggcaccuucaccuggacccugagcgacagcgagggcaacgaggcccccggcggcuacugccugaccagauggaugcugaucgaggccgagcugaagugcuucggcaacaccgccguggccaagugcaacgagaagcacgacgaggaguucugcgacaugcugagacuguucgacuucaacaagcaggccaucaagagacugaagacccccgcccagaugagcauccagcugaucaacaaggccgugaacgcccugaucaacgaccagcugaucaugaagaaccaccugagagacaucaugugcauccccuacugcaacuacagcaaguacugguaccugaaccacaccgugaccggcagaaccagccugcccagaugcuggcuggugagcaacggcagcuaccugaacgacacccaguucagcgacgacaucgagcagcaggccgacaacaugaucaccgagaugcugcagaaggaguacauggacagacagggcaagaccccccugggccugguggaccuguucguguucagcaccagcuucuaccugaucagcaucuuccugcaccuggugaagauccccacccacagacacaucgugggcagacccugccccaagccccacagacugaaccacaugggcaucugcagcugcggccuguacaagcaccccggcgugcccgugaaguggaagagauga

SEQ ID NO: 5154 - RNA, 1476 nt, Artificial Sequence
  derived and/or modified protein sequence (opt4) from LASV(Lassa virus/H.sapiens-wt/NGA/2016/ISTH_0133;Clade II)__AVO03635__GPCstabilized
augggccagaucaucaccuucuuccaggaggugccccacgugaucgaggaggugaugaacaucgugcugaucgcccugagccugcuggccgugcugaaggccaucuacaacguggccaccugcggcguguucggccugaucagcuuccugcugcugugcggcagaagcugcagcaccaccuacaagggcguguacgagcugcagacccuggagcuggacauggccaaccugaacaugaccaugccccugagcugcaccaagaacaacagccaccacuacaucauggugggcaacgagaccggccuggagcugacccugaccaacaccagcaucaucaaccacaaguucugcaaccugagcgacgcccacaagaagaaccuguacgaccacagccugaugagcaucaucagcaccuuccaccugagcauccccaacuucaaccaguacgaggccaugagcugcgacuucaacggcggcaagaucagcgugcaguacaaccugagccacagcuacgccguggacgccgccaagcacugcggcaccaucgccaacggcgugcugcagaccuucaugagaauggccuggggcggcagcuacaucgcccuggacagcggcaagugcggcugggacugcaucaugaccagcuaccaguaccugaucauccagaacaccaccugggaggaccacugccaguucagcagacccagccccaucggcuaccugggccugcugagccagagaaccagagacaucuacaucagcagaagacugcgccggaccuucaccuggacccugagcgacagcgagggcaacgacgcccccggcggcuacugccugaccagauggaugcugaucgaggccgagcugaagugcuucggcaacaccgccaucgccaagugcaacgagaagcacgacgaggaguucugcgacaugcugagacuguucgacuucaacagacaggccaucaagagacugaagaccgagccccagaugagcauccagcugaucaacaaggccgugaacgcccugaucaacgaccagcugaucaugaagaaccaccugagagacaucaugggcugccccuacugcaacuacagcaaguacugguaccugaaccacaccaucaccggcaagaccagccugcccagaugcuggcuggugagcaacggcagcuaccugaacgagacccacuucagcgacgacaucgagcagcaggccgacaacaugaucaccgagcugcugcagaaggaguacauggacagacagggcaagaccccccugggccugguggaccuguucguguucagcaccagcuucuaccugaucagcaucuuccugcaccuggugaagauccccacccacagacacaucgugggcaagcccugccccaagccccacagacugaaccacaugggcaucugcagcugcggccuguacaagcaccccggcgugcccgugaaguggaagagacaguga

SEQ ID NO: 5155 - RNA, 1473 nt, Artificial Sequence
  derived and/or modified protein sequence (opt4) from LASV(Lassa virus/H.sapiens-wt/NGA/2016/ISTH_0141;Clade II)__AVO03649__GPCstabilized
augggccagaucaucaccuucuuccaggaggugccccacgugaucgaggaggugaugaacaucgugcugaucacccugagccugcuggccauccugaagggcaucuacaacguggccaccugcggccuguucggccuggugagcuuccugcugcugugcggcagaagcugcagcaccaucuacaagggcguguacgagcugcagacccuggagcuggacauggccagccugaacaugaccaugccccugagcugcaccaagaacaacagccaccacuacaucauggugggcaacgagaccggccuggagcugacccugaccaacaccagcaucaucaaccacaaguucugcaaccugagcgacgcccacaagaagaaccuguacgaccacgcccugaugagcaucaucagcaccuuccaccugagcauccccaacuucaaccaguacgaggccaugagcugcgacuucaacggcggcaagaucagcgugcaguacaaccugagccacaccuacgccguggacgccgccgagcacugcggcaccaucgccaacggcgugcugcagaccuucaugagaauggccuggggcggcagcuacaucgcccuggacagcggcugcggcagcugggacugcaucaugaccagcuaccaguaccugaucauccagaacaccaccugggaggaccacugccaguucagcagacccagccccaucggcuaccugggccugcugagccagagaaccagagacaucuacaucagcagaagacgccggggcaccuucaccuggacccugagcgacagcgagggcaacgagacccccggcggcuacugccugaccagauggaugcugaucgaggccgagcugaagugcuucggcaacaccgccguggccaagugcaacgagaagcacgacgaggaguucugcgacaugcugagacuguucgacuucaacaagcaggccaucagaagacugaagacccccgcccagaugagcauccagcugaucaacaaggccgugaacgcccugaucaacgaccagcugaucaugaagaaccaccugagagacaucaugugcauccccuacugcaacuacagcaaguacugguaccugaaccacaccgugaccggcaagaccagccugcccagaugcuggcuggugagcaacggcagcuaccugaacgagaccagauucagcgacgacaucgagcagcaggccgacaacaugaucaccgagcugcugcagaaggaguacaucgacagacagggcaagaccccccugggccugguggaccuguucguguucagcaccagcuucuaccugaucagcaucuuccugcaccuggugaagauccccacccacagacacaucaucggcaagcccugccccaagccccacagacugaaccacaugggcaucugcagcugcggccuguacaagcaccccggcauccccgugaaguggaagagauga

SEQ ID NO: 5156 - RNA, 1473 nt, Artificial Sequence
  derived and/or modified protein sequence (opt4) from LASV(Lassa virus/H.sapiens-wt/NGA/2016/ISTH_0146;Clade II)__AVO03633__GPCstabilized
augggccagaucaucaccuucuuccaggaggugccccacgugaucgaggaggugaugaacaucgugcugaucgcccugagccugcuggccauccugaagggcaucuacaacguggccaccugcggccuguucggccuggugagcuuccugcugcugugcggcagaagcugcagcaccaccuacaagggcguguacgagcugcagacccuggagcuggacauggccagccugaacaugaccaugccccugagcugcaccaagaacaacagccaccacuacaucauggugggcaacgagaccggccuggagcugacccugaccaacaccagcaucaucaaccacaaguucugcaaccugagcgacgcccacaagaagaaccuguacgaccacgcccugaugagcaucaucagcaccuuccaccugagcauccccaacuucaaccaguacgaggccaugagcugcgacuucaacggcggcaagaucagcgugcaguacaaccugagccacaccuacgccguggacgccgccaaccacugcggcaccaucgccaacggcgugcugcagaccuucaugagaauggccuggggcggcagcuacaucgcccuggacagcggcugcggcagcugggacugcaucaugaccagcuaccaguaccugaucauccagaacaccaccugggaggaccacugccaguucagcagacccagccccaucggcuaccugggccugcugagccagagaaccagagacaucuacaucagcagaagacgccggggcaccuucaccuggacccugagcgacagcgagggcaacgagacccccggcggcuacugccugaccagauggaugcugaucgaggccgagcugaagugcuucggcaacaccgccguggccaagugcaacgagaagcacgacgaggaguucugcgacaugcugagacuguucgacuucaacaagcaggccaucagaagacugaagacccccgcccagaugagcauccagcugaucaacaaggccgugaacgcccugaucaacgaccagcugaucaugaagaaccaccugagagacaucaugugcauccccuacugcaacuacagcaaguacugguaccugaaccacaccgugaccggcaagaccagccugcccagaugcuggcuggugagcaacggcagcuaccugaacgagacccacuucagcgacgacaucgagcagcaggccgacaacaugaucaccgagcugcugcagaaggaguacauggacagacagggcaagaccccccugggccugguggaccuguucguguucagcaccagcuucuaccugaucagcaucuuccugcaccuggugaagauccccacccacagacacgugaucggcaagcccugccccaagccccacagacugaaccacaugggcaucugcagcugcggccuguacaagcaccccggcgugcccgugaaguggaagagauga

SEQ ID NO: 5157 - RNA, 1473 nt, Artificial Sequence
  derived and/or modified protein sequence (opt4) from LASV(Lassa virus/H.sapiens-wt/NGA/2016/ISTH_0187;Clade II)__AVO03549__GPCstabilized
augggccagaucgugaccuucuuccaggaggugccccacgugaucgaggaggugaugaacaucgugcugaucgcccugagcgugcuggccauccugaagggccuguacaacuucgccaccugcggccugaucggccuggugaccuuccugcugcugagcggcagaagcugcagcaugguguacaagggcguguacgagcugcagacccuggagcugaacauggagacccugaacaugaccaugccccugagcugcaccaagaacaacagccaccacuacaucagagugggcaacgacaccggccuggagcugacccugaccaacaacacccugcugaaccacaaguucugcaaccugagcgacgcccacaagaagaaccuguacgaccacgcccugaugagcaucaucagcaccuuccaccugagcauccccaacuucaaccaguacgaggccaugagcugcgacuucaacggcggcagaaucaccgugcaguacaaccugagccacagcuacgccguggacgccgccaaccacugcggcaccguggccaacggcgugcugcagaccuucaugagaauggccuggggcggcagcuacaucgcccuggacagcagaugcggcaacugggacugcaucaugaccagcuaccaguaccugaucauccagaacaccaccugggaggaccacugccaguucagcagacccagccccaucggcuaccugggccugcugagccagagaaccagagacaucuacaucagcagaagacgccggggcaccuucaccuggacccugagcgacagcgagggcaacgagacccccggcggcuacugccugaccagauggaugcugaucgaggccgagcugaagugcuucggcaacaccgccguggccaagugcaacgagaagcacgacgaggaguucugcgacaugcugagacuguucgacuucaacaagcaggccaucagaagacugaaggcccccgcccagaugagcauccagcugaucaacaaggccgugaacgcccugaucaacgaccagcugaucaugaagaaccaccugagagacaucaugugcauccccuacugcaacuacagcaaguacugguaccugaaccacaccagcaccggcaagaccagccugcccagaugcuggcuggugagcaacggcagcuaccugaacgagacccacuucagcgacgacaucgagcagcaggccgacaacaugaucaccgagaugcugcagaaggaguaccuggacagacagggcaagaccccccugggccugguggacaucuucguguucagcaccagcuucuaccugaucagcaucuuccugcaccugaucaagauccccacccacagacacaucgugggcaagcccugccccaagccccacagacugaaccacaugggcaucugcagcugcggccuguacaagcagcccggcgugcccgugagauggaagagauga

SEQ ID NO: 5158 - RNA, 1473 nt, Artificial Sequence
  derived and/or modified protein sequence (opt4) from LASV(Lassa virus/H.sapiens-wt/NGA/2016/ISTH_0199;Clade II)__AVO03653__GPCstabilized
augggccagaucaucaccuucuuccaggaggugccccacgugaucgaggaggugaugaacaucgugcugaucgcccugagccugcuggccauccugaagggcaucuacaacguggccaccugcggccuguucggccuggugagcuuccugcugcugugcggcagaagcugcagcaccaccuacaagggcguguacgagcugcagacccuggagcuggacauggccagccugaacaugaccaugccccugagcugcaccaagaacaacagccaccacuacaucauggugggcaacgagaccggccuggagcugacccugaccaacaccagcaucaucaaccacaaguucugcaaccugagcgacgcccacaagaagaaccuguacgaccacgcccugaugagcaucaucagcaccuuccaccugagcauccccaacuucaaccaguacgaggccaugagcugcgacuucaacggcggcaagaucagcgugcaguacaaccugagccacaccuacgccguggacgccgccaaccacugcggcaccaucgccaacggcgugcugcagaccuucaugagaauggccuggggcggcagcuacaucgcccuggacagcggcugcggcaacugggacugcaucaugaccagcuaccaguaccugaucauccagaacaccaccugggaggaccacugccaguucagcagacccagccccaucggcuaccugggccugcugagccagagaaccagagacaucuacaucagcagaagacgccggggcaccuucaccuggacccugagcgacagcgagggcaacgagacccccggcggcuacugccugaccagauggaugcugaucgaggccgagcugaagugcuucggcaacaccgccguggccaagugcaacgagaagcacgacgaggaguucugcgacaugcugagacuguucgacuucaacaagcaggccaucagcagacugaagacccccgcccagaugagcauccagcugaucaacaaggccgugaacgcccugaucaacgaccagcugaucaugaagaaccaccugagagacaucaugugcauccccuacugcaacuacagcaaguacugguaccugaaccacaccgugaccggcaagaccagccugcccagaugcuggcuggugagcaacggcagcuaccugaacgagacccacuucagcgacgacaucgagcagcaggccgacaacaugaucaccgagaugcugcagaaggaguacaucgacagacagggcaagaccccccugggccugguggaccuguucguguucagcaccagcuucuaccugaucagcaucuuccugcaccuggugaagauccccacccacagacacgugaucggcaagcccugccccaagccccacagacugaaccacaugggcaucugcagcugcggccuguacaagcaccccggcgugcccgugaaguggaagagauga

SEQ ID NO: 5159 - RNA, 1473 nt, Artificial Sequence
  derived and/or modified protein sequence (opt4) from LASV(Lassa virus/H.sapiens-wt/NGA/2016/ISTH_0419;Clade II)__AVO03539__GPCstabilized
augggccagaucgugaccuucuuccaggaggugccccacgugaucgaggaggugaugaacaucgugcugaucgcccugagccugcuggccauccugaagggcaucuacaacuucgccaccugcggccugaucggccugaucaccuuccuguuccugugcggcagaagcugcagcgccaucuacaagggcagcuaccagcugcagaccaucgagcugaacauggagacccugaacaugaccaugccccugagcugcaccaagaacagcagccaccacuacaucagagugggcaacgagaccggccuggagcugacccugaccaacaucagcaucaucgaccacaaguucugcaaccugagcgacgcccacaagaagaaccuguacgaccacgcccugaugagcaucaucagcaccuuccaccugagcauccccaacuucaaccaguacgaggccaugagcugcgacuucaacggcggcaagaucagcgugcaguacaaccugagccacaccuacgccguggacgccgccaaccacugcggcaccguggccaacggcgugcugcagaccuucaugagaauggccuggggcggcagcuacaucgcccuggacagcggcugcggcaacugggacugcaucaugaccagcuaccaguaccugaucauccagaacaccaccugggaggaccacugccaguucagcagacccagccccaucggcuaccugggccugcugagccagagaaccagagacaucuacaucagcagaagacgccggggcaccuucaccuggacccugagcgacagcgagggcaaggagacccccggcggcuacugccugaccagauggaugcugaucgaggccgagcugaagugcuucggcaacaccgccguggccaagugcaacgagaagcacgacgaggaguucugcgacaugcugagacuguucgacuucaacaagcaggccauccagagacugaaggcccccgcccagaugagcauccagcugaucaacaaggccgugaacgcccugaucaacgaccagcugaucaugaagaaccaccugagagacaucaugugcauccccuacugcaacuacagcaaguacugguaccugaaccacaccagcaccggcagaaccagccugcccagaugcuggcuggugagcaacggcagcuaccugaacgagacccacuucagcgacgacaucgagcagcaggccgacaacaugaucaccgagaugcugcagaaggaguacaucgacagacagggcaagaccccccugggccugguggaccuguucguguucagcaccagcuucuaccugaucagcaucuuccugcaccugaucaagauccccacccacagacacaucgugggcaagagcugccccaagccccacagacugaaccacaugggcaucugcagcugcggccuguacaagcagcccggcgugcccgugaaguggaagagauga

SEQ ID NO: 5160 - RNA, 1473 nt, Artificial Sequence
  derived and/or modified protein sequence (opt4) from LASV(Lassa virus/H.sapiens-wt/NGA/2016/ISTH_0447;Clade II)__AVO03559__GPCstabilized
augggccagaucaucaccuucuuccaggaggugccccacgugaucgaggaggugaugaacaucgugcugaucgcccugagccugcuggccauccugaagggcaucuacaacaucgccaccugcggccuguucggccuggugagcuuccugcugcugugcggcagaagcugcagcaccaccuacaagggcguguacgagcugcagacccuggagcuggacauggccagccugaacaugaccaugccccugagcugcaccaagaacaacagccaccacuacaucauggugggcaacgagaccggccuggagcugacccugaccaacaccagcaucaucaaccacaaguucugcaaccugagcgacgcccacaagaagaaccuguacgaccacacccugaugagcaucaucagcaccuuccaccugagcauccccaacuucaaccaguacgaggccaugagcugcgacuucaacggcggcaagaucagcgugcaguacaaccugagccacgccuacgccguggacgccgccaaccacugcggcaccaucgccaacggcgugcugcagaccuucaugagaauggccuggggcggcagcuacaucgcccuggacagcggcugcggcaacugggacugcaucaugaccagcuaccaguaccugaucauccagaacaccaccugggaggaccacugccaguucagcagacccagccccaucggcuaccugggccugcugagccagagaaccagagacaucuacaucagcagaagacgccggggcaccuucaccuggacccugagcgacagcgagggcaacgagacccccggcggcuacugccugaccagauggaugcugaucgaggccgagcugaagugcuucggcaacaccgccguggccaagugcaacgagaagcacgacgaggaguucugcgacaugcugagacuguucgacuucaacaagcaggccaucagaagacugaagacccccgcccagaugagcauccagcugaucaacaaggccgugaacgcccugaucaacgaccagcugaucaugaagaaccaccugagagacaucaugugcauccccuacugcaacuacagcaaguacugguaccugaaccacaccgugaccggcaagaccagccugcccagaugcuggcuggugagcaacggcagcuaccugaacgagacccacuucagcgacgacaucgagcagcaggccgacaacaugaucaccgagcugcugcagaaggaguacaucgacagacagggcaagaccccccugggccugguggaccuguucguguucagcaccagcuucuaccugaucagcaucuuccugcaccuggugaagauccccacccacagacacguggugggcaagcccugccccaagccccacagacugaaccacaugggcaucugcagcugcggccuguacaagcaccccggcgugcccgugaaguggaagagauga

SEQ ID NO: 5161 - RNA, 1473 nt, Artificial Sequence
  derived and/or modified protein sequence (opt4) from LASV(Lassa virus/H.sapiens-wt/NGA/2016/ISTH_0543;Clade II)__AVO03595__GPCstabilized
augggccagaucaucaccuucuuccaggaggugccccacgugaucgaggaggugaugaacaucgugcugaucgcccugagccugcuggccauccugaagggcaucuacaacaucgccaccugcggccuguucggccugaucagcuuccugcugcugugcggcagaagcugcagcaccaccuacaagggcguguacgagcugcagacccuggagcuggacauggccaaccugaacaugaccaugccccugagcugcaccaagaacaacagccaccacuacaucauggugggcaacgagaccggccuggagcugacccugaccaacaccagcaucaucaaccacaaguucugcaaccugagcgacgcccacaagaagaaccuguacgaccacgcccugaugagcaucaucagcaccuuccaccugagcauccccaacuucaaccaguacgaggccaugagcugcgacuucaacggcggcaagaucagcgugcaguacaaccugagccacagcuacgccguggacgccgccggccacugcggcaccaucgccaacggcgugcugcagaccuucaugagaauggccuggggcggcagcuacaucgcccuggacagcggcugcggcaacugggacugcaucaugaccagcuaccaguaccuggugauccagaacaccaccugggaggaccacugccaguucagcagacccagccccaucggcuaccugggccugcugagccagagaaccagagacaucuacaucagcagaagacgccggggcaccuucaccuggacccugagcgacagcgagggcaacgaggcccccggcggcuacugccugaccagauggaugcugaucgaggccgagcugaagugcuucggcaacaccgccaucgccaagugcaacgagaagcacgacgaggaguucugcgacaugcugagacuguucgacuucaacaagcaggccaucagaagacugaaggcccccgcccagaugagcauccagcugaucaacaaggccgugaacgcccugaucaacgaccagcugaucaugaagaaccaccugagagacaucaugugcauccccuacugcaacuacagcaaguacugguaccugaaccacaccgugaccggcaagaccagccugcccaagugcuggcuggugagcaacggcagcuaccugaacgagacccacuucagcgacgacaucgagcagcaggccgacaacaugaucaccgagcugcugcagaaggaguacauggacagacagggcaagaccccccugggccugguggaccuguucguguucagcaccagcuucuaccugaucagcaucuuccugcaccuggugaagauccccacccacagacacaucgugggcagacccugccccaagccccacagacugaaccacaugggcaucugcagcugcggccuguacaagcaccccggcgugcccgugaaguggaagagauga

SEQ ID NO: 5162 - RNA, 1473 nt, Artificial Sequence
  derived and/or modified protein sequence (opt4) from LASV(Lassa virus/H.sapiens-wt/NGA/2016/ISTH_0565;Clade II)__AVO03637__GPCstabilized
augggccagaucgugaccuucuuccaggaggugccccacgugaucgaggaggugaugaacaucgugcugaucgcccugagccugcuggccauccugaagggcaucuacaacguggccaccugcggccuguucggccugaucagcuuccugcugcugugcggcagaagcugcagcaccaccuacaagggcguguacgagcugcagacccuggagcuggacauggccaaccugaacaugaccaugccccugagcugcaccaagaacagcagccaccacuacaucauggugggcaacgagaccggccuggagcugacccugaccaacaccagcaucaucaaccacaaguucugcaaccugagcgacgcccacaagaagaaccuguacgaccacgcccugaugagcaucaucagcaccuuccaccugagcauccccaacuucaaccaguacgaggccaugagcugcgacuucaacggcggcaagaucagcgugcaguacaaccugagccacaccuacgccguggacgccgccaaccacugcggcaccaucgccaacggcgugcugcagaccuucaugagaauggccuggggcggcagcuacaucgcccuggacagcggcugcggcaacugggacugcaucaugaccagcuaccaguaccugaucauccagaacaccaccugggaggaccacugccaguucagcagacccagccccaucggcuaccugggccugcugagccagagaaccagagacaucuacaucagcagaagacgccggggcaccuucaccuggacccugagcgacagcgagggcaacgaggcccccggcggcuacugccugaccagauggaugcugaucgaggccgagcugaagugcuucggcaacaccgccaucgccaagugcaacgagaagcacgacgaggaguucugcgacaugcugagacuguucgacuucaacaagcaggccaucaagagacugaagagccccgcccagaugagcauccagcugaucaacaaggccgugaacgcccugaucaacgaccagcugaucaugaagaaccaccugagagacaucaugugcauccccuacugcaacuacagcagauacugguaccugaaccacaccgugaccggcaagaccagccugcccagaugcuggcugaucagcaacggcagcuaccugaacgagacccacuucagcgacgacaucgagcagcaggccgacaacaugaucaccgagcugcugcagaaggaguacauggacagacagggcaagaccccccugggccugguggaccuguucguguucagcaccagcuucuaccugaucagcaucuuccugcaccuggugaagauccccacccacagacacaucgugggcagacccugccccaagccccacagacugaaccacaugggcaucugcagcugcggccuguacaagcaccccggcgugcccgugaaguggaagagauga

SEQ ID NO: 5163 - RNA, 1473 nt, Artificial Sequence
  derived and/or modified protein sequence (opt4) from LASV(Lassa virus/H.sapiens-wt/NGA/2016/ISTH_0572;Clade II)__AVO03611__GPCstabilized
augggccagaucaucaccuucuuccaggaggugccccacgugaucgaggaggugaugaacaucgugcugaucgcccugagccugcuggccauccugaagggcaucuacaacguggccaccugcggccuguucggccugguggccuuccugcugcugugcggcagaagcugcagcaccaccuacaagggcguguacgagcugcagacccuggagcuggacauggccagccugaacaugaccaugccccugagcugcaccaagaacaacagccaccacuacaucauggugggcaacgagaccggccuggagcugacccugaccaacaccagcaucaucaaccacaaguucugcaaccugagcgacgcccacaagaagaaccuguacgaccacgcccugaugagcaucaucagcaccuuccaccugagcauccccaacuucaaccagcacgaggccaugagcugcgacuucaacggcggcaagaucagcgugcaguacaaccugagccacaccuacgccguggacgccgccaaccacugcggcaccaucgccaacggcgugcugcagaccuucaugagaauggccuggggcggcagcuacaucgcccuggacagcggcugcggcagcugggacugcaucaugaccagcuaccaguaccugaucauccagaacaccaccugggaggaccacugccaguucagcagacccagccccaucggcuaccugggccugcugagccagagaaccagagacaucuacaucagcagaagacgccggggcaccuucaccuggacccugagcgacagcgagggcaacgagacccccggcggcuacugccugaccagauggaugcugaucgaggccgagcugaagugcuucggcaacaccgccguggccaagugcaacgagaagcacgacgaggaguucugcgacaugcugagacuguucgacuucaacaagcaggccaucagaagacugaagacccccgcccagaugagcauccagcugaucaacaaggccgugaacgcccugaucaacgaccagcugaucaugaagaaccaccugagagacaucaugugcauccccuacugcaacuacagcaaguacugguaccugaaccacaccgugaccggcagaaccagccugcccagaugcuggcuggugagcaacggcagcuaccugaacgagacccacuucagcgacgacaucgagcagcaggccgacaacaugaucaccgagcugcugcagaaggaguacauggacagacagggcaagaccccccugggccugguggaccuguucguguucagcaccagcuucuaccugaucagcaucuuccugcaccugaucaagauccccacccacagacacgugaucggcaagcccugccccaagccccacagacugaaccacaugggcaucugcagcugcggccuguacaagcaccccggcgugcccgugaaguggaagagauga

SEQ ID NO: 5164 - RNA, 1473 nt, Artificial Sequence
  derived and/or modified protein sequence (opt4) from LASV(Lassa virus/H.sapiens-wt/NGA/2016/ISTH_0610;Clade II)__AVO03585__GPCstabilized
augggccagaucaucaccuucuuccaggaggugccccacgugaucgaggaggugaugaacaucgugcugaucgcccugagccugcuggccauccugaagggcguguacaacguggccaccugcggccuguucggccuggugagcuuccugcugcugugcggcagaagcugcagcaccaccuacaagggcguguacgagcugcagacccuggagcuggacauggccagccugaacaugaccaugccccugagcugcaccaagaacaacagccaccacuacaucauggugggcaacgagaccggccuggagcugacccugaccaacaccagcaucaucaaccacaaguucugcaaccugagcgacgcccacaagaagaaccuguacgaccacgcccugaugagcaucaucagcaccuuccaccugagcauccccaacuucaaccaguacgaggccaugagcugcgacuucaacggcggcaagaucagcgugcaguacaaccugagccacaccuacgccguggacgccgccaaccacugcggcaccaucgccaacggcgugcugcagaccuucaugagaauggccuggggcggcagcuacaucgcccuggacagcggcugcggcagcugggacugcaucaugaccagcuaccaguaccugaucauccagaacaccaccugggaggaccacugccaguucagcagacccagccccaucggcuaccugggccugcugagccagagaaccagagacaucuacaucagcagaagacgccggggcaccuucaccuggacccugagcgacagcgagggcaacgagacccccggcggcuacugccugaccagauggaugcugaucgaggccgagcugaagugcuucggcaacaccgccguggccaagugcaacgagaagcacgacgaggaguucugcgacaugcugagacuguucgacuucaacaagcaggccaucagaagacugaaggcccccgcccagaugagcauccagcugaucaacaaggccgugaacgcccugaucaacgaccagcugaucaugaagaaccaccugagagacaucaugugcauccccuacugcaacuacagcaaguacugguaccugaaccacaccgugaccggcagaaccagccugcccagaugcuggcuggugagcaacggcagcuaccugaacgagacccacuucagcgacgacaucgagcagcaggccgacaacaugaucaccgagcugcugcagaaggaguacaucgacagacagggcaagaccccccugggccugguggaccuguucguguucagcaccagcuucuaccugaucagcaucuuccugcaccuggugaagauccccacccacagacacaucaucggcaagcccugccccaagccccacagacugaaccacaugggcaucugcagcugcggccuguacaagcaccccggcgugcccgugaaguggaagagauga

SEQ ID NO: 5165 - RNA, 1473 nt, Artificial Sequence
  derived and/or modified protein sequence (opt4) from LASV(Lassa virus/H.sapiens-wt/NGA/2016/ISTH_0621;Clade II)__AVO03543__GPCstabilized
augggccagaucgugaccuucuuccaggagaucccccacgugguggaggagaucaugaacaucgugcugaucacccugagccugcuggccauccugaagggccuguacaacuucgccaccugcggccugaucggccugaucaccuuccuguuccugugcggcagaagcugcagcaccaucuacaagggcagcuaccagcugcaggcccuggagcugaacauggagacccugaacaugaccaugccccugagcugcaccaagaacaacagccaccacuacaucagagugggcaacgagaccggccuggagcugacccugaccaacaccagcaucaucgaccacaaguucugcaaccugagcgacgcccacaagagaaaccuguacgaccacacccugaugagcaucaucagcaccuuccaccugagcauccccaacuucaaccaguacgaggccaugagcugcgacuucaacggcggcaagaucagcgugcaguacaaccugagccacagcuacgccggcgacgccgccagacacugcggcaccguggccaacggcgugcugcagaccuucaugagaauggccuggggcggcagcuacaucgcccuggacagcggcugcggcaacugggacugcaucaugaccagcuaccaguaccugaucauccagaacaccaccugggagaaccacugccaguucagcagacccagccccaucggcuaccugggccugcugagccagagaaccagagacaucuacaucagcagaagacgccggggcaccuucaccuggacccugagcgacagcgagggcaaggagacccccggcggcuacugccugaccagauggaugcugaucgaggccgagcugaagugcuucggcaacaccgccguggccaagugcaacgagaagcacgacgaggaguucugcgacaugcugagacuguucgacuucaacaagcaggccauccagagacugaagacccccgcccagaugagcauccagcugaucaacaaggccgugaacgcccugaucaacgaccagcugaucaugaagaaccaccugagagacaucaugugcauccccuacugcaacuacagcaaguacugguaccugaaccacaccaccaccggcaagaccagccugcccaagugcuggcuggugagcaacggcagcuaccugaacgagacccacuucagcgacgacaucgagcagcaggccgacaacaugaucaccgagaugcugcagaaggaguacaucgacagacagggcaagaccccccugggccugguggaccuguucguguucagcaccagcuucuaccugaucagcaucuuccugcaccugaucaagauccccacccacagacacaucgugggcaagagcugccccaagccccacagacugaaccacaugggcaucugcagcugcggccuguacaagcagcccggcgugcuggugaaguggaagagauga

SEQ ID NO: 5166 - RNA, 1473 nt, Artificial Sequence
  derived and/or modified protein sequence (opt4) from LASV(Lassa virus/H.sapiens-wt/NGA/2016/ISTH_0701;Clade II)__AVO03629__GPCstabilized
augggccagaucaucaccuucuuccaggaggugccccacgugaucgaggaggugaugaacaucgugcugaucgcccugagccugcuggccauccugaagggcaucuacaacguggccaccugcggccuguucggccuggugagcuuccugcugcugugcggcagaagcugcagcaccaccuacaagggcguguacgagcugcagacccuggagcuggacauggccagccugaacaugaccaugccccugagcugcaccaagaacaacagccaccacuacaucauggugggcaacgagaccggccuggagcugacccugaccaacaccagcaucaucggccacaaguucugcaaccugagcgacgcccacaagaagaaccuguacgaccacgcccugaugagcaucaucagcaccuuccaccugagcauccccaacuucaaccaguacgaggccaugagcugcgacuucaacggcggcaagaucagcgugcaguacaaccugagccacgccuacgccguggacgccgccaaccacugcggcaccaucgccaacggcgugcugcagaccuucaugagaauggccuggggcggcagcuacaucgcccuggacagcggcugcggcagcugggacugcaucaugaccagcuaccaguaccugaucauccagaacaccaccugggaggaccacugccaguucagcagacccagccccaucggcuaccugggccugcugagccagagaaccagagacaucuacaucagcagaagacgccggggcaccuucaccuggacccugagcgacagcgagggcaacgagacccccggcggcuacugccugaccagauggaugcugaucgaggccgagcugaagugcuucggcaacaccgccguggccaagugcaacgagaagcacgacgaggaguucugcgacaugcugagacuguucgacuucaacaagcaggccaucagaagacugaagacccccgcccagaugagcauccagcugaucaacaaggccgugaacgcccugaucaacgaccagcugaucaugaagaaccaccugagagacaucaugugcauccccuacugcaacuacagcaaguacugguaccugaaccacaccgugaccggcaagaccagccugcccagaugcuggcuggugagcaacggcagcuaccugaacgagacccacuucagcgacgacaucgagcagcaggccgacaacaugaucaccgagcugcugcagaaggaguacaucgacagacagggcaagaccccccugggccugguggaccuguucguguucagcaccagcuucuaccugaucagcaucuuccugcaccuggugaagauccccacccacagacacgugaucggcaagcccugccccaagccccacagacugaaccacaugggcaucugcagcugcggccuguacaagcaccccggcgugcccgugaaguggaagagauga

SEQ ID NO: 5167 - RNA, 1473 nt, Artificial Sequence
  derived and/or modified protein sequence (opt4) from LASV(Lassa virus/H.sapiens-wt/NGA/2016/ISTH_0702;Clade II)__AVO03557__GPCstabilized
augggccagaucaucaccuucuuccaggaggugccccacgugaucgaggaggugaugaacaucgugcugaucgcccugagccugcuggccgugcugaagggcaucuacaacguggccaccugcggccuguucggccugguggccuuccugcugcugugcggcagaagcugcagcaccaccuacaagggcguguacgagcugcagacccuggagcuggacauggccaaccugaacaugaccaugccccugagcugcaccaagaacaacagccaccacuacaucauggugggcaacgagaccggccuggagcugacccugaccaacaccagcaucaucaaccacaaguucugcaaccugagcgacgcccacaagaagaaccuguacgaccacgcccugaugagcaucaucagcaccuuccaccugagcauccccaacuucaaccaguacgaggccaugagcugcgacuucaacggcggcaagaucagcgugcaguacaaccugagccacaccuacgccguggacgccgccaaccacugcggcaccaucgccaacggcgugcugcagaccuucaugagaauggccuggggcggcagcuacaucgcccuggacagcggcugcggcagcugggacugcaucaugaccagcuaccaguaccugaucauccagaacaccaccugggaggaccacugccaguucagcagacccagccccaucggcuaccugggccugcugagccagagaaccagagacaucuacaucagcagaagacgccggggcaccuucaccuggacccugagcgacagcgagggcaacgagacccccggcggcuacugccugaccagauggaugcugaucgaggccgagcugaagugcuucggcaacaccgccguggccaagugcaacgagaagcacgacgaggaguucugcgacaugcugagacuguucgacuucaacaagcaggccaucagaagacugaagacccccgcccagaugagcauccagcugaucaacaaggccgugaacgcccugaucaacgaccagcugaucaugaagaaccaccugagagacaucaugugcauccccuacugcaacuacagcaaguacugguaccugaaccacaccgugaccggcagaaccagccugcccagaugcuggcuggugagcaacggcagcuaccugaacgagacccacuucagcgacgacaucgagcagcaggccgacaacaugaucaccgagcugcugcagaaggaguacauggacagacagggcaagaccccccugggccugguggaccuguucguguucagcaccagcuucuaccugaucagcaucuuccugcaccugaucaagauccccacccacagacacgugaucggcaagcccugccccaagccccacagacugaaccacaugggcaucugcagcugcggccuguacaagcaccccggcgugcccgugaaguggaagagauga

SEQ ID NO: 5168 - RNA, 1473 nt, Artificial Sequence
  derived and/or modified protein sequence (opt4) from LASV(Lassa virus/H.sapiens-wt/NGA/2016/ISTH_0703;Clade II)__AVO03597__GPCstabilized
augggccagaucaucaccuucuuccaggaggugccccacgugaucgaggaggugaugaacaucgugcugaucgcccugagccugcuggccauccugaagggcaucuacaacguggccaccugcggccuguucggccuggugagcuuccugcugcugugcggcagaagcugcagcaccaccuacaagggcguguacgagcugcagacccuggagcuggacauggccagccugaacaugaccaugccccugagcugcaccaagaacaacagccaccacuacaucauggugggcaacgagaccggccuggagcugacccugaccaacaccagcaucaucaaccacaaguucugcaaccugagcgacgcccacaagaagaaccuguacgaccacgcccugaugagcaucaucagcaccuuccaccugagcauccccaacuucaaccaguacgaggccaugagcugcgacuucaacggcggcaagaucagcgugcaguacaaccugagccacaccuacgccguggacgccgccagccacugcggcaccaucgccaacggcgugcugcagaccuucaugagaauggccuggggcggcagcuacaucgcccuggacagcggcugcggcagcugggacugcaucaugaccagcuaccaguaccugaucauccagaacaccaccugggaggaccacugccaguucagcagacccagccccaucggcuaccugggccugcugagccagagaaccagagacaucuacaucagcagaagacgccggggcaccuucaccuggacccugagcgacagcgagggcaacgagacccccggcggcuacugccugaccagauggaugcugaucgaggccgagcugaagugcuucggcaacaccgccguggccaagugcaacgagaagcacgacgaggaguucugcgacaugcugagacuguucgacuucaacaagcaggccaucagaagacugaagacccccgcccagaugagcauccagcugaucaacaaggccgugaacgcccugaucaacgaccagcugaucaugaagaaccaccugagagacaucaugugcauccccuacugcaacuacagcaaguacugguaccugaaccacaccgugaccggcagaaccagccugcccagaugcuggcuggugagcaacggcagcuaccugaacgagacccacuucagcgacgacaucgagcagcaggccgacaacaugaucaccgagcugcugcagaaggaguacaucgagagacagggcaagaccccccugggccugguggaccuguucguguucagcaccagcuucuaccugaucagcaucuuccugcaccugaucaagauccccacccacagacacgugaucggcaagcccugccccaagccccacagacugaaccacaugggcaucugcagcugcggccuguacaagcaccccggcgugcccgugaaguggaagagauga

SEQ ID NO: 5169 - RNA, 1473 nt, Artificial Sequence
  derived and/or modified protein sequence (opt4) from LASV(Lassa virus/H.sapiens-wt/NGA/2016/ISTH_0717;Clade II)__AVO03547__GPCstabilized
augggccagaucgugaccuucuuccaggaggugccccacgugaucgaggaggugaugaacaucgugcugaucgcccugagcauccuggccauccugaagggccuguacaacguggccaccugcggccugaucggccuggugaccuuccugcugcugagcggcagaagcugcagcaugaucuacaagggcguguacgagcugcagacccuggagcugaacauggagacccugaacaugaccaugccccugagcugcaccaagaacaacagccaccacuacaucauggugggcaacgagaccggccuggagcugacccugaccaacaccagccugcugaaccacaaguucugcaaccugagcgacgcccacaagaagaaccuguacgaccacacccugaugagcaucaucagcaccuuccaccugagcauccccaacuucaaccaguacgaggccaugagcugcgacuucaacggcggcaagaucaccgugcaguacaaccugagccacaccuacgccguggacgccgugaaccacugcggcacccuggccaacggcauccugcagaccuucaugagaauggccuggggcggcagcuacaucgcccuggacagcagaugcggcagcugggacugcaucaugaccagcuaccaguaccugaucauccagaacaccaccugggaggaccacugccaguucagcagacccagccccaucggcuaccugggccugcugagccagagaaccagagacaucuacaucagcagaagacgccggggcaccuucaccuggacccugagcgacagcgagggcaacgagacccccggcggcuacugccugaccagauggaugcugaucgaggccgagcugaagugcuucggcaacaccgccguggccaagugcaacgagaagcacgacgaggaguucugcgacaugcugagacuguucgacuucaacaagcaggccaucagaagacugaaggcccccgcccagaugagcauccagcugaucaacaaggccgugaacgcccugaucaacgaccagcugaucaugaagaaccaccugagagacaucaugugcauccccuacugcaacuacagcaaguacugguaccugaaccacaccagcaccggcagaaccagccugcccagaugcuggcuggugagcaacggcagcuaccugaacgagacccacuucagcgacgacaucgagcagcaggccgacaacaugaucaccgagaugcugcagaaggaguaccuggacagacagggcaagaccccccugggccugguggaccuguucguguucagcaccagcuucuaccugaucagcaucuuccugcaccugaucaagauccccacccacagacacaucgugggcaagcccugccccaagccccacagacugaaccacaugggcaucugcagcugcggccuguacaagcagcccggcgugcccgugagauggaagagauga

SEQ ID NO: 5170 - RNA, 1473 nt, Artificial Sequence
  derived and/or modified protein sequence (opt4) from LASV(Lassa virus/H.sapiens-wt/NGA/2016/ISTH_0753;Clade II)__AVO03609__GPCstabilized
augggccagaucaucaccuucuuccaggaggugccccacgugaucgaggaggugaugaacaucgugcugaucgcccugagccugcuggccauccugaagggcaucuacaacguggccaccugcggccuguucggccuggugagcuuccugcugcugugcggcagaagcugcagcaccaccuacaagggcguguacgagcugcagacccuggagcuggacauggccagccugaacaugaccaugccccugagcugcaccaagaacaacagccaccacuacaucauggugggcaacgagaccggccuggagcugacccugaccaacaccagcaucaucaaccacaaguucugcaaccugagcgacgcccacaagaagaaccuguacgaccacgcccugaugagcaucaucagcaccuuccaccugagcauccccaacuucaaccaguacgaggccaugagcugcgacuucaacggcggcaagaucagcgugcaguacaaccugagccacaccuacgccguggacgccgccaaccacugcggcaccaucgccaacggcgugcugcagaccuucaugagaauggccuggggcggcagcuacaucgcccuggacagcggcugcggcaacugggacugcaucaugaccagcuaccaguaccugaucauccagaacaccaccugggaggaccacugccaguucagcagacccagccccaucggcuaccugggccugcugagccagagaaccagagacaucuacaucagcagaagacgccggggcaccuucaccuggacccugagcgacagcgagggcaacgagacccccggcggcuacugccugaccagauggaugcugaucgaggccgagcugaagugcuucggcaacaccgccguggccaagugcaacgagaagcacgacgaggaguucugcgacaugcugagacuguucgacuucaacaagcaggccaucagcagacugaagacccccgcccagaugagcauccagcugaucaacaaggccgugaacgcccugaucaacgaccagcugaucaugaagaaccaccugagagacaucaugugcauccccuacugcaacuacagcaaguacugguaccugaaccacaccgugaccggcagaaccagccugcccagaugcuggcuggugagcaacggcagcuaccugaacgagacccacuucagcgacgacaucgagcagcaggccgacaacaugaucaccgagcugcugcagaaggaguacauggacagacagggcaagaccccccugggccugguggaccuguucguguucagcaccagcuucuaccugaucagcaucuuccugcaccuggugaagauccccacccacagacacgugaucggcaagcccugccccaagccccacagacugaaccacaugggcaucugcagcugcggccuguacaagcaccccggcgugcccgugaaguggaagagauga

SEQ ID NO: 5171 - RNA, 1473 nt, Artificial Sequence
  derived and/or modified protein sequence (opt4) from LASV(Lassa virus/H.sapiens-wt/NGA/2016/ISTH_0759;Clade II)__AVO03593__GPCstabilized
augggccagaucaucaccuucuuccaggaggugccccacgugaucgaggaggugaugaacaucgugcugaucgcccugagccugcuggccauccugaagggcaucuacaacguggccaccugcggccuguucggccuggugagcuuccugcugcugugcggcagaagcugcagcaccaccuacaagggcguguacgagcugcagacccuggagcuggacauggccagccugaacaugaccaugccccugagcugcaccaagaacaacagccaccacuacaucauggugggcaacgagaccggccuggagcugacccugaccaacaccagcaucaucaaccacaaguucugcaaccugagcgacgcccacaagaagaaccuguacgaccacacccugaugagcaucaucagcaccuuccaccugagcauccccaacuucaaccaguacgaggccaugagcugcgacuucaacggcggcaagaucagcgugcaguacaaccugagccacaccuacgccguggacgccgccaaccacugcggcaccaucgccaacggcgugcugcagaccuucaugagaauggccuggggcggcagcuacaucgcccuggacagcggcugcggcagcugggacugcaucaugaccagcuaccaguaccugaucauccagaacaccagcugggaggaccacugccaguucagcagacccagccccaucggcuaccugggccugcugagccagagaaccagagacaucuacaucagcagaagacgccggggcaccuucaccuggacccugagcgacagcgagggcaacgagacccccggcggcuacugccugaccagauggaugcugaucgaggccgagcugaagugcuucggcaacaccgccguggccaagugcaacgagaagcacgacgaggaguucugcgacaugcugagacuguucgacuucaacaagcaggccaucagaagacugaagacccccgcccagaugagcauccagcugaucaacaaggccgugaacgcccugaucaacgaccagcugaucaugaagaaccaccugagagacaucaugugcauccccuacugcaacuacagcaaguacugguaccugaaccacaccgugaccggcaagaccagccugcccagaugcuggcuggugagcaacggcagcuaccugaacgagacccacuucagcgacgacaucgagcagcaggccgacaacaugaucaccgagcugcugcagaaggaguacaucgacagacagggcaagaccccccugggccugguggaccuguucguguucagcaccagcuucuaccugaucagcaucuuccugcaccuggugaagauccccacccacagacacgugaucggcaagcccugccccaagccccacagacugaaccacaugggcaucugcagcugcggccuguacaagcaccccggcgugcccgugaaguggaagagauga

SEQ ID NO: 5172 - RNA, 1473 nt, Artificial Sequence
  derived and/or modified protein sequence (opt4) from LASV(Lassa virus/H.sapiens-wt/NGA/2016/ISTH_0777;Clade II)__AVO03615__GPCstabilized
augggccagaucaucaccuucuuccaggaggugccccacgugaucgaggaggugaugaacaucgugcugaucgcccugagccugcuggccauccugaagggcaucuacaacguggccaccugcggccugcugggccugaucagcuuccugcugcugugcggcagaagcugcagcaccaccuacaagggcguguacgagcugcagacccuggagcuggacauggccaaccugaacaugaccaugccccugagcugcaccaagaacagcagccaccacuacaucauggugggcaacgagaccggccuggagcugacccugaccaacaccagcaucaucaaccacaaguucugcaaccugagcgacgcccacaagaagaaccuguacgaccacgcccugaugagcaucaucagcaccuuccaccugagcauccccaacuucaaccaguacgaggccaugagcugcgacuucaacggcggcaagaucagcgugcaguacaaccugagccacgccuacgccguggacgccgccaaccacugcggcaccaucgccaacggcgugcugcagaccuucaugagaauggccuggggcggcagcuacaucgcccuggacagcggcugcggcaacugggacugcaucaugaccagcuaccaguaccugaucauccagaacaccaccugggaggaccacugccaguucagcagacccagccccaucggcuaccugggccugcugagccagagaaccagagacaucuacaucagcagaagacgccggggcaccuucaccuggacccugagcgacagcgagggcaacgaggcccccggcggcuacugccugaccagauggaugcugaucgaggccgagcugaagugcuucggcaacaccgccaucgccaagugcaacgagaagcacgacgaggaguucugcgacaugcugagacuguucgacuucaacaagcaggccaucagaagacugaagacccccgcccagaugagcauccagcugaucaacaaggccgugaacgcccugaucaacgaccagcugaucaugaagaaccaccugagagacaucaugugcauccccuacugcaacuacagcaaguacugguaccugaaccacaccgugaccggcaagaccagccugcccagaugcuggcugaucagcaacggcagcuaccugaacgagacccacuucagcgacgacaucgagcagcaggccgacaacaugaucaccgagcugcugcagaaggaguacauggacagacagggcaagaccccccugggccugguggaccuguucguguucagcaccagcuucuaccugaucagcaucuuccugcaccuggugaagauccccacccacagacacaucgugggcaagcccugccccaagccccacagacugaaccacaugggcaucugcagcugcggccuguacaagcaccccggcgugcccgugaaguggaagagauga

SEQ ID NO: 5173 - RNA, 1473 nt, Artificial Sequence
  derived and/or modified protein sequence (opt4) from LASV(Lassa virus/H.sapiens-wt/NGA/2016/ISTH_0779;Clade II)__AVO03655__GPCstabilized
augggccagaucaucaccuucuuccaggaggugccccacgugguggaggaggugaugaacguggugcugaucgcccugagccugcuggccauccugaagggcaucuacaacaucgccaccugcggccuguucggccugaucagcuuccugcugcugugcggcagaagcugcagcaccaccuacaagggcguguacgagcugcagacccuggagcuggacauggccaaccugaacaugaccaugccccugagcugcaccaagaacaacagccaccacuacaucauggugggcaacgagaccggccuggagcugacccugaccaacaccagcaucaucaaccacaaguucugcaaccugagcgacgcccacaagaagaaccuguacgaccacacccugaugagcaucaucagcaccuuccaccugagcauccccaacuucaaccaguacgaggccaugagcugcgacuucaacggcggcaagaucagcgugcaguacaaccugagccacggcuacgccguggacgccgccaaccacugcggcaccaucgccaacggcgugcugcagaccuucaugagaauggccuggggcggcagcuacaucgcccuggacagcggcugcggcaacugggacugcaucaugaccagcuaccaguaccuggugauccagaacaccaccugggaggaccacugccaguucagcagacccagccccaucggcuaccugggccugcugagccagagaaccagagacaucuacaucagcagaagacgccggggcaccuucaccuggacccugagcgacagcgagggcaacgacgcccccggcggcuacugccugaccagauggaugcugaucgaggccgagcugaagugcuucggcaacaccgccaucgccaagugcaacgagaagcacgacgaggaguucugcgacaugcugagacuguucgacuucaacagacaggccaucaagagacugaagacccccgcccagaugagcauccagcugaucaacaaggccgugaacgcccugaucaacgaccagcugaucaugaagaaccaccugagagacaucaugugcauccccuacugcaacuacagcaaguacugguaccugaacaacaccgugaccggcaagagcagccugcccaagugcuggcuggugagcaacggcagcuaccugaacgagacccacuucagcgacgacaucgagcagcaggccgacaacaugaucaccgagaugcugcagaaggaguacaucgacagacagggcaagaccccccugggccugguggaccuguucguguucagcaccagcuucuaccugaucagcaucuuccugcaccuggugagaauccccacccacagacacaucaccggcaagcccugccccaagccccacagacugaaccacaugggcaucugcagcugcggccuguacaagcagcccggcgugcccgugaaguggaagagauga

SEQ ID NO: 5174 - RNA, 1473 nt, Artificial Sequence
  derived and/or modified protein sequence (opt4) from LASV(Lassa virus/H.sapiens-wt/NGA/2016/ISTH_0917;Clade II)__AVO03535__GPCstabilized
augggccagaucgugaccuucuuccaggaggugccccacgugaucgaggagaucaugaacaucgugcugaucacccugagccugcuggccauccugaagggcguguacaaccuggccaccugcggccugaucggccugaucaccuuccuguuccugugcggcagaagcugcagcaugaccuacaagggcaacuaccagcuggagacccuggagcugaacauggagaugcugaacaugaccaugccccugagcugcaccaagaacaacagccaccacuacaucagagugggcaacgagaccggccuggagcugacccugaccaacaccagcaucauccagcacaaguucugcaaccugagcgacgcccacaagagaaaccuguacgaccacagccugaugagcaucgugagcaccuuccaccugagcauccccaacuucaaccaguacgaggccaugagcugcgacuucaacggcggcaagaucagcauccaguacaaccugagccacaccuacgccggcgacgccgccaagcacugcggcacccuggccaacggcauccugcagaccuucaugagaauggccuggggcggcagcuacaucgcccuggacagcggcugcggcggcugggacugcaucaugaccaacuaccaguaccugaucauccagaacgugaccugggaggaccacugccaguucagcagacccagccccaucggcuaccugggccugcugagccagagaaccagagagguguacaucagcagaagacgccggggcaccuucaccuggacccugagcgacagcgagggcaacgaggcccccggcggcuacugccugaccagauggaugcugaucgaggccgagcugaagugcuucggcaacaccgccguggccaagugcaacgagaagcacgacgaggaguucugcgacaugcugagacuguucgacuucaacaagcaggccaucagaagacugaaggcccccacccagaugagcauccagcugaucaacaaggccgugaacgcccugaucaacgaccagcugaucaugaagaaccaccugagagacaucaugugcauccccuacugcaacuacagcaaguacugguaccugaaccacaccaucaccggcagaaccagccugcccagaugcuggcuggugagcaacggcagcuaccugaacgagacccacuucagcgacgacaucgagcagcaggccgacaacaugaucaccgagaugcugcagaaggaguacaucgacagacagggcaagaccccccugggccugguggaccuguucguguucagcaccagcuucuaccugaucagcaucuuccugcaccuggugaagauccccacccacagacacaucgugggcaagagcugccccaagccccacagacugaaccacaugggcaucugcagcugcggccuguacaagagacccggcgugagcgugagauggaagagauga

SEQ ID NO: 5175 - RNA, 1473 nt, Artificial Sequence
  derived and/or modified protein sequence (opt4) from LASV(Lassa virus/H.sapiens-wt/NGA/2016/ISTH_1006;Clade II)__AVO03643__GPCstabilized
augggccagaucaucaccuucuuccaggaggugccccacgugaucgaggaggugaugaacaucgugcugaucgcccugagccugcuggccauccugaagggcaucuacaacguggccaccugcggccuguucggccugguggccuuccugcugcugugcggcagaagcugcagcaccaccuacaagggcguguacgagcugcagacccuggagcuggacauggccagccugaacaugaccaugccccugagcugcaccaagaacaacagccaccacuacaucauggugggcaacgagaccggccuggagcugacccugaccaacaccagcaucaucaaccacaaguucugcaaccugagcgacgcccacaagaagaaccuguacgaccacgcccugaugagcaucaucagcaccuuccaccugagcauccccaacuucaaccaguacgaggccaugggcugcgacuucaacggcggcaagaucagcgugcaguacaaccugagccacagcuacgccguggacgccgccaaccacugcggcaccaucgccaacggcgugcugcagaccuucaugagaauggccuggggcggcagcuacaucgcccuggacagcggcugcggcagcugggacugcaucaugaccagcuaccaguaccugaucauccagaacaccaccugggaggaccacugccaguucagcagacccagccccaucggcuaccugggccugcugagccagagaaccagagacaucuacaucagcagaagacgccggggcaccuucaccuggacccugagcgacagcgagggcaacgagacccccggcggcuacugccugaccagauggaugcugaucgaggccgagcugaagugcuucggcaacaccgccguggccaagugcaacgagaagcacgacgaggaguucugcgacaugcugagacuguucgacuucaacaagcaggccaucagaagacugaagacccccgcccagaugagcauccagcugaucaacaaggccgugaacgcccugaucaacgaccagcugaucaugaagaaccaccugagagacaucaugugcauccccuacugcaacuacagcaaguacugguaccugaaccacaccgugaccggcagaaccagccugcccagaugcuggcuggugagcaacggcagcuaccugaacgagacccacuucagcgacgacaucgagcagcaggccgacaacaugaucaccgagcugcugcagaaggaguacauggacagacagggcaagaccccccugggccugguggaccuguucguguucagcaccagcuucuaccugaucagcaucuuccugcaccugaucaagauccccacccacagacacgugaucggcaagcccugccccaagccccacagacugaaccacaugggcaucugcagcugcggccuguacaagcaccccggcgugcccgugaaguggaagagauga

SEQ ID NO: 5176 - RNA, 1473 nt, Artificial Sequence
  derived and/or modified protein sequence (opt4) from LASV(Lassa virus/H.sapiens-wt/NGA/2016/ISTH_1026;Clade II)__AVO03589__GPCstabilized
augggccagaucaucaccuucuuccaggaggugccccacgugaucgaggaggugaugaacaucgugcugaucgcccugagccugcuggccauccugaagggcaucuacaacguggccaccugcggccuguucggccuggugagcuuccugcugcugugcggcagaagcugcagcaccaccuacaagggcguguacgagcugcagacccuggagcuggacauggccagccugaacaugaccaugccccugagcugcaccaagaacaacagccaccacuacaucauggugggcaacgagaccggccuggagcugacccugaccaacaccagcaucaucaaccacaaguucugcaaccugagcgacgcccacaagaagaaccuguacgaccacgcccugaugagcaucaucagcaccuuccaccugagcauccccaacuucaaccaguacgaggccaugagcugcgacuucaacggcggcaagaucagcgugcaguacaaccugagccacgccuacgccaucgacgccgccagccacugcggcaccaucgccaacggcgugcugcagaccuucaugagaauggccuggggcggcagcuacaucgcccuggacagcggcugcggcagcugggacugcaucaugaccagcuaccaguaccugaucauccagaacaccaccugggaggaccacugccaguucagcagacccagccccaucggcuaccugggccugcugagccagagaaccagagacaucuacaucagcagaagacgccggggcaccuucaccuggacccugagcgacagcgagggcaacgagacccccggcggcuacugccugaccagauggaugcugaucgaggccgagcugaagugcuucggcaacaccgccguggccaagugcaacgagaagcacgacgaggaguucugcgacaugcugagacuguucgacuucaacaagcaggccaucagaagacugaagacccccgcccagaugagcauccagcugaucaacaaggccgugaacgcccugaucaacgaccagcugaucaugaagaaccaccugagagacaucaugugcauccccuacugcaacuacagcaaguacugguaccugaaccacaccgugaccggcaagaccagccugcccagaugcuggcuggugagcaacggcagcuaccugaacgagacccacuucagcgacgacaucgagcagcaggccgacaacaugaucaccgagcugcugcagaaggaguaccuggacagacagggcaagaccccccugggccugguggaccuguucguguucagcaccagcuucuaccugaucagcaucuuccugcaccuggugaagauccccacccacagacacgugaucggcagacccugccccaagccccacagacugaaccacaugggcaucugcagcugcggccuguacaagcaccccggcgugcccgugaaguggaagagauga

SEQ ID NO: 5177 - RNA, 1473 nt, Artificial Sequence
  derived and/or modified protein sequence (opt4) from LASV(Lassa virus/H.sapiens-wt/NGA/2016/ISTH_1070;Clade II)__AVO03651__GPCstabilized
augggccagaucaucaccuucuuccaggaggugccccacgugaucgaggaggugaugaacaucgugcugaucgcccugagccugcuggccauccugaagggcaucuacaacguggccaccugcggccuguucggccuggugagcuuccugcugcugugcggcagaagcugcagcaccaccuacaagggcguguacgagcugcagacccuggagcuggacauggccagccugaacaugaccaugccccugagcugcaccaagaacaacagccaccacuacaucauggugggcaacgagaccggccuggagcugacccugaccaacaccagcaucaucaaccacaaguucugcaaccugagcgacgcccacaagaagaaccuguacgaccacgcccugaugagcaucaucagcaccuuccaccugagcauccccaacuucaaccaguacgaggccaugagcugcgacuucaacggcggcaagaucagcgugcaguacaaccugagccacaccuucgccguggacgccgccaaccacugcggcaccaucgccaacggcgugcugcagaccuucaugagaauggccuggggcggcagcuacaucgcccuggacagcggcugcggcagcugggacugcaucaugaccagcuaccaguaccugaucauccagaacaccaccugggaggaccacugccaguucagcagacccagccccaucggcuaccugggccugcugagccagagaaccagagacaucuacaucagcagaagacgccggggcaccuucaccuggacccugagcgacagcgagggcaacgagacccccggcggcuacugccugaccagauggaugcugaucgaggccgagcugaagugcuucggcaacaccgccguggccaagugcaacgagaagcacgacgaggaguucugcgacaugcugagacuguucgacuucaacaagcaggccaucagaagacugaagacccccgcccagaugagcauccagcugaucaacaaggccgugaacgcccugaucaacgaccagcugaucaugaagaaccaccugagagacaucaugugcauccccuacugcaacuacagcaaguacugguaccugaaccacaccgugaccggcaagaccagccugcccagaugcuggcuggugagcaacggcagcuaccugaacgagacccacuucagcgacgacaucgagcagcaggccgacaacaugaucaccgagcugcugcagaaggaguacauggacagacagggcaagaccccccugggccugguggaccuguucguguucagcaccagcuucuaccugaucagcaucuuccugcaccuggugaagauccccacccacagacacaucaucggcaagcccugccccaagccccacagacugaaccacaugggcaucugcagcugcggccuguacaagcaccccggcgugcccgugaaguggaagagauga

SEQ ID NO: 5178 - RNA, 1473 nt, Artificial Sequence
  derived and/or modified protein sequence (opt4) from LASV(Lassa virus/H.sapiens-wt/NGA/2016/ISTH_1123;Clade II)__AVO03645__GPCstabilized
augggccagaucaucaccuucuuccaggaggugccccacgugaucgaggaggugaugaacaucgugcugaucgcccugagccugcuggccauccugaagggcaucuacaacguggccaccugcggccuguucggccuggugagcuuccugcugcugugcggcagaagcugcagcaccaccuacaagggcguguacgagcugcagacccuggagcuggacaugggcagccugaacaugaccaugccccugagcugcaccaagaacaacagccaccacuacaucauggugggcaacgagaccggccuggagcugacccugaccaacaccagcaucaucaaccacaaguucugcaaccugagcgacgcccacaagaagaaccuguacgaccacgcccugaugagcaucaucagcaccuuccaccugagcauccccaacuucaaccaguacgaggccaugagcugcgacuucaacggcggcaagaucagcgugcaguacaaccugagccacgccuacgccguggacgccgccaaccacugcggcaccaucgccaacggcgugcugcagaccuucaugagaauggccuggggcggcagcuacaucgcccuggacagcggcugcggcagcugggacugcaucaugaccagcuaccaguaccugaucauccagaacaccagcugggaggaccacugccaguucagcagacccagccccaucggcuaccugggccugcugagccagagaaccagagacaucuacaucagcagaagacgccggggcaccuucaccuggacccugagcgacagcgagggcaacgagacccccggcggcuacugccugaccagauggaugcugaucgaggccgagcugaagugcuucggcaacaccgccguggccaagugcaacgagaagcacgacgaggaguucugcgacaugcugagacuguucgacuucaacaagcaggccaucagaagacugaagacccccgcccagaugagcauccagcugaucaacaaggccgugaacgcccugaucaacgaccagcugaucaugaagaaccaccugagagacaucaugugcauccccuacugcaacuacagcaaguacugguaccugaaccacaccgugaccggcaagaccagccugcccagaugcuggcuggugagcaacggcagcuaccugaacgagacccacuucagcgacgacaucgagcagcaggccgacaacaugaucaccgagcugcugcagaaggaguacaucgacagacagggcaagaccccccugggccugguggaccuguucguguucagcaccagcuucuaccugaucagcaucuuccugcaccuggugaagauccccacccacagacacgugaucggcaagcccugccccaagccccacagacugaaccacaugggcaucugcagcugcggccuguacaagcaccccggcgugcccgugaaguggaagagauga

SEQ ID NO: 5179 - RNA, 1473 nt, Artificial Sequence
  derived and/or modified protein sequence (opt4) from LASV(Lassa virus/H.sapiens-wt/NGA/2016/ISTH_1150;Clade II)__AVO03627__GPCstabilized
augggccaggugaucaccuucuuccaggagaucccccacgugaucgaggaggugaugaacaucgugcugaucacccugagccugcuggccauccugaagggcaucuacaacguggccaccugcggccuguucggccugaucagcuuccugcugcugugcggcagaagcugcagcaccaccuacaagggcguguacgagcugcagacccuggagcuggacauggccaaccugaacaugaccaugccccugagcugcaccaagaacagcagccaccacuacaucauggugggcaacgagaccggccuggagcugacccugaccaacaccagcaucaucaaccacaaguucugcaaccugagcgacgcccacaagaagaaccuguacgaccacgcccugaugagcaucaucagcaccuuccaccugagcauccccaacuucaaccaguacgaggccaugagcugcgacuucaacggcggcaagaucagcgugcaguacaaccugagccacgccuacgccguggacgccgccaaccacugcggcaccaucgccaacggcgugcugcagaccuucaugagaauggccuggggcggcagcuacaucgcccuggacagcggcugcggcaacugggacugcaucaugaccagcuaccaguaccugaucauccagaacaccaccugggaggaccacugccaguucagcagacccagccccaucggcuaccugggccugcugagccagagaaccagagacaucuacaucagcagaagacgccggggcaccuucaccuggacccugagcgacagcgagggcaacgaggcccccggcggcuacugccugaccagauggaugcugaucgaggccgagcugaagugcuucggcaacaccgccaucgccaagugcaacgagaagcacgacgaggaguucugcgacaugcugagacuguucgacuucaacaagcaggccaucagaagacugaagacccccgcccagaagagcauccagcugaucaacaaggccgugaacgcccugaucaacgaccagcugaucaugaagaaccaccugagagacaucaugugcauccccuacugcaacuacagcaaguacugguaccugaaccacaccgugaccggcaagaccagccugcccaagugcuggcugaucagcaacggcagcuaccugaacgagacccacuucagcgacgacaucgagcagcaggccgacaacaugaucaccgagcugcugcagaaggaguacauggacagacagggcaagaccccccugggccugguggaccuguucguguucagcaccagcuucuaccugaucagcaucuuccugcaccuggugaagauccccacccacagacacaucgugggcagacccugccccaagccccacagacugaaccacaugggcaucugcagcugcggccuguacaagcaccccggcgugcccgugaaguggaagagauga

SEQ ID NO: 5180 - RNA, 1473 nt, Artificial Sequence
  derived and/or modified protein sequence (opt4) from LASV(Lassa virus/H.sapiens-wt/NGA/2016/ISTH_1174;Clade II)__AVO03555__GPCstabilized
augggccagaucaucaccuucuuccaggaggugccccacgugaucgaggaggugaugaacaucgugcugaucgcccugagccugcuggccauccugaagggcaucuacaacguggccaccugcggcuucuucggccuggugagcuuccugcugcugugcggcagaagcugcagcaccaucuacaagggcguguacgagcugcagacccuggagcuggacauggccagccugaacaugaccaugccccugagcugcaccaagaacaacagccaccacuacaucauggugggcaacgagaccggccuggagcugacccugaccaacaccagcaucaucaaccacaaguucugcaaccugagcgacgcccacaagaagaaccuguacgaccacgcccugaugagcaucaucagcaccuuccaccugagcaucccccacuucaaccaguacgaggccaugagcugcgacuucaacggcggcaagaucagcgugcaguacaaccugagccacaccuacgccguggacgccgccaaccacugcggcaccaucgccaacggcgugcugcagaccuucaugagaauggccuggggcggcagcuacaucgcccuggacagcggcugcggcagcugggacugcaucaugaccagcuaccaguaccugaucauccagaacaccaccugggaggaccacugccaguucagcagacccagccccaucggcuaccugggccugcugagccagagaaccagagacaucuacaucagcagaagacgccggggcaccuucaccuggacccugagcgacagcgagggcaacgagacccccggcggcuacugccugaccagauggaugcugaucgaggccgagcugaagugcuucggcaacaccgccguggccaagugcaacgagaagcacgacgaggaguucugcgacaugcugagacuguucgacuucaacaagcaggccaucagaaagcugaagacccccgcccagaugagcauccagcugaucaacaaggccgugaacgcccugaucaacgaccagcugaucaugaagaaccaccugagagacaucaugugcauccccuacugcaacuacagcaaguacugguaccugaaccacaccgugaccggcaagaccagccugcccagaugcuggcuggugagcaacggcagcuaccugaacgagacccacuucagcgacgacaucgagcagcaggccgacaacaugaucaccgagcugcugcagaaggaguacauggacagacagggcaagaccccccugggccugguggaccuguucguguucagcaccagcuucuaccugaucagcaucuuccugcaccuggugaagauccccacccacagacacgugaucggcaagcccugccccaagccccacagacugaaccacaugggcaucugcagcugcggccuguacaagcaccccggcgugcccgugaaguggaagagauga

SEQ ID NO: 5181 - RNA, 1473 nt, Artificial Sequence
  derived and/or modified protein sequence (opt4) from LASV(Lassa virus/H.sapiens-wt/NGA/2016/ISTH_1207;Clade II)__AVO03599__GPCstabilized
augggccagaucaucaccuucuuccaggaggugccccacgugaucgaggaggugaugaacaucgugcugaucgcccugagccugcuggccauccugaagggcaucuacaacguggccaccugcggccuguucggccuggugagcuuccugcugcugugcggcagaagcugcagcaccaccuacaagggcguguacgagcugcagacccuggagcuggacaugaccagccugaacaugaccaugccccugagcugcaccaagaacaacagccaccacuacaucauggugggcaacgagaccggccuggagcugacccugaccaacaccagcaucaucaaccacaaguucugcaaccugagcgacgcccacaagaagaaccuguacgaccacgcccugaugagcaucaucagcaccuuccaccugagcauccccaacuucaaccaguacgaggccaugagcugcgacuucaacggcggcaagaucagcgugcaguacaaccugagccacaccuacgccguggacgccgccaaccacugcggcaccaucgccaacggcgugcugcagaccuucaugagaauggccuggggcggcagcuacaucgcccuggacagcggcugcggcagcugggacugcaucaugaccagcuaccaguaccugaucauccagaacaccaccugggaggaccacugccaguucagcagacccagccccaucggcuaccugggccugcugagccagagaaccagagacaucuacaucagcagaagacgccggggcaccuucaccuggacccugagcgacagcgagggcaacgacacccccggcggcuacugccugaccagauggaugcugaucgaggccgagcugaagugcuucggcaacaccgccguggccaagugcaacgagaagcacgacgaggaguucugcgacaugcugagacuguucgacuucaacaagcaggccaucagaagacugaagacccccgcccagaugagcauccagcugaucaacaaggccgugaacgcccugaucaacgaccagcugaucaugaagaaccaccugagagacaucaugugcauccccuacugcaacuacagcaaguacugguaccugaaccacaccgugaccggcaagaccagccugcccagaugcuggcuggugagcaacggcagcuaccugaacgagacccacuucagcgacgacaucgagcagcaggccgacaacaugaucaccgagcugcugcagaaggaguacaucgacagacagggcaagaccccccugggccugguggaccuguucguguucagcaccagcuucuaccugaucagcaucuuccugcaccuggugaagauccccacccacagacacgugaucggcaagcccugccccaagccccacagacugaaccacaugggcaucugcagcugcggccuguacaagcaccccggcgugcccgugaaguggaagagauga

SEQ ID NO: 5182 - RNA, 1473 nt, Artificial Sequence
  derived and/or modified protein sequence (opt4) from LASV(Lassa virus/H.sapiens-wt/NGA/2016/ISTH_1306;Clade II)__AVO03623__GPCstabilized
augggccagaucaucaccuucuuccaggaggugccccacgugaucgaggaggugaugaacaucgugcugaucgcccugagccugcuggccauccugaagggcaucuacaacguggccaccugcggccuguucggccuggugagcuuccugcugcugugcggcagaagcugcagcaccaccuacaagggcguguacgagcugcagacccuggagcuggacauggccagccugaacaugaccaugccccugagcugcaccaagaacaacagccaccacuacaucauggugggcaacgagaccggccuggagcugacccugaccaacaccagcaucaucaaccacaaguucugcaaccugagcgacgcccacaagaagaaccuguacgaccacgcccugaugagcaucaucagcaccuuccaccugagcauccccaacuucaaccaguacgaggccaugagcugcgacuucaacggcggcaagaucagcgugcaguacaaccugagccacaccuacgccguggacgccgccaaccacugcggcaccguggccaacggcgugcugcagaccuucaugagaauggccuggggcggcagcuacaucgcccuggacagcggcugcggcagcugggacugcaucaugaccagcuaccaguaccugaucauccagaacaccaccugggaggaccacugccaguucagcagacccagccccaucggcuaccugggccugcugagccagagaaccagagacaucuacaucagcagaagacgccggggcaccuucaccuggacccugagcgacagcgagggcaacgagacccccggcggcuacugccugaccagauggaugcugaucgaggccgagcugaagugcuucggcaacaccgccguggccaagugcaacgagaagcacgacgaggaguucugcgacaugcugagacuguucgacuucaacaagcaggccaucagaagacugaagacccccgcccagaugagcauccagcugaucaacaaggccgugaacgcccugaucaacgaccagcugaucaugaagaaccaccugagagacaucaugugcauccccuacugcaacuacagcaaguacugguaccugaaccacaccgugaccggcagaaccagccugcccagaugcuggcuggugagcaacggcagcuaccugaacgagacccacuucagcgacgacaucgagcagcaggccgacaacaugaucaccgagcugcugcagaaggaguacaucgacagacagggcaagaccccccugggccugguggaccuguucguguucagcaccagcuucuaccugaucagcaucuuccugcaccuggugaagauccccacccacagacacgugaucggcaagcccugccccaagccccacagacugaaccacaugggcaucugcagcugcggccuguacaagcaccccggcgugcccgugaaguggaagagauga

SEQ ID NO: 5183 - RNA, 1473 nt, Artificial Sequence
  derived and/or modified protein sequence (opt4) from LASV(Lassa virus/H.sapiens-wt/NGA/2016/ISTH_1311;Clade II)__AVO03575__GPCstabilized
augggccagaucgugaccuucuuccaggaggugccccacgugaucgaggaggugaugaacaucgugcugaucgcccugagccugcuggccauccugaagggcaucuacaacguggccaccugcggccuguucggccugaucagcuuccugcugcugugcggcagaagcugcagcaccaccuacaagggcguguacgagcugcagacccuggagcuggacauggccaaccugaacaugaccaugccccugagcugcaccaagaacaacagccaccacuacaucauggugggcaacgagaccggccuggagcugacccugaccaacaccagcaucaucaaccacaaguucugcaaccugagcgacgcccacaagaagaaccuguacgaccacgcccugaugagcaucaucagcaccuuccaccugagcauccccaacuucaaccaguacgaggccaugagcugcgacuucaacggcggcaagaucagcgugcaguacaaccugagccacgccuacgccggcgacgccgccagccacugcggcaccaucgccaacggcgugcugcagaccuucaugagaauggccuggggcggcagcuacaucgcccuggacagcggcugcggcaacugggacugcaucaugaccagcuaccaguaccugaucauccagaacaccaccugggaggaccacugccaguucagcagacccagccccaucggcuaccugggccugcugagccagagaaccagagacaucuacaucagcagaagacgccggggcaccuucaccuggacccugagcgacagcgagggcaacgacgcccccggcggcuacugccugaccagauggaugcugaucgaggccgagcugaagugcuucggcaacaccgccaucgccaagugcaacgagaagcacgacgaggaguucugcgacaugcugagacuguucgacuucaacaagcaggccaucaagagacugaagacccccgcccagaugagcauccagcugaucaacaaggccgugaacgcccugaucaacgaccagcugaucaugaagaaccaccugagagacaucaugugcauccccuacugcaacuacagcaaguacugguaccugaaccacaccaccaccggcaagaccagccugcccaagugcuggcugaucagcaacggcagcuaccugaacgagacccacuucagcgacgacaucgagcagcaggccgacaacaugaucaccgagcugcugcagaaggaguaccuggacagacagggcaagaccccccugggccugguggaccuguucguguucagcaccagcuucuaccugaucagcaucuuccugcaccugaucaagauccccacccacagacacaucgugggcagacccugccccaagccccacagacugaaccacaugggcaucugcagcugcggccuguacaagcaccccggcgugcccgugaaguggaagagauga

SEQ ID NO: 5184 - RNA, 1473 nt, Artificial Sequence
  derived and/or modified protein sequence (opt4) from LASV(Lassa virus/H.sapiens-wt/NGA/2016/ISTH_1423;Clade II)__AVO03577__GPCstabilized
augggccagaucgugaccuucuuccaggaggugccccacgugaucgaggaggugaugaacaucgugcugaucgcccugagccugcuggccauccugaagggcaucuacaacguggccaccugcggccuguucggccuggugagcuuccugcugcugugcggcagaagcugcagcaccaccuacaagggcguguacgagcugcagacccuggagcuggacauggccaaccugaacaugaccaugccccugagcugcaccaagaacaacagccaccacuacaucauggugggcaacgagaccggccuggagcugacccugaccaacaccagcaucaucaaccacaaguucugcaaccugagcgacgcccacaagaagaaccuguacgaccacgcccugaugagcaucaucagcaccuuccaccugagcauccccaacuucaaccaguacgaggccaugagcugcgacuucaacggcggcaagaucagcgugcaguacaaccugagccacagcuacgccguggacgccgccaaccacugcggcaccguggccaacggcgugcugcagaccuucaugagaauggccuggggcggcagcuacaucgcccuggacagcggcugcggcagcugggacugcaucaugaccagcuaccaguaccugaucauccagaacaucaccugggaggaccacugccaguucagcagacccagccccaucggcuaccugggccugcugagccagagaaccagagacaucuacaucagcagaagacgccggggcaccuucaccuggacccugagcgacagcgagggcaaggagacccccggcggcuacugccugaccagauggaugcugaucgaggccgagcugaagugcuucggcaacaccgccguggccaagugcaacgagaagcacgacgaggaguucugcgacaugcugagacuguucgacuucaacaagcaggccaucagaagacugaagacccccgcccagaugagcauccagcugaucaacaaggccgugaacgcccugaucaacgaccagcugaucaugaagaaccaccugagagacaucaugugcauccccuacugcaacuacagcaaguacugguaccugaaccacaccgugaccggcaagaccagccugcccagaugcuggcuggugagcaacggcagcuaccugaacgagacccacuucagcgacgacaucgagcagcaggccgacaacaugaucaccgagcugcugcagaaggaguacaucgacagacagggcaagaccccccugggccugguggaccuguucguguucagcaccagcuucuaccugaucagcaucuuccugcaccuggugaagauccccacccacagacacauccugggcaagcccugccccaagccccacagacugaaccacaugggcaucugcagcugcggccuguacaagcaccccggcgugcccgugaaguggaagagauga

SEQ ID NO: 5185 - RNA, 1473 nt, Artificial Sequence
  derived and/or modified protein sequence (opt4) from LASV(Lassa virus/H.sapiens-wt/NGA/2016/ISTH_1462;Clade II)__AVO03587__GPCstabilized
augggccagaucaucaccuucuuccaggaggugccccacgugaucgaggaggugaugaacaucgugcugaucgcccugagccugcuggccauccugaagggcaucuacaacguggccaccugcggccuguucggccuggugagcuuccugcugcugugcggcagaagcugcagcaccaccuacaagggcguguacgagcugcagacccuggagcuggacauggccagccugaacaugaccaugccccugagcugcaccaagaacaacagccaccacuacaucauggugggcaacgagaccggccuggagcugacccugaccaacaccagcaucaucaaccacaaguucugcaaccugagcgacgcccacaagaagaaccuguacgaccacgcccugaugagcaucaucagcaccuuccaccugagcauccccaacuucaaccaguacgaggccaugagcugcgacuucaacggcggcaagaucagcgugcaguacaaccugagccacaccuacgccguggacgccgccaaccacugcggcaccaucgccaacggcgugcugcagaccuucaugagaauggccuggggcggcagcuacaucgcccuggacagcggcugcggcagcugggacugcaucaugaccagcuaccaguaccugaucauccagaacaccaccugggaggaccacugccaguucagcagacccagccccaucggcuaccugggccugcugagccagagaaccagagacaucuacaucagcagaagacgccggggcaccuucaccuggacccugagcgacagcgagggcaacgagacccccggcggcuacugccugaccagauggaugcugaucgaggccgagcugaagugcuucggcaacaccgccguggccaagugcaacgagaagcacgacgaggaguucugcgacaugcugagacuguucgacuucaacaagcaggccaucagaagacugaagacccccgcccagaugagcauccagcugaucaacaaggccgugaacgcccugaucaacgaccagcugaucaugaagaaccaccugagagacaucaugugcauccccuacugcaacuacagcaaguacugguaccugaaccacaccgugaccggcagaaccagccugcccagaugcuggcuggugagcaacggcagcuaccugaacgagacccacuucagcgacgacaucgagcagcaggccgacaacaugaucaccgagcugcugcagaaggaguacaucgagagacagggcaagaccccccugggccugguggaccuguucguguucagcaccagcuucuaccugaucagcaucuuccugcaccugaucaagauccccacccacagacacgugaucggcaagcccugccccaagccccacagacugaaccacaugggcaucugcagcugcggccuguacaagcaccccggcgugcccgugaaguggaagagauga

SEQ ID NO: 5186 - RNA, 1473 nt, Artificial Sequence
  derived and/or modified protein sequence (opt4) from LASV(Lassa virus/H.sapiens-wt/NGA/2016/ISTH_1472;Clade II)__AVO03605__GPCstabilized
augggccagaucaucaccuucuuccaggaggugccccacgugaucgaggaggugaugaacaucgugcugaucgcccugagccugcuggccauccugaagggcaucuacaacguggccaccugcggccuguucggccuggugagcuuccugcugcugugcggcagaagcugcagcaccaccuacaagggcguguacgagcugcagacccuggagcuggacauggccagccugaacaugaccaugccccugagcugcaccaagaacaacagccaccacuacaucauggugggcaacgagaccggccuggagcugacccugaccaacaccagcaucaucaaccacaaguucugcaaccugagcgacgcccacaagaagaaccuguacgaccacgcccugaugagcaucaucagcaccuuccaccugagcauccccaacuucaaccaguacgaggccaugagcugcgacuucaacggcggcaagaucagcgugcaguacaaccugagccacaccuacgccguggacgccgccaaccacugcggcaccaucgccaacggcgugcugcagaccuucaugagaauggccuggggcggcagcuacaucgcccuggacagcggcugcggcagcugggacugcaucaugaccagcuaccaguaccugaucauccagaacaccaccugggaggaccacugccaguucagcagacccagccccaucggcuaccugggccugcugagccagagaaccagagacaucuacaucagcagaagacgccggggcaccuucaccuggacccugagcgacagcgagggcaacgagacccccggcggcuacugccugaccagauggaugcugaucgaggccgagcugaagugcuucggcaacaccgccguggccaagugcaacgagaagcacgacgaggaguucugcgacaugcugagacuguucgacuucaacaagcaggccaucagaagacugaagacccccgcccagaugagcauccagcugaucaacaaggccgugaacgcccugaucaacgaccagcugaucaugaagaaccaccugagagacaucaugugcauccccuacugcaacuacagcaaguacugguaccugaaccacaccgugaccggcagaaccagccugcccagaugcuggcuggugagcaacggcagcuaccugaacgagacccacuucagcgacgacaucgagcagcaggccgacaacaugaucaccgagcugcugcagaaggaguacaucgacagacagggcaagaccccccugggccugguggaccuguucguguucagcaccagcuucuaccugaucagcaucuuccugcaccugaucaagauccccacccacagacacgugaucggcaagcccugccccaagccccacagacugaaccacaugggcaucugcagcugcggccuguacaagcaccccggcgugcccgugaaguggaagagauga

SEQ ID NO: 5187 - RNA, 1473 nt, Artificial Sequence
  derived and/or modified protein sequence (opt4) from LASV(Lassa virus/H.sapiens-wt/NGA/2016/ISTH_1474;Clade II)__AVO03613__GPCstabilized
augggccagaucaucaccuucuuccaggaggugccccacgugaucgaggaggugaugaacaucgugcugaucgcccugagccugcuggccauccugaagggcaucuacaacguggccaccugcggccuguucggccuggugagcuuccugcugcugugcggcagaagcugcagcaccaccuacaagggcguguacgagcugcagacccuggagcuggacauggccagccugaacaugaccaugccccugagcugcaccaagaacaacagccaccacuacaucauggugggcaacgagaccggccuggagcugacccugaccaacaccagcaucauccaccacaaguucugcaaccugagcgacgcccacaagaagaaccuguacgaccacgcccugaugagcaucaucagcaccuuccaccugagcauccccaacuucaaccaguacgaggccaugagcugcgacuucaacggcggcaagaucagcgugcaguacaaccugagccacaccuacgccguggacgccgccaaccacugcggcaccaucgccaacggcgugcugcagaccuucaugagaauggccuggggcggcagcuacaucgcccuggacagcggcugcggcagcugggacugcaucaugaccagcuaccaguaccugaucauccagaacaccaccugggaggaccacugccaguucagcagacccagccccaucggcuaccugggccugcugagccagagaaccagagacaucuacaucagcagaagacgccggggcaccuucaccuggacccugagcgacagcgagggcaacgagacccccggcggcuacugccugaccagauggaugcugaucgaggccgagcugaagugcuucggcaacaccgccguggccaagugcaacgagaagcacgacgaggaguucugcgacaugcugagacuguucgacuucaacaagcaggccaucagaagacugaagacccccgcccagaugagcauccagcugaucaacaaggccgugaacgcccugaucaacgaccagcugaucaugaagaaccaccugagagacaucaugugcauccccuacugcaacuacagcaaguacugguaccugaaccacaccgugaccggcagaaccagccugcccagaugcuggcuggugagcaacggcagcuaccugaacgagacccacuucagcgacgacaucgagcagcaggccgacaacaugaucaccgagcugcugcagaaggaguacaucgacagacagggcaagaccccccugggccugguggaccuguucguguucagcaccagcuucuaccugaucagcaucuuccugcaccugaucaagauccccacccacagacacgugaucggcaagcccugccccaagccccacagacugaaccacaugggcaucugcagcugcggccuguacaagcaccccggcgugcccgugaaguggaagagauga

SEQ ID NO: 5188 - RNA, 1476 nt, Artificial Sequence
  derived and/or modified protein sequence (opt4) from LASV(Lassa virus/H.sapiens-wt/NGA/2016/ISTH_1496;Clade II)__AVO03579__GPCstabilized
augggccagaucaucaccuucuuccaggaggugccccacgugaucgaggaggugaugaacaucgugcugaucgcccugagccugcuggccauccugaagggcguguacaacguggccaccugcggccuguucggccuggugagcuuccugcugcugugcggcagaagcugcagcaccaccaucuacaagggcguguacgagcugcagacccuggagcuggacauggccagccugaacaugaccaugccccugagcugcaccaagaacaacagccaccacuacaucauggugggcaacgagaccggccuggagcugacccugaccaacaccagcaucaucaaccacaaguucugcaaccugagcgacgcccacaagaagaaccuguacgaccacgcccugaugagcaucaucagcaccuuccaccugagcauccccaacuucaaccaguacgaggccaugagcugcgacuucaacggcggcaagaucagcgugcaguacaaccugagccacgccuacgccguggacgccgccaaccacugcggcaccaucgccaacggcgugcugcagaccuucaugagaauggccuggggcggcagcuacaucgcccuggacagcggcugcagaagcugggacugcaucaugaccagcuaccaguaccugaucauccagaacaccaccugggaggaccacugccaguucagcagacccagccccaucggcuaccugggccugcugagccagagaaccagagacaucuacaucagcagaagacgccggggcaccuucaccuggacccugagcgacagcgagggcaacgagacccccggcggcuacugccugaccagauggaugcugaucgaggccgagcugaagugcuucggcaacaccgccguggccaagugcaacgagaagcacgacgaggaguucugcgacaugcugagacuguucgacuucaacaagcaggccaucagaagacugaagacccccgcccagaugagcauccagcugaucaacaaggccgugaacgcccugaucaacgaccagcugaucaugaagaaccaccugagagacaucaugugcauccccuacugcaacuacagcaaguacugguaccugaaccacaccgugaccggcaagaccagccugcccagaugcuggcuggugagcaacggcagcuaccugaacgagacccacuucagcgacgacaucgagcagcaggccgacaacaugaucaccgagcugcugcagaaggaguacaucgacagacagggcaagaccccccugggccugguggaccuguucguguucagcaccagcuucuaccugaucagcaucuuccugcaccuggugaagauccccacccacagacacgugaucggcaagcccugccccaagccccacagacugaaccacaugggcaucugcagcugcggccuguacaagcaccccggcgugcccgugaaguggaagagauga

SEQ ID NO: 5189 - RNA, 1473 nt, Artificial Sequence
  derived and/or modified protein sequence (opt4) from LASV(Lassa virus/H.sapiens-wt/NGA/2016/ISTH_1541;Clade II)__AVO03553__GPCstabilized
augggccagaucgugaccuucuuccaggaggugccccacgugaucgaggagaucaugaacaucgugcugaucacccugagccugcuggccgugcugaagggcaucuacaacuucgccaccugcggccugaucggccugaucaccuuccuguuccugugcggcagaagcugcagcaccaucuacaagggcaacuaccagcugcagacccuggagcugaacauggagacccugaacaugaccaugccccugagcugcaccaagaacaacagccaccacuacaucagagugggcaacgagaccggccuggagcugacccugaccaacgugagcaucaucaaccacagauucugcaaccugagcgacgcccacaagagaaaccuguacgaccacacccugaugagcaucaucagcaccuuccaccugagcauccccaacuucaaccaguacgaggccaugagcugcgacuucaacggcggcaagaucagcgugcaguacaaccugagccacggcuacgccguggacgccgccaagcacugcggcaccguggccaacggcgugcugcagaccuucaugagaauggccuggggcggcagcuacaucgcccuggacagcggcugcggcaacugggacugcaucaugaccagcuaccaguaccugaucauccagaacaccaccugggaggaccacugccaguucagcagacccagccccaucggcuaccugggccugcugagccagagaaccagagacaucuacaucagcagaagacgccggggcaccuucaccuggacccugagcgacagcgagggcagagagacccccggcggcuacugccugaccagauggaugcugaucgaggccgagcugaagugcuucggcaacaccgccguggccaagugcaacgagaagcacgacgaggaguucugcgacaugcugagacuguucgacuucaacaagcaggccauccagagacugaagacccccgcccagaugagcauccagcugaucaacaaggccgugaacgcccugaucaacgaccagcugaucaugaagaaccaccugagagacaucaugugcauccccuacugcaacuacagcaaguacugguaccugaaccacaccaccaccggcaagaccagccugcccaagugcuggcuggugaccaacggcagcuaccugaacgagacccacuucagcgacgacaucgagcagcaggccgacaacaugaucaccgagaugcugcagaaggaguacaucgacagacagggcaagaccccccugggccugguggaccuguucguguucagcaccagcuucuaccugaucagcaucuuccugcaccugaucaagauccccaaccacagacacaucgugggcaagcccugccccaagccccacagacugaaccacaugggcaucugcagcugcggcuucuacaagcagcccggcgugcccgugagauggaagagauga

SEQ ID NO: 5190 - RNA, 1473 nt, Artificial Sequence
  derived and/or modified protein sequence (opt4) from LASV(Lassa virus/H.sapiens-wt/NGA/2016/ISTH_1546;Clade II)__AVO03537__GPCstabilized
augggccagaucgugaccuucuuccaggagaucccccacgugguggaggagaucaugaacaucgugcugaucacccugagccugcuggccauccugaagggccuguacaacuucgccaccugcggccugaucggccugaucaccuuccuguuccugugcggcagaagcugcagcaccaucuacaagggcagcuaccagcugcaggcccuggagcugaacauggagacccugaacaugaccaugccccugagcugcaccaagaacaacagccaccacuacaucagagugggcaacgagaccggccuggagcugacccugaccaacaccagcaucaucaaccacaaguucugcaaccugagcgacgcccacaagaagaaccuguacgaccacacccugaugagcaucaucagcaccuuccaccugagcauccccaacuucaaccaguacgaggccaugagcugcgacuucaacggcggcaagaucagcgugcaguacaaccugagccacagcuacgccggcgacgccgccagacacugcggcaccguggccaacggcgugcugcagaccuucaugagaauggccuggggcggcagcuacaucgcccuggacagcggcugcggcaacugggacugcaucaugaccagcuaccaguaccugaucauccagaacaccaccugggaggaccacugccaguucagcagacccagccccaucggcuaccugggccugcugagccagagaaccagagacaucuacaucagcagaagacgccggggcaccuucaccuggacccugagcgacagcgagggcaaggagacccccggcggcuacugccugaccagauggaugcugaucgaggccgagcugaagugcuucggcaacaccgccguggccaagugcaacgagaagcacgacgaggaguucugcgacaugcugagacuguucgacuucaacaagcaggccauccagagacugaagacccccgcccagaugagcauccagcugaucaacaaggccgugaacgcccugaucaacgaccagcugaucaugaagaaccaccugagagacaucaugugcauccccuacugcaacuacagcaaguacugguaccugaaccacaccaccaccggcaagaccagccugcccagaugcuggcuggugagcaacggcagcuaccugaacgagacccacuucagcgacgacaucgagcagcaggccgacaacaugaucaccgagaugcugcagaaggaguacaucgacagacagggcaagaccccccugggccugguggaccuguucguguucagcaccagcuucuaccugaucagcaucuuccugcaccugaucaagauccccacccacagacacaucgugggcaagagcugccccaagccccacagacugaaccacaugggcaucugcagcugcggccuguacaagcagcccggcgugcccgugaaguggaagagauga

SEQ ID NO: 5191 - RNA, 1473 nt, Artificial Sequence
  derived and/or modified protein sequence (opt4) from LASV(Lassa virus/H.sapiens-wt/NGA/2016/ISTH_1591;Clade II)__AVO03647__GPCstabilized
augggccagaucaucaccuucuuccaggaggugccccacgugaucgaggaggugaugaacaucgugcugaucgcccugagccugcuggccauccugaagggcaucuacaacguggccaccugcggccuguucggccuggugagcuuccugcugcugugcggcagaagcugcagcaccaccuacaagggcguguacgagcugcagacccuggagcuggacauggccagccugaacaugaccaugccccugagcugcaccaagaacaacagccaccacuacaucauggugggcaacgagaccggccuggagcugacccugaccaacaccagcaucauccagcacaaguucugcaaccugagcgacgcccacaagaagaaccuguacgaccacgcccugaugagcaucgugagcaccuuccaccugagcauccccaacuucaaccaguacgaggccaugagcugcgacuucaacggcggcaagaucaccgugcaguacaaccugagccacagcuacgccaucgacgccgccaaccacugcggcaccguggccaacggcgugcugcagaccuucaugagaauggccuggggcggcagcuacaucgcccuggacagcggcugcggcagcugggacugcaucaugaccagcuaccaguaccugaucauccagaacaccaccugggaggaccacugccaguucagcagacccagccccaucggcuaccugggccugcugagccagagaaccagagacaucuacaucagcagaagacgccggggcaccuucaccuggacccugagcgacagcgagggcaacgagacccccggcggcuacugccugaccagauggaugcugaucgaggccgagcugaagugcuucggcaacaccgccguggccaagugcaacgagaagcacgacgaggaguucugcgacaugcugagacuguucgacuucaacaagcaggccaucagaagacugaaggcccccgcccagaugagcauccagcugaucaacaaggccgugaacgcccugaucaacgaccagcugaucaugaagaaccaccugagagacaucaugugcauccccuacugcaacuacagcaaguacugguaccugaaccacaccgugaccggcagaaccagccugcccagaugcuggcuggugagcaacggcagcuaccugaacgagacccacuucagcgacgacaucgagcagcaggccgacaacaugaucaccgagcugcugcagaaggaguacauggacagacagggcaagaccccccugggccugguggaccuguucguguucagcaccagcuucuaccugaucagcaucuuccugcaccuggugaagauccccacccacagacacaucaucggcaagcccugccccaagccccacagacugaaccacaugggcgugugcagcugcggccuguacaagcaccccggcgugcccgugaaguggaagagauga

SEQ ID NO: 5192 - RNA, 1473 nt, Artificial Sequence
  derived and/or modified protein sequence (opt4) from LASV(Lassa virus/H.sapiens-wt/NGA/2016/ISTH_1604;Clade II)__AVO03541__GPCstabilized
augggccagaucgugaccuucuuccaggaggugccccacgugaucgaggagaucaugaacaucgugcugaucacccugagccugcuggccauccugaagggcguguacaaccuggccaccugcggccugaucggccugaucaccuuccuguuccugugcggcagaagcugcagcaugaccuacaagggcagcuaccagcuggagacccuggagcugaacauggagacccugaacaugaccaugccccugagcugcaccaagaacaccagccaccacuacaucagagugggcaacgagaccggccuggagcugacccugaccaacaccagcaucaucaaccacaaguucugcaaccugagcgacgcccacaagaagaaccuguacgaccacagccugaugagcaucgugagcaccuuccaccugagcauccccaacuucaaccaguacgaggccaugagcugcgacuucaacggcggcaagaucagcauccaguacaaccugagccacgccuacgccggcgacgccgccaagcacugcggcacccuggccaacggcgugcugcagaccuucaugagaauggccuggggcggcagcuacaucgcccuggacagcggcugcggcaacugggacugcaucaugaccagcuaccaguaccugaucauccagaacaccaccugggaggaccacugccaguucagcagacccagccccaucggcuaccugggccugcugagccagagaaccagagagaucuacaucagcagaagacgccggggcaccuucaccuggacccugagcgacagcgagggcaacgaggcccccggcggcuacugccugaccagauggaugcugaucgaggccgagcugaagugcuucggcaacgccgccguggccaagugcaacgagaagcacgacgaggaguucugcgacaugcugagacuguucgacuucaacaagcaggccauccagagacugaagacccccgcccagaugagcauccagcugaucaacaaggccgugaacgcccugaucaacgaccagcugaucaugaagaaccaccugagagacaucaugugcauccccuacugcaacuacagcaaguacugguaccugaaccacaccaccaccggcagaaccagccugcccagaugcuggcuggugagcaacggcagcuaccugaacgagacccacuucagcgacgacaucgagcagcaggccgacaacaugaucaccgagaugcugcagaaggaguacaucgacagacagggcaagaccccccugggccugguggaccuguucguguucagcaccagcuucuaccugaucagcaucuuccugcaccuggugaagauccccacccacagacacaucgugggcaagagcugccccaagccccacagacugaaccacaugggcaucugcagcugcggccuguacaagcagcccggcgugcccgugagauggaagagauga

SEQ ID NO: 5193 - RNA, 1473 nt, Artificial Sequence
  derived and/or modified protein sequence (opt4) from LASV(Lassa virus/H.sapiens-wt/NGA/2016/ISTH_1609;Clade II)__AVO03661__GPCstabilized
augggccagaucgugaccuucuuccaggagaucccccacgugaucgaggaggugaugaacaucgugcugaucacccugagccugcuggccgugcugaagggcaucuacaacuucgccaccugcggccugaucggccugaucaccuuccuguuccugugcggcagaagcugcagcaccaucuacaagggcagcuaccagcugcagaagcuggagcugaacauggagacccugaacaugaccaugccccugagcugcaccaagaacagcagccaccacuacaucagagugggcaacgagaccggccuggagcugacccugaccaacaccagcaucaucagccacaaguucugcaaccugagcgacgcccacaagaagaaccuguacgaccacgcccugaugagcaucaucagcaccuuccaccugagcauccccaacuucaaccaguacgaggccaugagcugcgacuucaacggcggcaagaucagcgugcaguacaaccugagccacagcuacgccggcgacgccgccagacacugcggcacccuggccaacggcgugcugcagaccuucaugagaauggccuggggcggcagcuacaucgcccuggacagcggcugcggcaacugggacugcaucaugaccagcuaccaguuccugaucauccagaacaccaccugggaggaccacugccaguucagcagacccagccccaugggcuaccugggccugcugagccagagaaccagagacaucuacaucagcagaagacgccggggcaccuucaccuggacccugagcgacagcgagggcaaggagacccccggcggcuacugccugaccagauggaugcugaucgaggccgagcugaagugcuucggcaacaccgccguggccaagugcaacgagaagcacgacgaggaguucugcgacaugcugagacuguucgacuucaacaagcaggccauccagagacugaagacccccgcccagaugagcauccagcugaucaacaaggccgugaacgcccugaucaacgaccagcugaucaugaagaaccaccugagagacaucaugugcauccccuacugcaacuacagccaguacugguaccugaaccacaccaucaccggcaagaccagccugcccaagugcuggcuggugagcaacggcagcuaccugaacgagacccacuucagcgacgacaucgagcagcaggccgacaacaugaucaccgagaugcugcagaaggaguacaucgacagacagggcaagaccccccugggccugguggaccuguucguguucagcaccagcuucuaccugaucagcaucuuccugcaccugaucaagauccccacccacagacacaucgugggcaagagcugccccaagccccacagacugaacagaaugggcaucugcagcugcggccuguacaagcagcccggcgugcccgugaaguggaagagauga

SEQ ID NO: 5194 - RNA, 1473 nt, Artificial Sequence
  derived and/or modified protein sequence (opt4) from LASV(Lassa virus/H.sapiens-wt/NGA/2016/ISTH_1610;Clade II)__AVO03603__GPCstabilized
augggccagaucaucaccuucuuccaggaggugccccacgugaucgaggaggugaugaacaucgugcugaucgcccugagccugcuggccauccugaagggcaucuacaacguggccaccugcggccuguucggccuggugagcuuccuguuccugugcggcagaagcugcagcaccaccuacaagggcguguacgagcugcagacccuggagcuggacauggccagccugaacaugaccaugccccugagcugcaccaagaacaacagccaccacuacaucauggugggcaacgagaccggccuggagcugacccugaccaacaccagcaucaucaaccacaaguucugcaaccugagcgacgcccacaagaagaaccuguacgaccacgcccugaugagcaucaucagcaccuuccaccugagcauccccaacuucaaccaguacgaggccaugagcugcgacuucaacggcggcaagaucagcgugcaguacaaccugagccacaccuacgccaucgacgccgccaaccacugcggcaccaucgccaacggcgugcugcagaccuucaugagaauggccuggggcggcagcuacaucgcccuggacagcggcugcggcagcugggacugcaucaugaccagcuaccaguaccugaucauccagaacaccaccugggaggaccacugccaguucagcagacccagccccaucggcuaccugggccugcugagccagagaaccagagacaucuacaucagcagaagacgccggggcaccuucaccuggacccugagcgacagcgagggcaacgagacccccggcggcuacugccugaccagauggaugcugaucgaggccgagcugaagugcuucggcaacaccgccguggccaagugcaacgagaagcacgacgaggaguucugcgacaugcugagacuguucgacuucaacaagcaggccaucagaagacugaaggcccccgcccagaugaacauccagcugaucaacaaggccgugaacgcccugaucaacgaccagcugaucaugaagaaccaccugagagacaucaugugcauccccuacugcaacuacagcaaguacugguaccugaaccacaccgugaccggcagaaccagccugcccagaugcuggcuggugagcaacggcagcuaccugaacgagacccacuucagcgacgacaucgagcagcaggccgacaacaugaucaccgagcugcugcagaaggaguacauggacagacagggcaagaccccccugggccugguggaccuguucguguucagcaccagcuucuaccugaucagcaucuuccugcaccugaucaagauccccacccacagacacaucgugggcaagcccugccccaagccccacagacugaaccacaugggcaucugcagcugcggccuguacaagcaccccggcgugcccgugaaguggaagagauga

SEQ ID NO: 5195 - RNA, 1473 nt, Artificial Sequence
  derived and/or modified protein sequence (opt4) from LASV(Lassa virus/H.sapiens-wt/NGA/2018/ISTH_0959;Clade II)__AVV65099__GPCstabilized
augggccagaucaucaccuucuuccaggaggugccccacgugaucgaggaggugaugaacaucgugcugaucgcccugagccugcuggccauccugaagggcaucuacaacguggugaccugcggccuguucggccuggugagcuuccugcugcugugcggcagaagcugcagcaccaccuacaagggcguguacgagcugcagacccuggagcuggacauggccagccugaacaugaccaugccccugagcugcaccaagaacaacagccaccacuacaucauggugggcaacgagaccggccuggagcugacccugaccaacaccagcaucaucaaccacaaguucugcaaccugagcgacgcccacaagaagaaccuguacgaccacgcccugaugagcaucaucagcaccuuccaccugagcauccccaacuucaaccaguacgaggccaugagcugcgacuucaacggcggcaagaucagcgugcaguacaaccugagccacgccuacgccaucgacgccgccaaccacugcggcaccaucgccaacggcgugcugcagaccuucaugagaauggccuggggcggcagcuacaucgcccuggacagcggcugcggcagcugggacugcaucaugaccagcuaccaguaccugaucauccagaacaccaccugggaggaccacugccaguucagcagacccagccccaucggcuaccugggccugcugagccagagaaccagagacaucuacaucagcagaagacgccggggcaccuucaccuggacccugagcgacagcgagggcaacgagacccccggcggcuacugccugaccagauggaugcugaucgaggccgagcugaagugcuucggcaacaccgccguggccaagugcaacgagaagcacgacgaggaguucugcgacaugcugagacuguucgacuucaacaagcaggccaucagaagacugaagacccccgcccagaugagcauccagcugaucaacaaggccgugaacgcccugaucaacgaccagcugaucaugaagaaccaccugagagacaucaugugcauccccuacugcaacuacagcaaguacugguaccugaaccacaccgugaccggcaagaccagccugcccagaugcuggcuggugagcaacggcagcuaccugaacgagacccacuucagcgacgacaucgagcagcaggccgacaacaugaucaccgagcugcugcagaaggaguacaucgacagacagggcaagaccccccugggccugguggaccuguucguguucagcaccagcuucuaccugaucagcaucuuccugcaccuggugaagauccccacccacagacacgugaucggcaagcccugccccaagccccacagacugaaccacaugggcaucugcagcugcggccuguacaagcaccccggcgugcccgugaaguggaagagauga

SEQ ID NO: 5196 - RNA, 1473 nt, Artificial Sequence
  derived and/or modified protein sequence (opt4) from LASV(Lassa virus/H.sapiens-wt/NGA/2018/ISTH_1024;Clade II)__AVV65105__GPCstabilized
augggccagaucaucaccuucuuccaggaggugccccacgugaucgaggaggugaugaacaucgugcugaucgcccugagccugcuggccauccugaagggcguguacaacguggccaccugcggccuguucggccuggugagcuuccugcugcugugcggcagaagcugcagcaccaccuacaagggcguguacgagcugcagacccuggagcuggacauggccaaccugaacaugaccaugccccugagcugcaccaagaacaacagccaccacuacaucagagugggcaacgagaccggccuggagcugacccugaccaacaccagcaucaucaaccacaaguucugcaaccugagcgacgcccacaagaacaaccuguacgaccacgcccugaugagcaucaucagcaccuuccaccugagcauccccaacuucaaccaguacgaggccaugagcugcgacuucaacggcggcaagaucagcgugcaguacaaccugagccacgccuacgccguggacgccgccaaccacugcggcaccaucgccaacggcgugcugcagaccuucaugagaauggccuggggcggcagcuacaucgcccuggacagcggcugcggcagcugggacugcaucaugaccagcuaccaguaccugaucauccagaacaccaccugggaggaccacugccaguucagcagacccagccccaucggcuaccugggccugcugagccagagaaccagagacaucuacaucagcagaagacgccggggcaccuucaccuggacccugagcgacagcgagggcaacgagacccccggcggcuacugccugaccagauggaugcugaucgaggccgagcugaagugcuucggcaacaccgccguggccaagugcaacgagaagcacgacgaggaguucugcgacaugcugagacuguucgacuucaacaagcaggccaucagaagacugaagacccccgcccagaugagcauccagcugaucaacaaggccgugaacgcccugaucaacgaccagcugaucaugaagaaccaccugagagacaucaugugcauccccuacugcaacuacagcaaguacugguaccugaaccacaccgugaccggcaagaccagccugcccagaugcuggcuggugagcaacggcaccuaccugaacgagacccacuucagcgacgacaucgagcagcaggccgacaacaugaucaccgagcugcugcagaaggaguacauggacagacagggcaagaccccccugggccugguggaccuguucguguucagcaccagcuucuaccugaucagcaucuuccugcaccuggugaagauccccacccacagacacgugaucggcaagcccugccccaagccccacagacugaaccacaugggcaucugcagcugcggccuguacaagcaccccggcgugcccgugaaguggaagagauga

SEQ ID NO: 5197 - RNA, 1473 nt, Artificial Sequence
  derived and/or modified protein sequence (opt4) from LASV(Lassa virus/H.sapiens-wt/NGA/2018/ISTH_1079;Clade II)__AVV65107__GPCstabilized
augggccagaucaucaccuucuuccaggaggugccccacgugaucgaggaggugaugaacaucgugcugaucgcccugagccugcuggccauccugaagggcaucuacaacguggccaccugcggccuguucggccugguggccuuccugcugcugugcggcagaagcugcagcaccaccuacaagggcguguacgagcugcagacccuggagcuggacauggccagccugaacaugaccaugccccugagcugcaccaagaacaacagccaccacuacaucauggugggcaacgagaccggccuggagcugacccugaccaacaccagcaucaucaaccacaaguucugcaaccugagcgacgcccacaagaagaaccuguacgaccacgcccugaugagcaucaucagcaccuuccaccugagcauccccaacuucaaccaguacgaggccaugagcugcgacuucaacggcggcaagaucagcgugcaguacaaccugagccacaccuacgccguggacgccgccaaccacugcggcaccaucgccaacggcgugcugcagaccuucaugagaauggccuggggcggcagcuacaucgcccuggacagcggcugcggcagcugggacugcaucaugaccagcuaccaguaccugaucauccagaacaccaccugggaggaccacugccaguucagcagacccagccccaucggcuaccugggccugcugagccagagaaccagagacaucuacaucagcagaagacgccggggcaccuucaccuggacccugagcgacagcgagggcaacgagacccccggcggcuacugccugaccagauggaugcugaucgaggccgagcugaagugcuucggcaacaccgccguggccaagugcaacgagaagcacgacgaggaguucugcgacaugcugagacuguucgacuucaacaagcaggccaucagaagacugaagacccccgcccagaugagcauccagcugaucaacaaggccgugaacgcccugaucaacgaccagcugaucaugaagaaccaccugagagacaucaugugcauccccuacugcaacuacagcaaguacugguaccugaaccacaccgugaccggcagaaccagccugcccagaugcuggcuggugagcaacggcagcuaccugaacgagacccacuucagcgacgacaucgagcagcaggccgacaacaugaucaccgagcugcugcagaaggaguacauggacagacagggcaagaccccccugggccugguggaccuguucguguucagcaccagcuucuaccugaucagcaucuuccugcaccugaucaagauccccacccacagacacgugaucggcaagcccugccccaagccccacagacugaaccacaugggcaucugcagcugcggccuguacaagcaccccggcgugcccgugaaguggaagagauga

SEQ ID NO: 5198 - RNA, 1473 nt, Artificial Sequence
  derived and/or modified protein sequence (opt4) from LASV(Lassa virus/H.sapiens-wt/NGA/2018/ISTH_1177;Clade II)__AVV65101__GPCstabilized
augggccagaucaucaccuucuuccaggaggugccccacgugaucgaggaggugaugaacaucgugcugaucgcccugagccugcuggccauccugaagggcaucuacaacguggccaccugcggccuguucggccuggugagcuuccugcugcugugcggcagaagcugcagcaccaccuacaagggcguguacgagcugcagacccuggagcuggacauggccagccugaacaugaccaugccccugagcugcaccaagaacaacagccaccacuacaucagagugggcaacgagaccggccuggagcugacccugaccaacaccagcaucaucgaccacaaguucugcaaccugagcgacgcccacaagaagaaccuguacgaccacgcccugaugagcaucaucagcaccuuccaccugagcauccccaacuucaaccaguacgaggccaugagcugcgacuucaacggcggcaagaucagcgugcaguacaaccugagccacaccuacgccguggacgccgccaaccacugcggcaccaucgccaacggcgugcugcagaccuucaugagaauggccuggggcggcagcuacaucgcccuggacagcggcugcggcagcugggacugcaucaugaccagcuaccaguaccugaucauccagaacaccaccugggaggaccacugccaguucagcagacccagccccaucggcuaccugggccugcugagccagagaaccagagacaucuacaucagcagaagacgccggggcaccuucaccuggacccugagcgacagcgagggcaacgagacccccggcggcuacugccugaccagauggaugcugaucgaggccgagcugaagugcuucggcaacaccgccguggccaagugcaacgagaagcacgacgaggaguucugcgacaugcugagacuguucgacuucaacaagcaggccaucagaagacugaagacccccgcccagaugagcauccagcugaucaacaaggccgugaacgcccugaucaacgaccagcugaucaugaagaaccaccugagagacaucaugugcauccccuacugcaacuacagcaaguacugguaccugaaccacaccaucaccggcagaaccagccugcccagaugcuggcuggugagcaacggcagcuaccugaacgagacccacuucagcgacgacaucgagcagcaggccgacaacaugaucaccgagcugcugcagaaggaguacauggacagacagggcaagaccccccugggccugguggaccuguucguguucagcaccagcuucuaccugaucagcaucuuccugcaccuggugaagauccccacccacagacacgugaucggcaagcccugccccaagccccacagacugaaccacaugggcaucugcagcugcggccuguacaagcaccccggcgugcccgugaaguggaagagauga

SEQ ID NO: 5199 - RNA, 1473 nt, Artificial Sequence
  derived and/or modified protein sequence (opt4) from LASV(Lassa virus/H.sapiens-wt/NGA/2018/ISTH_1375;Clade II)__AVV65115__GPCstabilized
augggccagaucaucaccuucuuccaggaggugccccacgugaucgaggaggugaugaacaucgugcugaucgcccugagccugcuggccauccugaagggcaucuacaacaucgccaccugcggccuguucggccuggugagcuuccugcugcugugcggcagaagcugcagcaccaccuacaagggcguguacgagcugcagacccuggagcuggacauggccagccugaacaugaccaugccccugagcugcaccaagaacaacagccaccacuacaucauggugggcaacgagaccggccuggagcugacccugaccaacaccagcaucaucaaccacagauucugcaaccugagcgacgcccacaagaagaaccuguacgaccacgcccugaugagcaucaucagcaccuuccaccugagcauccccaacuucaaccaguacgaggccaugagcugcgacuucaacggcggcaagaucagcgugcaguacaaccugagccacgccuacgccguggacgccgccaaccacugcggcaccaucgccaacggcgugcugcagaccuucaugagaauggccuggggcggcagcuacaucgcccuggacagcggcugcggcagcugggacugcaucaugaccagcuaccaguaccugaucauccagaacaccaccugggaggaccacugccaguucagcagacccagccccaucggcuaccugggccugcugagccagagaaccagagacaucuacaucagcagaagacgccggggcaccuucaccuggacccugagcgacagcgagggcaacgagacccccggcggcuacugccugaccagauggaugcugaucgaggccgagcugaagugcuucggcaacaccgccguggccaagugcaacgagaagcacgacgaggaguucugcgacaugcugagacuguucgacuucaacaagcaggccaucagaagacugaagacccccgcccagaugagcauccagcugaucaacaaggccgugaacgcccugaucaacgaccagcugaucaugaagaaccaccugagagacaucaugugcauccccuacugcaacuacagcaaguacugguaccugaaccacaccgugaccggcaagaccagccugcccagaugcuggcuggugagcaacggcagcuaccugaacgagacccacuucagcgacgacaucgagcagcaggccgacaacaugaucaccgagcugcugcagaaggaguacaucgacagacagggcaagaccccccugggccugguggaccuguucguguucagcaccagcuucuaccugaucagcaucuuccugcaccuggugaagauccccacccacagacacgugaucggcaagcccugccccaagccccacagacugaaccacaugggcaucugcagcugcggccuguacaagcaccccggcgugcccgugaaguggaagagauga

SEQ ID NO: 5200 - RNA, 1473 nt, Artificial Sequence
  derived and/or modified protein sequence (opt4) from LASV(Lassa virus/H.sapiens-wt/NGA/2018/ISTH_1381;Clade II)__AVV65111__GPCstabilized
augggccagaucgugaccuucuuccaggaggugccccacgugaucgaggaggugaugaacaucgugcugaucgcccugagccugcuggccauccugaagggcaucuacaacguggccaccugcggccuguucggccuggugagcuuccugcugcugugcggcagaagcugcagcaccaccuacaagggcguguacgagcugcagacccuggagcuggacauggccagccugaacaugaccaugccccugagcugcaccaagaacaacagccaccacuacaucauggugggcaacgagaccggccuggagcugacccugaccaacaccagcaucaucaaccacaaguucugcaaccugagcgacgcccacaagaagaaccuguacgaccacgcccugaugagcaucaucagcaccuuccaccugagcauccccaacuucaaccaguacgaggccaugagcugcgacuucaacggcggcaagaucagcgugcaguacaaccugagccacaccuacgccguggacgccgccaaccacugcggcaccaucgccaacggcgugcugcagaccuucaugagaauggccuggggcggcagcuacaucgcccuggacagcggcugcggcagcugggacugcaucaugaccagcuaccaguaccugaucauccagaacaccaccugggaggaccacugccaguucagcagacccagccccaucggcuaccugggccugcugagccagagaaccagagacaucuacaucagcagaagacgccggggcaccuucaccuggacccugagcgacagcgagggcaacgagacccccggcggcuacugccugaccagauggaugcugaucgaggccgagcugaagugcuucggcaacaccgccguggccaagugcaacgagaagcacgacgaggaguucugcgacaugcugagacuguucgacuucaacaagcaggccaucagaagacugaagacccccgcccagaugagcauccagcugaucaacaaggccgugaacgcccugaucaacgaccagcugaucaugaagaaccaccugagagacaucaugugcauccccuacugcaacuacagcaaguacugguaccugaaccacaccgugaccggcaagaccagccugcccagaugcuggcuggugagcaacggcagcuaccugaacgagacccacuucagcgacgacaucgagcagcaggccgacaacaugaucaccgagcugcugcagaaggaguacauggacagacagggcaagaccccccugggccugguggaccuguucguguucagcaccagcuucuaccugaucagcaucuuccugcaccuggugaagauccccacccacagacacguggugggcaagcccugccccaagccccacagacugaaccacaugggcaucugcagcugcggccuguacaagcaccccggcgugcccgugagauggaagagauga

SEQ ID NO: 5201 - RNA, 1473 nt, Artificial Sequence
  derived and/or modified protein sequence (opt4) from LASV(Lassa virus/H.sapiens-wt/NGA/2018/ISTH_1643;Clade II)__AVV65119__GPCstabilized
augggccagaucaucaccuucuuccaggaggugccccacgugaucgaggaggugaugaacaucgugcugaucgcccugagccugcuggccauccugaagggcaucuacaacguggccaccugcggccuguucggccuggugagcuuccugcugcugugcggcagaagcugcagcaccaccuacaagggcguguacgagcugcagacccuggagcuggacauggccagccugaacaugaccaugccccugagcugcaccaagaacaacagccaccacuacaucauggugggcaacgagaccggccuggagcugacccugaccaacaccagcaucaucaaccacaaguucugcaaccugagcgacgcccacaagaagaaccuguacgaccacgcccugaugagcaucaucagcaccuuccaccugagcauccccaacuucaaccaguacgaggccaugagcugcgacuucaacggcggcaagaucagcgugcaguacaaccugagccacaccuacgccguggacgccgccaaccacugcggcaccaucgccaacggcgugcugcagaccuucaugagaauggccuggggcggcagcuacaucgcccuggacagcggcugcggcagcugggacugcaucaugaccagcuaccaguaccugaucauccagaacaccagcugggaggaccacugccaguucagcagacccagccccaucggcuaccugggccugcugagccagagaaccagagacaucuacaucagcagaagacgccggggcaccuucaccuggacccugagcgacagcgagggcaacgagacccccggcggcuacugccugaccagauggaugcugaucgaggccgagcugaagugcuucggcaacaccgccguggccaagugcaacgagaagcacgacgaggaguucugcgacaugcugagacuguucgacuucaacaagcaggccaucagaagacugaagacccccgcccagaugagcauccagcugaucaacaaggccgugaacgcccugaucaacgaccagcugaucaugaagaaccaccugagagacaucaugugcauccccuacugcaacuacagcaaguacugguaccugaaccacaccgugaccggcaagaccagccugcccagaugcuggcuggugagcaacggcaccuaccugaacgagacccacuucagcgacgacaucgagcagcaggccgacaacaugaucaccgagcugcugcagaaggaguacaucgacagacagggcaagaccccccugggccugguggaccuguucguguucagcaccagcuucuaccugaucagcaucuuccugcaccuggugaagauccccacccacagacacgugaucggcaagcccugccccaagccccacagacugaaccacaugggcaucugcagcugcggccuguacaagcaccccggcgugcccgugaaguggaagagauga

SEQ ID NO: 5202 - RNA, 1473 nt, Artificial Sequence
  derived and/or modified protein sequence (opt4) from LASV(LASV003-NIG-2008;Clade II)__AIT17580__GPCstabilized
augggccagaucaucaccuucuuccaggaggugccccacgugaucgaggaggugaugaacaucgugcugaucgcccugagccugcuggccauccugaagggcaucuacaacguggccaccugcggccuguucggccuggugagcuuccugcugcugugcggcagaagcugcagcaccaccuacaagggcguguacgagcugcagacccuggagcuggacauggccagccugaacaugaccaugccccugagcugcaccaagaacaacagccaccacuacaucauggugggcaacgagaccggccuggagcugacccugaccaacaccagcaucaucaaccacaaguucugcaaccugagcgacgcccacaagaagaaccuguacgaccacgcccugaugagcaucaucagcaccuuccaccugagcauccccaacuucaaccaguacgaggccaugagcugcgacuucaacggcggcaagaucagcgugcaguacaaccugagccacaccuacgccguggacgccgccaaccacugcggcaccaucgccaacggcgugcugcagaccuucaugagaauggccuggggcggcagcuacaucgcccuggacagcggcugcggcagcugggacugcaucaugaccagcuaccaguaccugaucauccagaacaccaccugggaggaccacugccaguucagcagacccagccccaucggcuaccugggccugcugagccagagaaccagagacaucuacaucagcagaagacgccggggcaccuucaccuggacccugagcgacagcgagagcaacgagacccccggcggcuacugccugaccagauggaugcugaucgaggccgagcugaagugcuucggcaacaccgccguggccaagugcaacgagaagcacgacgaggaguucugcgacaugcugagacuguucgacuucaacaagcaggccaucagaagacugaaggcccccgcccagaugagcauccagcugaucaacaaggccgugaacgcccugaucaacgaccagcugaucaugaagaaccaccugagagacaucaugugcauccccuacugcaacuacagcaaguacugguaccugaaccacaccgugaccggcagaaccagccugcccagaugcuggcuggugagcaacggcagcuaccugaacgagacccacuucagcgacgacaucgagcagcaggccgacaacaugaucaccgagcugcugcagaaggaguacauggacagacagggcaagaccccccugggccugguggaccuguucguguucagcaccagcuucuaccugaucagcaucuuccugcaccuggugaagauccccacccacagacacgugaucggcaagcccugccccaagccccacagacugaaccacaugggcaucugcagcugcggccuguacaagcaccccggcgugcccgugaaguggaagagauga

SEQ ID NO: 5203 - RNA, 1473 nt, Artificial Sequence
  derived and/or modified protein sequence (opt4) from LASV(LASV006-NIG-2008;Clade II)__AIT17584__GPCstabilized
augggccagaucaucaccuucuuccaggaggugccccaggugaucgaggaggugaugaacaucgugcugaucgcccugagccugcuggccauccugaagggcaucuacaacguggccaccugcggccuguucggccuggugagcuuccugcugcugugcggcagaagcugcagcaccaccuacaagggcguguacgagcugcagacccuggagcuggacauggccagccugaacaugaccaugccccugagcugcaccaagaacaacagccaccacuacaucauggugggcaacgagaccggccuggagcugacccugaccaaccagagcaucaucaaccacaaguucugcaaccugagcgacgcccacaagaagaaccuguacgaccacgcccugaugagcaucaucagcaccuuccaccugagcauccccaacuucaaccaguacgaggccaugagcugcgacuucaacggcggcaagaucagcgugcaguacaaccugagccacagcuucgccguggacgccgccaaccacugcggcaccaucgccaacggcgugcugcagaccuucaugagaauggccuggggcggcagcuacaucgcccuggacagcggcugcggcagcugggacugcaucaugaccagcuaccaguaccugaucauccagaacaccaccugggaggaccacugccaguucagcagacccagccccaucggcuaccugggccugcugagccagagaaccagagacaucuacaucagcagaagacgccggggcaccuucaccuggacccugagcgacagcgagggcaacgagacccccggcggcuacugccugaccagauggaugcugaucgaggccgagcugaagugcuucggcaacaccgccguggccaagugcaacgagaagcacgacgaggaguucugcgacaugcugagacuguucgacuucaacaagcaggccaucagaagacugaagacccccgcccagaugagcauccagcugaucaacaaggccgugaacgcccugaucaacgaccagcugaucaugaagaaccaccugagagacaucaugugcauccccuacugcaacuacagcaaguacugguaccugaaccacaccaagaccggcaagaccagccugcccagaugcuggcuggugagcaacggcagcuaccugaacgagacccacuucagcgacgacaucgagcagcaggccgacaacaugaucaccgagcugcugcagaaggaguacauggacagacagggcaagaccccccugggccugguggaccuguucguguucagcaccagcuucuaccugaucagcaucuuccugcaccuggugaagauccccacccacagacacgugaucggcaagcccugccccaagccccacagacugaaccacaugggcaucugcagcugcggccuguacaagcaccccggcgugcccgugaaguggaagagauga

SEQ ID NO: 5204 - RNA, 1473 nt, Artificial Sequence
  derived and/or modified protein sequence (opt4) from LASV(LASV035-NIG-2009;Clade II)__AIT17588__GPCstabilized
augggccagaucaucaccuucuuccaggaggugccccacgugaucgaggaggugaugaacaucgugcugaucgcccugagccugcuggccauccugaagggcaucuacaacguggccaccugcggccuguucggccuggugagcuuccugcugcugugcggcagaagcugcagcaccaccuacaagggcguguacgagcugcagacccuggagcuggacauggccagccugaacaugaccaugccccugagcugcaccaagaacaacagccaccacuacaucauggugggcaacgagaccggccuggagcugacccugaccaacaccagcaucaucaaccacaaguucugcaaccugagcgacgcccacaagaagaaccuguacgaccacgcccugaugagcaucaucagcaccuuccaccugagcauccccaacuucaaccaguacgaggccaugagcugcgacuucaacggcggcaagaucagcgugcaguacaaccugagccacgccuacgccguggacgccgccaaccacugcggcaccaucgccaacggcgugcugcagaccuucaugagaauggccuggggcggcagcuacaucgcccuggacagcggcugcggcagcugggacugcaucaugaccagcuaccaguaccugaucauccagaacaccaccugggaggaccacugccaguucagcagacccagccccaucggcuaccugggccugcugagccagagaaccagagacaucuacaucagcagaagacgccggggcaccuucaccuggacccugagcgacagcgagggcaacgagacccccggcggcuacugccugaccagauggaugcugaucgaggccgagcugaagugcuucggcaacaccgccguggccaagugcaacgagaagcacgacgaggaguucugcgacaugcugagacuguucgacuucaacaagcaggccaucagaagacugaaggcccccgcccagaugagcauccagcugaucaacaaggccgugaacgcccugaucaacgaccagcugaucaugaagaaccaccugagagacaucaugugcauccccuacugcaacuacagcaaguacugguaccugaaccacaccgugaccggcaagaccagccugcccagaugcuggcuggugagcaacggcagcuaccugaacgagacccacuucagcgacgacaucgagcagcaggccgacaacaugaucaccgagcugcugcagaaggaguacaucgacagacagggcaagaccccccugggccugguggaccuguucguguucagcaccagcuucuaccugaucagcaucuuccugcaccuggugaagauccccacccacagacacgugaucggcaagcccugccccaagccccacagacugaaccacaugggcaucugcagcugcggccuguacaagcaccccggcgugcccgugaaguggaagagauga

SEQ ID NO: 5205 - RNA, 1473 nt, Artificial Sequence
  derived and/or modified protein sequence (opt4) from LASV(LASV042-NIG-2009;Clade II)__AIT17592__GPCstabilized
augggccagaucaucaccuucuuccaggaggugccccacgugaucgaggaggugaugaacaucgugcugaucgcccugagccugcuggccauccugaagggcaucuacaacguggccaccugcggccuguucggccuggugagcuuccugcugcugugcggcagaagcugcagcaccaccuacaagggcguguacgagcugcagacccuggagcuggacauggccagccugaacaugaccaugccccugagcugcaccaagaacaacagccaccacuacaucauggugggcaacgagaccggccuggagcugacccugaccaacaccagcaucaucaaccacaaguucugcaaccugagcgacgcccacaagaagaaccuguacgaccacacccugaugagcaucaucagcaccuuccaccugagcauccccaacuucaaccaguacgaggccaugagcugcgacuucaacggcggcagaaucagcgugcaguacaaccugagccacgccuacgccguggacgccgccaaccacugcggcaccaucgccaacggcgugcugcagaccuucaugagaauggccuggggcggcagcuacaucgcccuggacagcggcugcggcagcugggacugcaucaugaccagcuaccaguaccugaucauccagaacaccaccugggaggaccacugccaguucagcagacccagccccaucggcuaccugggccugcugagccagagaaccagagacaucuacaucagcagaagacgccggggcaccuucaccuggacccugagcgacagcgagggcaacgagacccccggcggcuacugccugaccagauggaugcugaucgaggccgagcugaagugcuucggcaacaccgccguggccaagugcaacgagaagcacgacgaggaguucugcgacaugcugagacuguucgacuucaacaagcaggccaucagaagacugaagacccccgcccagaugagcauccagcugaucaacaaggccgugaacgcccugaucaacgaccagcugaucaugaagaaccaccugagagacaucaugugcauccccuacugcaacuacagcaaguacugguaccugaaccacaccaucaccggcaagaccagccugcccagaugcuggcuggugagcaacggcagcuaccugaacgagacccacuucagcgacgacaucgagcagcaggccgacaacaugaucaccgagcugcugcagaaggaguacaucgacagacagggcaagaccccccugggccugguggaccuguucguguucagcaccagcuucuaccugaucagcaucuuccugcaccuggugaagauccccacccacagacacguggugggcaagcccugccccaagccccacagacugaaccacaugggcaucugcagcugcggccuguacaagcaccccggcgugcccgugaaguggaagagauga

SEQ ID NO: 5206 - RNA, 1473 nt, Artificial Sequence
  derived and/or modified protein sequence (opt4) from LASV(LASV045-NIG-2009;Clade II)__AIT17596__GPCstabilized
augggccagaucaucaccuucuuccaggaggugccccacgugaucgaggaggugaugaacaucgugcugaucgcccugagccugcuggccauccugaagggcaucuacaacguggccaccugcggccuguucggccuggugagcuuccugcugcugugcggcagaagcugcagcaccaccuacaagggcguguacgagcugcagacccuggagcuggacauggccagccugaacaugaccaugccccugagcugcaccaagaacaacagccaccacuacaucauggugggcaacgagaccggccuggagcugacccugaccaacaccagcaucaucaaccacaaguucugcaaccugagcgacgcccacaagaagaaccuguacgaccacgcccugaugagcaucaucagcaccuuccaccugagcauccccaacuucaaccaguacgaggccaugagcugcgacuucaacggcggcaagaucagcgugcaguacaaccugagccacaccuacgccguggacgccgccaaccacugcggcaccaucgccaacggcgugcugcagaccuucaugagaauggccuggggcggcagcuacaucgcccuggacagcggcugcggcagcugggacugcaucaugaccagcuaccaguaccugaucauccagaacaccagcugggaggaccacugccaguucagcagacccagccccaucggcuaccugggccugcugagccagagaaccagagacaucuacaucagcagaagacgccggggcaccuucaccuggacccugagcgacagcgagggcaacgagacccccggcggcuacugccugaccagauggaugcugaucgaggccgagcugaagugcuucggcaacaccgccguggccaagugcaacgagaagcacgacgaggaguucugcgacaugcugagacuguucgacuucaacaagcaggccaucagaagacugaagacccccgcccagaugagcauccagcugaucaacaaggccgugaacgcccugaucaacgaccagcugaucaugaagaaccaccugagagacaucaugugcauccccuacugcaacuacagcaaguacugguaccugaaccacaccgugaccggcaagaccagccugcccagaugcuggcuggugagcaacggcagcuaccugaacgagacccacuucagcgacgacaucgagcagcaggccgacaacaugaucaccgagcugcugcagaaggaguacaucgacagacagggcaagaccccccugggccugguggaccuguucguguucagcaccagcuucuaccugaucagcaucuuccugcaccuggugaagauccccacccacagacacgugaucggcaagcccugccccaagccccacagacugaaccacaugggcaucugcagcugcggccuguacaagcaccccggcgugcccgugaaguggaagagauga

SEQ ID NO: 5207 - RNA, 1473 nt, Artificial Sequence
  derived and/or modified protein sequence (opt4) from LASV(LASV046-NIG-2009;Clade II)__AIT17600__GPCstabilized
augggccagaucaucaccuucuuccaggaggugccccacgugaucgaggaggugaugaacaucgugcugaucgcccugagccugcuggccauccugaagggcaucuacaacguggccaccugcggccuguucggccuggugagcuuccugcugcugugcggcagaagcugcagcaccaccuacaagggcguguacgagcugcagacccuggagcuggacauggccagccugaacaugaccaugccccugagcugcaccaagaacaacagccaccacuacaucauggugggcaacgagaccggccuggagcugacccugaccaacaccagcaucaucaaccacaaguucugcaaccugagcgacgcccacaagaagaaccuguacgaccacgcccugaugagcaucaucagcaccuuccaccugagcauccccaacuucaaccaguacgaggccaugagcugcgacuucaacggcggcaagaucagcgugcaguacaaccugagccacgccuacgccggcgacgccgccaaccacugcggcaccaucgccaacggcgugcugcagaccuucaugagaauggccuggggcggcagcuacaucgcccuggacagcggcugcggcagcugggacugcaucaugaccagcuaccaguaccugaucauccagaacaccaccugggaggaccacugccaguucagcagacccagccccaucggcuaccugggccugcugagccagagaaccagagacaucuacaucagcagaagacgccggggcaccuucaccuggacccugagcgacagcgagggcaacgagacccccggcggcuacugccugaccagauggaugcugaucgaggccgagcugaagugcuucggcaacaccgccguggccaagugcaacgagaagcacgacgaggaguucugcgacaugcugagacuguucgacuucaacaagcaggccaucagaagacugaagacccccgcccagaugagcauccagcugaucaacaaggccgugaacgcccugaucaacgaccagcugaucaugaagaaccaccugagagacaucaugugcauccccuacugcaacuacagcaaguacugguaccugaaccacaccgugaccggcaagaccagccugcccagaugcuggcuggugagcaacggcagcuaccugaacgagacccacuucagcgacgacaucgagcagcaggccgacaacaugaucaccgagcugcugcagaaggaguacaucgacagacagggcaagaccccccugggccugguggaccuguucguguucagcaccagcuucuaccugaucagcaucuuccugcaccuggugaagauccccacccacagacacgugaucggcaagcccugccccaagccccacagacugaaccacaugggcaucugcagcugcggccuguacaagcaccccggcgugcccgugaaguggaagagauga

SEQ ID NO: 5208 - RNA, 1473 nt, Artificial Sequence
  derived and/or modified protein sequence (opt4) from LASV(LASV049-NIG-2009;Clade II)__AIT17604__GPCstabilized
augggccagaucaucaccuucuuccaggaggugccccacgugaucgaggaggugaugaacaucgugcugaucgcccugagccugcuggccauccugaagggcaucuacaacguggccaccugcggccuguucggccuggugagcuuccugcugcugugcggcagaagcugcagcaccaccuacaagggcguguacgagcugcagacccuggagcuggacaugaccagccugaacaugaccaugccccugagcugcaccaagaacaacagccaccacuacaucauggugggcaacgagaccggccuggagcugacccugaccaacaccagcaucaucaaccacaaguucugcaaccugagcgacgcccacaagaaggaccuguacgaccacgcccugaugagcaucaucagcaccuuccaccugagcauccccaacuucaaccaguacgaggccaugagcugcgacuucaacggcggcaagaucagcgugcaguacaaccugagccacaccuacgccguggacgccgccaagcacugcggcaccaucgccaacggcgugcugcagaccuucaugagaauggccuggggcggcagcuacaucgcccuggacagcggcugcggcagcugggacugcaucaugaccagcuaccaguaccugaucauccagaacaccaccugggaggaccacugccaguucagcagacccagccccgugggcuaccugggccugcugagccagagaaccagagacaucuacaucagcagaagacgccggggcaccuucaccuggacccugagcgacagcgagggcaacgagacccccggcggcuacugccugaccagauggaugcugaucgaggccgagcugaagugcuucggcaacaccgccguggccaagugcaacgagaagcacgacgaggaguucugcgacaugcugagacuguucgacuucaacaagcaggccaucagaagacugaagacccccgcccagaugagcauccagcugaucaacaaggccgugaacgcccugaucaacgaccagcugaucaugaagaaccaccugagagacaucaugugcauccccuacugcaacuacagcaaguacugguaccugaaccacaccgugaccggcaagaccagccugcccagaugcuggcuggugagcaacggcagcuaccugaacgagacccacuucagcgacgacaucgagcagcaggccgacaacaugaucaccgagcugcugcagaaggaguaccuggacagacagggcaagaccccccugggccugguggaccuguucguguucagcaccagcuucuaccugaucagcaucuuccugcaccuggugaagauccccacccacagacacgugaucggcaagcccugccccaagccccacagacugaaccacaugggcaucugcagcugcggccuguacaagcaccccggcgugcccgugaaguggaagagauga

SEQ ID NO: 5209 - RNA, 1473 nt, Artificial Sequence
  derived and/or modified protein sequence (opt4) from LASV(LASV052-NIG-2008;Clade II)__AIT17608__GPCstabilized
augggccagaucaucaccuucuuccaggaggugccccacgugaucgaggaggugaugaacaucgugcugaucgcccugagccugcuggccauccugaagggcaucuacaacguggccaccugcggccuguucggccuggugagcuuccugcugcugugcggcagaagcugcagcaccaccuacaagggcguguacgagcugcagacccuggagcuggacauggccagccugaacaugaccaugccccugagcugcaccaagaacaacagccaccacuacaucauggugggcaacgagaccggccuggagcugacccugaccaacaccagcaucaucaaccacaaguucugcaaccugagcgacgcccacaagagaaaccuguacaaccacgcccugaugagcaucaucagcaccuuccaccugagcauccccaacuucaaccaguacgaggccaugagcugcgacuucaacggcggcaagaucagcgugcaguacaaccugagccacaccuacgccguggacgccgccaaccacugcggcaccaucgccaacggcgugcugcagaccuucaugagaauggccuggggcggcagcuacaucgcccuggacagcggcugcggcagcugggacugcaucaugaccagcuaccaguaccugaucauccagaacaccaccugggaggaccacugccaguucagcagacccagccccaucggcuaccugggccugcugagccagagaaccagagacaucuacaucagcagaagacgccggggcaccuucaccuggacccugagcgacagcgagggcaacgagacccccggcggcuacugccugaccagauggaugcugaucgaggccgagcugaagugcuucggcaacaccgccguggccaagugcaacgagaagcacgacgaggaguucugcgacaugcugagacuguucgacuucaacaagcaggccaucagaagacugaagacccccgcccagaugagcauccagcugaucaacaaggccgugaacgcccugaucaacgaccagcugaucaugaagaaccaccugagagacaucaugugcauccccuacugcaacuacagcaaguacugguaccugaaccacaccgugaccggcaagaccagccugcccagaugcuggcuggugagcaacggcagcuaccugaacgagacccacuucagcgacgacaucgagcagcaggccgacaacaugaucaccgagcugcugcagaaggaguacaucgacagacagggcaagaccccccugggccugguggaccuguucguguucagcaccagcuucuaccugaucagcaucuuccugcaccuggugaagauccccacccacagacacaucaucggcaagcccugccccaagccccacagacugaaccacaugggcaucugcagcugcggccuguacaagcaccccggcgugcccgugaaguggagaagauga

SEQ ID NO: 5210 - RNA, 1473 nt, Artificial Sequence
  derived and/or modified protein sequence (opt4) from LASV(LASV056-NIG-2008;Clade II)__AIT17612__GPCstabilized
augggccagaucaucaccuucuuccaggaggugccccacgugaucgaggaggugaugaacaucgugcugaucgcccugagccugcuggccauccugaagggcaucuacaacguggccaccugcggccuguucggccuggugagcuuccugcugcugugcggcagaagcugcagcaccaccuacaagggcguguacgagcugcagacccuggagcuggacauggccagccugaacaugaccaugccccugagcugcaccaagaacaacagccaccacuacaucagagugggcaacgagaccggccuggagcugacccugaccaacaccagcaucaucaaccacaaguucugcaaccugagcgacgcccacaagaagaaccuguacgaccacagccugaugagcaucaucagcaccuuccaccugagcauccccaacuucaaccaguacgaggccaugagcugcgacuucaacggcggcaagaucagcgugcaguacaaccugagccacaccuacgccguggacgccgccaaccacugcggcaccaucgccaacggcgugcugcagaccuucaugagaauggccuggggcggcagcuacaucgcccuggacagcggcugcggcaacugggacugcaucaugaccagcuaccaguaccugaucauccagaacaccaccugggaggaccacugccaguucagcagacccagccccaucggcuaccugggccugcugagccagagaaccagagacaucuacaucagcagaagacgccggggcaccuucaccuggacccugagcgacagcgagggcaacgagacccccggcggcuacugccugaccagauggaugcugaucgaggccgagcugaagugcuucggcaacaccgccguggccaagugcaacgagaagcacgacgaggaguucugcgacaugcugagacuguucgacuucaacaagcaggccaucagaagacugaagacccccgcccagaugagcauccagcugaucaacaaggccgugaacgcccugaucaacgaccagcugaucaugaagaaccaccugagagacaucaugugcauccccuacugcaacuacagcaaguacugguaccugaaccacaccgugaccggcaagaccagccugcccagaugcuggcuggugagcaacggcagcuaccugaacgagacccacuucagcgacgacaucgagcagcaggccgacaacaugaucaccgagcugcugcagaaggaguacaucgacagacagggcaagaccccccugggccugguggaccuguucguguucagcaccagcuucuaccugaucagcaucuuccugcaccuggugaagauccccacccacagacacguggugggcaagcccugccccaagccccacagacugaaccacaugggcaucugcagcugcggccuguacaagcaccccggcgugcccgugaaguggaagagauga

SEQ ID NO: 5211 - RNA, 1473 nt, Artificial Sequence
  derived and/or modified protein sequence (opt4) from LASV(LASV058-NIG-2008;Clade II)__AIT17616__GPCstabilized
augggccagaucaucaccuucuuccaggaggugccccacgugaucgaggaggugaugaacaucgugcugaucgcccugagccugcuggccauccugaagggcaucuacaacguggccaccugcggccuguucggccuggugagcuuccugcugcugugcggcagaagcugcagcaccaccuacaagggcguguacgagcugcagacccuggagcuggacauggccagccugaacaugaccaugccccugagcugcaccaagaacaacagccaccacuacaucauggugggcaacgagaccggccuggagcugacccugaccaacaccagcaucaucaaccacaaguucugcaaccugagcgacgcccacaagaagaaccuguacgaccacgcccugaugagcaucaucagcaccuuccaccugagcauccccaacuucaaccaguacgaggccaugagcugcgacuucaacggcggcaagaucagcgugcaguacaaccugagccacgccuacgccguggacgccgccaaccacugcggcaccaucgccaacggcgugcugcagaccuucaugagaauggccuggggcggcagcuacaucgcccuggacagcggcugcggcagcugggacugcaucaugaccagcuaccaguaccugaucauccagaacaccaccugggaggaccacugccaguucagcagacccagccccaucggcuaccugggccugcugagccagagaaccagagacaucuacaucagcagaagacgccggggcaccuucaccuggacccugagcgacagcgagggcaacgagacccccggcggcuacugccugaccagauggaugcugaucgaggccgagcugaagugcuucggcaacaccgccguggccaagugcaacgagaagcacgacgaggaguucugcgacaugcugagacuguucgacuucaacaagcaggccaucagaagacugaagacccccgcccagaugagcauccagcugaucaacaaggccgugaacgcccugaucaacgaccagcugaucaugaagaaccaccugagagacaucaugugcauccccuacugcaacuacagcaaguacugguaccugaaccacaccgugaccggcaagaccagccugcccagaugcuggcuggugagcaacggcagcuaccugaacgagacccacuucagcgacgacaucgagcagcaggccgacaacaugaucaccgagcugcugcagaaggaguacaucgacagacagggcaagaccccccugggccugguggaccuguucguguucagcaccagcuucuaccugaucagcaucuuccugcaccuggugaagauccccacccacagacacgugaucggcaagcccugccccaagccccacagacugaaccacaugggcaucugcagcugcggccuguacaagcaccccggcgugcccgugaaguggaagagauga

SEQ ID NO: 5212 - RNA, 1473 nt, Artificial Sequence
  derived and/or modified protein sequence (opt4) from LASV(LASV063-NIG-2009;Clade II)__AIT17620__GPCstabilized
augggccagaucaucaccuucuuccaggaggugccccacgugaucgaggaggugaugaacaucgugcugaucgcccugagccugcuggccauccugaagggcaucuacaacguggccaccugcggccuguucggccuggugagcuuccugcugcugugcggcagaagcugcagcaccaccuacaagggcguguacgagcugcagacccuggagcuggacauggccagccugaacaugaccaugccccugagcugcaccaagaacaacagccaccacuacaucauggugggcaacgagaccggccuggagcugacccugaccaacaccagcaucaucagccacaaguucugcaaccugagcgacgcccacaagaagaaccuguacgaccacgcccugaugagcaucaucagcaccuuccaccugagcauccccaacuucaaccaguacgaggccaugagcugcgacuucaacggcggcaagaucagcgugcaguacaaccugagccacgccuacgccaucgacgccgccaaccacugcggcaccguggccaacggcgugcugcagaccuucaugagaauggccuggggcggcagcuacaucgcccuggacagcggcugcggcagcugggacugcaucaugaccagcuaccaguaccugaucauccagaacaccaccugggaggaccacugccaguucagcagacccagccccaucggcuaccugggccugcugagccagagaaccagagacaucuacaucagcagaagacgccggggcaccuucaccuggacccugagcgacagcgagggcaacgagacccccggcggcuacugccugaccagauggaugcugaucgaggccgagcugaagugcuucggcaacaccgccguggccaagugcaacgagaagcacgacgaggaguucugcgacaugcugagacuguucgacuucaacaagcaggccaucagaagacugaaggcccccgcccagaugagcauccagcugaucaacaaggccgugaacgcccugaucaacgaccagcugaucaugaagaaccaccugagagacaucaugugcauccccuacugcaacuacagcaaguacugguaccugaaccacaccgugaccggcaagaccagccugcccagaugcuggcuggugagcaacggcagcuaccugaacgagacccacuucagcgacgacaucgagcagcaggccgacaacaugaucaccgagcugcugcagaaggaguacauggacagacagggcaagaccccccugggccugguggaccuguucguguucagcaccagcuucuaccugaucagcaucuuccugcaccuggugaagauccccacccacagacacgugaucggcaagcccugccccaagccccacagacugaaccacaugggcaucugcagcugcggccuguacaagcaccccggcgugcccgugaaguggaagagauga

SEQ ID NO: 5213 - RNA, 1473 nt, Artificial Sequence
  derived and/or modified protein sequence (opt4) from LASV(LASV1000-NIG-2009;Clade II)__AIT17782__GPCstabilized
augggccagaucaucaccuucuuccaggaggugccccacgugaucgaggaggugaugaacaucgugcugaucgcccugagccugcuggccauccugaagggcaucuacaacguggccaccugcggccuguucggccuggugagcuuccugcugcugugcggcagaagcugcagcaccaccuacaagggcguguacgagcugcagacccuggagcuggacauggccagccugaacaugaccaugccccugagcugcaccaagaacaacagccaccacuacaucauggugggcaacgagaccggccuggagcugacccugaccaacaccagcaucaucaaccacaaguucugcaaccugagcgacgcccacaagaagaaccuguacgaccacgcccugaugagcaucaucagcaccuuccaccugagcauccccaacuucaaccaguacgaggccaugagcugcgacuucaacggcggcaagaucagcgugcaguacaaccugagccacaccuacgccguggacgccgccaaccacugcggcaccaucgccaacggcgugcugcagaccuucaugagaauggccuggggcggcagcuacaucgcccuggacagcggcugcggcagcugggacugcaucaugaccagcuaccaguaccugaucauccagaacaccaccugggaggaccacugccaguucagcagacccagccccaucggcuaccugggccugcugagccagagaaccagagacaucuacaucagcagaagacgccggggcaccuucaccuggacccugagcgacagcgagggcaacgagacccccggcggcuacugccugaccagauggaugcugaucgaggccgagcugaagugcuucggcaacaccgccguggccaagugcaacgagaagcacgacgaggaguucugcgacaugcugagacuguucgacuucaacaagcaggccaucaagagacugaagacccccgcccagaugagcauccagcugaucaacaaggccgugaacgcccugaucaacgaccagcugaucaugaagaaccaccugagagacaucaugugcauccccuacugcaacuacagcaaguacugguaccugaaccacaccgugaccggcaagaccagccugcccagaugcuggcuggugagcaacggcagcuaccugaacgagacccacuucagcgacgacaucgagcagcaggccgacaacaugaucaccgagcugcugcagaaggaguacaucgacagacagggcaagaccccccugggccugguggaccuguucguguucagcaccagcuucuaccugaucagcaucuuccugcaccuggugaagauccccacccacagacacguggugggcaagcccugccccaagccccacagacugaaccacaugggcaucugcagcugcggccuguacaagcaccccggcgugcccgugaaguggaagagauga

SEQ ID NO: 5214 - RNA, 1473 nt, Artificial Sequence
  derived and/or modified protein sequence (opt4) from LASV(LASV1008-NIG-2009;Clade II)__AIT17786__GPCstabilized
augggccagaucaucaccuucuuccaggaggugccccacgugaucgaggaggugaugaacaucgugcugaucgcccugagccugcuggccauccugaagggcaucuacaacguggccaccugcggccuguucggccuggugagcuuccugcugcugugcggcagaagcugcagcaccaccuacaagggcguguacgagcugcagacccuggagcuggacauggccagccugaacaugaccaugccccugagcugcaccaagaacaacagccaccacuacaucauggugggcaacgagaccggccuggagcugacccugaccaacaccagcaucaucaaccacaaguucugcaaccugagcgacgcccacaagaagaaccuguacgaccacgcccugaugagcaucaucagcaccuuccaccugagcauccccaacuucaaccaguacgaggccaugagcugcgacuucaacggcggcaagaucagcgugcaguacaaccugagccacgccuacgccaucgacgccgccgaccacugcggcaccaucgccaacggcgugcugcagaccuucaugagaauggccuggggcggcagcuacaucgcccuggacagcggcugcggcagcugggacugcaucaugaccagcuaccaguaccugaucauccagaacaccaccugggaggaccacugccaguucagcagacccagccccaucggcuaccugggccugcugagccagagaaccagagacaucuacaucagcagaagacgccggggcaccuucaccuggacccugagcgacagcgagggcaacgagacccccggcggcuacugccugaccagauggaugcugaucgaggccgagcugaagugcuucggcaacaccgccguggccaagugcaacgagaagcacgacgaggaguucugcgacaugcugagacuguucgacuucaacaagcaggccaucagaagacugaagacccccgcccagaugagcauccagcugaucaacaaggccgugaacgcccugaucaacgaccagcugaucaugaagaaccaccugagagacaucaugugcauccccuacugcaacuacagcaaguacugguaccugaaccacaccgugaccggcaagaccagccugcccagaugcuggcuggugagcaacggcagcuaccugaacgagacccacuucagcgacgacaucgagcagcaggccgacaacaugaucaccgagcugcugcagaaggaguacauggacagacagggcaagaccccccugggccugguggaccuguucguguucagcaccagcuucuaccugaucagcaucuuccugcaccuggugaagauccccacccacagacacaucaccggcaagcccugccccaagccccacagacugaaccacaugggcaucugcagcugcggccuguacaagcaccccggcgugcccgugaaguggaagagauga

SEQ ID NO: 5215 - RNA, 1473 nt, Artificial Sequence
  derived and/or modified protein sequence (opt4) from LASV(LASV1011-NIG-2009;Clade II)__AIT17790__GPCstabilized
augggccagaucaucaccuucuuccaggaggugccccacgugaucgaggaggugaugaacaucgugcugaucgcccugagccugcuggccauccugaagggcaucuacaacguggccaccugcggccuguucggccuggugagcuuccugcugcugugcggcagaagcugcagcaccaccuacaagggcguguacgagcugcagacccuggagcuggacauggccagccugaacaugaccaugccccugagcugcaccaagaacaacagccaccacuacaucauggugggcaacgagaccggccuggagcugacccugaccaacaccagcaucaucaaccacaaguucugcaaccugagcgacgcccacaagaagaaccuguacgaccacgcccugaugagcaucaucagcaccuuccaccugagcauccccaacuucaaccaguacgaggccaugagcugcgacuucaacggcggcaagaucagcgugcaguacaaccugagccacaccuacgccguggacgccgccaaccacugcggcaccaucgccaacggcgugcugcagaccuucaugagaauggccuggggcggcagcuacaucgcccuggacagcggcugcggcagcugggacugcaucaugaccagcuaccaguaccugaucauccagaacaccaccugggaggaccacugccaguucagcagacccagccccaucggcuaccugggccugcugagccagagaaccagagacaucuacaucagcagaagacgccggggcaccuucaccuggacccugagcgacagcgagggcaacgagacccccggcggcuacugccugaccagauggaugcugaucgaggccgagcugaagugcuucggcaacaccgccguggccaagugcaacgagaagcacgacgaggaguucugcgacaugcugagacuguucgacuucaacaagcaggccaucagaagacugaagacccccgcccagaugagcauccagcugaucaacaaggccgugaacgcccugaucaacgaccagcugaucaugaagaaccaccugagagacaucaugugcauccccuacugcaacuacagcaaguacugguaccugaaccacaccgugaccggcaagaccagccugcccagaugcuggcuggugagcaacggcagcuaccugaacgagacccacuucagcgacgacaucgagcagcaggccgacaacaugaucaccgagcugcugcagaaggaguacauggacagacagggcaagaccccccugggccugguggaccuguucguguucagcaccagcuucuaccugaucagcaucuuccugcaccuggugaagauccccacccacagacacaucaccggcaagcccugccccaagccccacagacugaaccacaugggcaucugcagcugcggccuguacaagcaccccggcgugcccgugaaguggaagagauga

SEQ ID NO: 5216 - RNA, 1473 nt, Artificial Sequence
  derived and/or modified protein sequence (opt4) from LASV(LASV1016-NIG-2009;Clade II)__AIT17798__GPCstabilized
augggccagaucaucaccuucuuccaggaggugccccacgugaucgaggaggugaugaacaucgugcugaucgcccugagccugcuggccauccugaagggcaucuacaacguggccaccugcggccuguucggccuggugagcuuccugcugcugugcggcagaagcugcagcaccaccuacaagggcguguacgagcugcagacccuggagcuggacauggccagccugaacaugaccaugccccugagcugcaccaagaacaacagccaccacuacaucauggugggcaacgagaccggccuggagcugacccugaccaacaccagcaucaucaaccacaaguucugcaaccugagcgacgcccacaagaagaaccuguacgaccacgcccugaugagcaucaucagcaccuuccaccugagcauccccaacuucaaccaguacgaggccaugagcugcgacuucaacggcggcaagaucagcgugcaguacaaccugagccacaccuacgccguggacgccgccaaccacugcggcaccaucgccaacggcgugcugcagaccuucaugagaauggccuggggcggcagcuacaucgcccuggacagcggcugcggcagcugggacugcaucaugaccagcuaccaguaccugaucauccagaacaccaccugggaggaccacugccaguucagcagacccagccccaucggcuaccugggccugcugagccagagaaccagagacaucuacaucagcagaagacgccggggcaccuucaccuggacccugagcgacagcgagggcaacgagacccccggcggcuacugccugaccagauggaugcugaucgaggccgagcugaagugcuucggcaacaccgccguggccaagugcaacgagaagcacgacgaggaguucugcgacaugcugagacuguucgacuucaacaagcaggccaucaugagacugaagacccccgcccagaugagcauccagcugaucaacaaggccgugaacgcccugaucaacgaccagcugaucaugaagaaccaccugagagacaucaugugcauccccuacugcaacuacagcaaguacugguaccugaaccacaccgugaccggcaagaccagccugcccagaugcuggcuggugagcaacggcagcuaccugaacgagacccacuucagcgacgacaucgagcagcaggccgacaacaugaucaccgagaugcugcagaaggaguaccuggacagacagggcaagaccccccugggccugguggaccuguucguguucagcaccagcuucuaccugaucagcaucuuccugcaccuggugaagauccccacccacagacacaucaucggcaagcccugccccaagccccacagacugaaccacaugggcaucugcagcugcggccuguacaagcaccccggcgugcccgugaaguggaagagauga

SEQ ID NO: 5217 - RNA, 1473 nt, Artificial Sequence; identical to SEQ ID NO: 5129
  derived and/or modified protein sequence (opt4) from LASV(LASV221-NIG-2010;Clade II)__AIT17624__GPCstabilized

SEQ ID NO: 5218 - RNA, 1473 nt, Artificial Sequence
  derived and/or modified protein sequence (opt4) from LASV(LASV224-NIG-2010;Clade II)__AIT17626__GPCstabilized
augggccagaucaucaccuucuuccaggaggugccccacgugaucgaggaggugaugaacaucgugcugaucgcccugagccugcuggccauccugaagggcguguacaacguggccaccugcggccuguucggccuggugagcuuccugcugcugugcggcagaagcugcagcaccaccuacaagggcguguacgagcugcagacccuggagcuggacauggccagccugaacaugaccaugccccugagcugcaccaagaacaacagccaccacuacaucauggugggcaacgagaccggccuggagcugacccugaccaacaccagcaucauccagcacaaguucugcaaccugagcgacgcccacaagaagaaccuguacgaccacgcccugaugagcaucaucagcaccuuccaccugagcauccccaacuucaaccaguacgaggccaugagcugcgacuucaacggcggcaagaucaccgugcaguacaaccugagccacagcuacgccaucgacgccgccaaccacugcggcaccaucgccaacggcgugcugcagaccuucaugagaauggccuggggcggcagcuacaucgcccuggacagcggcugcggcagcugggacugcaucaugaccagcuaccaguaccugaucauccagaacaccaccugggaggaccacugccaguucagcagacccagccccaucggcuaccugggccugcugagccagagaaccagagacaucuacaucagcagaagacgccggggcaccuucaccuggacccugagcgacagcgagggcaacgagacccccggcggcuacugccugaccagauggaugcugaucgaggccgagcugaagugcuucggcaacaccgccguggccaagugcaacgagaagcacgacgaggaguucugcgacaugcugagacuguucgacuucaacaagcaggccaucagaagacugaagacccccgcccagaugagcauccagcugaucaacaaggccgugaacgcccugaucaacgaccagcugaucaugaagaaccaccugagagacaucaugugcauccccuacugcaacuacagcaaguacugguaccugaaccacaccgugaccggcagaaccagccugcccagaugcuggcuggugagcaacggcagcuaccugaacgagacccacuucagcgacgacaucgagcagcaggccgacaacaugaucaccgagcugcugcagaaggaguacauggacagacagggcaagaccccccugggccugguggaccuguucguguucagcaccagcuucuaccugaucagcaucuuccugcaccuggugaagauccccacccacagacacaucaucggcaagcccugccccaagccccacagacugaaccacaugggcgugugcagcugcggccuguacaagcaccccggcgugcccgugaaguggaagagauga

SEQ ID NO: 5219 - RNA, 1473 nt, Artificial Sequence
  derived and/or modified protein sequence (opt4) from LASV(LASV225-NIG-2010;Clade II)__AIT17630__GPCstabilized
augggccagaucaucaccuucuuccaggaggugccccacgugaucgaggaggugaugaacaucgugcugaucgcccugagccugcuggccauccugaagggcaucuacaacguggccaccugcggccuguucggccugcugagcuuccugcugcugugcggcagaagcugcagcaccaccuacaagggcguguacgagcugcagacccuggagcuggacauggccagccugaacaugaccaugccccugagcugcaccaagaacaacagccaccacuacaucauggugggcaacgagaccggccuggagcugacccugaccaacaccagcaucaucaaccacaaguucugcaaccugagcgacgcccacaagaagaaccuguacgaccacgcccugaugagcaucaucagcaccuuccaccugagcauccccaacuucaaccaguacgaggccaugagcugcgacuucaacggcggcaagaucagcgugcaguacaaccugagccacgccuacgccguggacgccgccgagcacugcggcaccaucgccaacggcgugcugcagaccuucaugagaauggccuggggcggcagcuacaucgcccuggacagcggcugcggcagcugggacugcgugaugaccagcuaccaguaccugaucauccagaacaccagcugggaggaccacugccaguucagcagacccagccccaucggcuaccugggccugcugagccagagaaccagagacaucuacaucagcagaagacgccggggcaccuucaccuggacccugagcgacagcgagggcaacgagacccccggcggcuacugccugaccagauggaugcugaucgaggccgagcugaagugcuucggcaacaccgccguggccaagugcaacgagaagcacgacgaggaguucugcgacaugcugagacuguucgacuucaacaagcaggccaucagaagacugaagacccccgcccagaugagcauccagcugaucaacaaggccgugaacgcccugaucaacgaccagcugaucaugaagaaccaccugagagacaucaugugcauccccuacugcaacuacagcaaguacugguaccugaaccacaccgugaccggcaagaccagccugcccagaugcuggcuggugagcaacggcagcuaccugaacgagacccacuucagcgacgacaucgagcagcaggccgacaacaugaucaccgagcugcugcagaaggaguacaucgacagacagggcaagaccccccugggccugguggaccuguucguguucagcaccagcuucuaccugaucagcaucuuccugcaccuggugaagauccccacccacagacacgugaucggcaagcccugccccaagccccacagacugaaccacaugggcaucugcagcugcggccuguacaagcaccccggcgugcccgugaaguggaagagauga

SEQ ID NO: 5220 - RNA, 1473 nt, Artificial Sequence
  derived and/or modified protein sequence (opt4) from LASV(LASV229-NIG-2010;Clade II)__AIT17634__GPCstabilized
augggccagaucaucaccuucuuccaggaggugccccacgugaucgaggaggugaugaacaucgugcugaucgcccugagccugcuggccauccugaagggcaucuacaacguggccaccugcggccuguucggccuggugagcuuccugcugcugugcggcagaagcugcagcaccaucuacaaggacguguacgagcugcagacccuggagcuggacauggccagccugaacaugaccaugccccugagcugcaccaagaacaacagccaccacuacaucauggugggcaacgagaccggccuggagcugacccugaccaacaccagcaucaucaaccacaaguucugcaaccugagcgacgcccacaagaagaaccuguacgaccacgcccugaugagcaucaucagcaccuuccaccugagcauccccaacuucaaccaguacgaggccaugagcugcgacuucaacggcggcaagaucagcgugcaguacaaccugagccacaccuacgccaucgacgccgccaaccacugcggcaccaucgccaacggcgugcugcagaccuucaugagaauggccuggggcggcagcuacaucgcccuggacagcggcugcggcagcugggacugcaucaugaccagcuaccaguaccugaucauccagaacaccaccugggaggaccacugccaguucagcagacccagccccaucggcuaccugggccugcugagccagagaaccagagacaucuacaucagcagaagacgccggggcaccuucaccuggacccugagcgacagcgagggcaacgagacccccggcggcuacugccugaccagauggaugcugaucgaggccgagcugaagugcuucggcaacaccgccguggccaagugcaacgagaagcacgacgaggaguucugcgacaugcugagacuguucgacuucaacaagcaggccaucagaagacugaagacccccgcccagaugagcauccagcugaucaacaaggccgugaacgcccugaucaacgaccagcugaucaugaagaaccaccugagagacaucaugugcauccccuacugcaacuacagcagauacugguaccugaaccacaccgugaccggcagaaccagccugcccagaugcuggcuggugagcaacggcagcuaccugaacgagacccacuucagcgacgacaucgagcagcaggccgacaacaugaucaccgagcugcugcagaaggaguacauggacagacagggcaagaccccccugggccugguggaccuguucguguucagcaccagcuucuaccugaucagcaucuuccugcaccuggugaagauccccacccacagacacgugaucggcaagcccugccccaagccccacagacugaaccacaugggcaucugcagcugcggccuguacaaccaccccggcgugcccgugaaguggaagagauga

SEQ ID NO: 5221 - RNA, 1473 nt, Artificial Sequence
  derived and/or modified protein sequence (opt4) from LASV(LASV237-NIG-2010;Clade II)__AIT17638__GPCstabilized
augggccagaucaucaccuucuuccaggaggugccccacgugaucgaggaggugaugaacaucgugcugaucgcccugagccugcuggccauccugaagggcaucuacaacguggccaccugcggccuguucggccuggugagcuuccugcugcugugcggcagaagcugcagcaccaccuacaagggcguguacgagcugcagacccuggagcuggacauggccagccugaacaugaccaugccccugagcugcaccaagaacaacagccaccacuacaucauggugggcaacgagaccggccuggagcugacccugaccaacaccagcaucaucaaccacaaguucugcaaccugagcgacgcccacaagaaggaccuguacgaccacgcccugaugagcaucaucagcaccuuccaccugagcauccccaacuucaaccaguacgaggccaugagcugcgacuucaacggcggcaagaucagcgugcaguacaaccugagccacaccuacgccguggacgccgccaaccacugcggcaccaucgccaacggcgugcugcagaccuucaugagaauggccuggggcggcagcuacaucgcccuggacagcggcugcggcagcugggacugcaucaugaccagcuaccaguaccugaucauccagaacaccaccugggaggaccacugccaguucagcagacccagccccaucggcuaccugggccugcugagccagagaaccagagacaucuacaucagcagaagacgccggggcaccuucaccuggacccugagcgacagcgagggcaacgagacccccggcggcuacugccugaccagauggaugcugaucgaggccgagcugaagugcuucggcaacaccgccguggccaagugcaacgagaagcacgacgaggaguucugcgacaugcugagacuguucgacuucaacaagcaggccaucagaagacugaagacccccgcccagaugagcauccagcugaucaacaaggccgugaacgcccugaucaacgaccagcugaucaugaagaaccaccugagagacaucaugugcauccccuacugcaacuacagcaaguacugguaccugaaccacaccgugaccggcaagaccagccugcccagaugcuggcuggugagcaacggcagcuaccugaacgagacccacuucagcgacgacaucgagcagcaggccgacaacaugaucaccgagcugcugcagaaggaguacauggacagacagggcaagaccccccugggccugguggaccuguucguguucagcaccagcuucuaccugaucagcaucuuccugcaccugaucaagauccccacccacagacacaucaccggcaagcccugccccaagccccacagacugaaccacaugggcaucugcagcugcggccuguacaagcaccccggcgugcccgugaaguggaagagauga

SEQ ID NO: 5222 - RNA, 1473 nt, Artificial Sequence
  derived and/or modified protein sequence (opt4) from LASV(LASV239-NIG-2010;Clade II)__AIT17642__GPCstabilized
augggccagaucaucaccuucuuccaggaggugccccacgugaucgaggaggugaugaacaucgugcugaucgcccugagccugcuggccauccugaagggcguguacaacguggccaccugcggccuguucggccuggugagcuuccugcugcugugcggcagaagcugcagcaccaccuacaagggcguguacgagcugcagacccuggagcuggacauggccagccugaacaugaccaugccccugagcugcaccaagaacaacagccaccacuacaucauggugggcaacgacaccggccuggagcugacccugaccaacaccagcaucaucaaccacaaguucugcaaccugagcgacgcccacaagaagaaccuguacgaccacgcccugaugagcaucaucagcaccuuccaccugagcauccccaacuucaaccaguacgaggccaugagcugcgacuucaacggcggcaagaucagcgugcaguacaaccugagccacgccuacgccguggacgccgccagccacugcggcaccaucgccaacggcgugcugcagaccuucaugagaauggccuggggcggcagcuacaucgcccuggacagcggcugcggcagcugggacugcaucaugaccagcuaccaguaccugaucauccagaacaccaccugggaggaccacugccaguucagcagacccagccccaucggcuaccugggccugcugagccagagaaccagagacaucuacaucagcagaagacgccggggcaccuucaccuggacccugagcgacagcgagggcaacgagacccccggcggcuacugccugaccagauggaugcugaucgaggccgagcugaagugcuucggcaacaccgccguggccaagugcaacgagaagcacgacgaggaguucugcgacaugcugagacuguucgacuucaacaagcaggccaucagaagacugaagacccccgcccagaugagcauccagcugaucaacaaggccgugaacgcccugaucaacgaccagcugaucaugaagaaccaccugagagacaucaugugcauccccuacugcaacuacagcaaguacugguaccugaaccacaccgugaccggcaagaccagccugcccagaugcuggcuggugagcaacggcagcuaccugaacgagacccacuucagcgacgacaucgagcagcaggccgacaacaugaucaccgagcugcugcagaaggaguacauggacagacagggcaagaccccccugggccugguggaccuguucguguucagcaccagcuucuaccugaucagcaucuuccugcaccuggugaagauccccacccacagacacaucaucggcaagcccugccccaagccccacagacugaaccacaugggcaucugcagcugcggccuguacaagcaccccggcgugcccgugaaguggaagagauga

SEQ ID NO: 5223 - RNA, 1473 nt, Artificial Sequence
  derived and/or modified protein sequence (opt4) from LASV(LASV241-NIG-2011;Clade II)__AIT17646__GPCstabilized
augggccagaucaucaccuucuuccaggaggugccccacgugaucgaggaggugaugaacaucgugcugaucgcccugagccugcuggccauccugaagggcaucuacaacguggccaccugcggccuguucggccuggugagcuuccugcugcugugcggcagaagcugcagcaccaccuacaagggcguguacgagcugcagacccuggagcuggacauggccagccugaacaugaccaugccccugagcugcaccaagaacaacagccaccacuacaucauggugggcaacgagaccggccuggagcugacccugaccaacaccagcaucaucaaccacaaguucugcaaccugagcgacgcccacaagaagaaccuguacgaccacgcccugaugagcaucaucagcaccuuccaccugagcauccccaacuucaaccaguacgaggccaugagcugcgacuucaacggcggcaagaucagcgugcaguacaaccugagccacgccuacgccguggacgccgccagccacugcggcaccguggccaacggcgugcugcagaccuucaugagaauggccuggggcggcagcuacaucgcccuggacagcggcugcggcagcugggacugcaucaugaccagcuaccaguaccugaucauccagaacaccaccugggaggaccacugccaguucagcagacccagccccaucggcuaccugggccugcugagccagagaaccagagacaucuacaucagcagaagacgccggggcaccuucaccuggacccugagcgacagcgagggcaacgagacccccggcggcuacugccugaccagauggaugcugaucgaggccgagcugaagugcuucggcaacaccgccguggccaagugcaacgagaagcacgacgaggaguucugcgacaugcugagacuguucgacuucaacaagcaggccaucagaagacugaagacccccgcccagaugagcauccagcugaucaacaaggccgugaacgcccugaucaacgaccagcugaucaugaagaaccaccugagagacaucaugugcauccccuacugcaacuacagcaaguacugguaccugaaccacaccgugaccggcaagaccagccugcccagaugcuggcuggugagcaacggcagcuaccugaacgagacccacuucagcgacgacaucgagcagcaggccgacaacaugaucaccgagcugcugcagaaggaguacauggacagacagggcaagaccccccugggccugguggaccuguucguguucagcaccagcuucuaccugaucagcaucuuccugcaccuggugaagauccccacccacagacacgugaucggcaagcccugccccaagccccacagacugaaccacaugggcaucugcagcugcggccuguacaagcaccccggcgugcccgugaaguggaagagauga

SEQ ID NO: 5224 - RNA, 1473 nt, Artificial Sequence
  derived and/or modified protein sequence (opt4) from LASV(LASV242-NIG-2010;Clade II)__AIT17650__GPCstabilized
augggccagaucaucaccuucuuccaggaggugccccacgugaucgaggaggugaugaacaucgugcugaucgcccugagccugcuggccauccugaagggcaucuacaacguggccaccugcggccuguucggccuggugagcuuccugcugcugugcggcagaagcugcagcaccaccuacaagggcguguacgagcugcagacccuggagcuggacauggccagccugaacaugaccaugccccugagcugcaccaagaacaacagccaccacuacaucauggugggcaacgagaccggccuggagcugacccugaccaacaucagcaucaucaaccacaaguucugcaaccugagcgacgcccacaagaagaaccuguacgaccacgcccugaugagcaucaucagcaccuuccaccugagcauccccaacuucaaccaguacgaggccaugagcugcgacuucaacggcggcaagaucagcgugcaguacaaccugagccacaccuacgccguggacgccgccaaccacugcggcaccaucgccaacggcgugcugcagaccuucaugagaauggccuggggcggcagcuacaucgcccuggacagcggcugcggcagcugggacugcaucaugaccagcuaccaguaccugaucauccagaacaccaccugggaggaccacugccaguucagcagacccagccccaucggcuaccugggccugcugagccagagaaccagagacaucuacaucagcagaagacgccggggcaccuucaccuggacccugagcgacagcgagggcaacgagacccccggcggcuacugccugaccagauggaugcugaucgaggccgagcugaagugcuucggcaacaccgccguggccaagugcaacgagaagcacgacgaggaguucugcgacaugcugagacuguucgacuucaacaagcaggccaucagaagacugaaggcccccgcccagaugagcauccagcugaucaacaaggccgugaacgcccugaucaacgaccagcugaucaugaagaaccaccugagagacaucaugugcauccccuacugcaacuacagcaaguacugguaccugaaccacaccgugaccggcagaaccagccugcccagaugcuggcuggugagcaacggcagcuaccugaacgagacccacuucagcgacgacaucgagcagcaggccgacaacaugaucaccgagcugcugcagaaggaguacaucgacagacagggcaagaccccccugggccugguggaccuguucguguucagcaccagcuucuaccugaucagcaucuuccugcaccuggugaagauccccacccacagacacaucaucggcaagcccugccccaagccccacagacugaaccacaugggcaucugcagcugcggccuguacaagcaccccggcgugcccgugaaguggaagagauga

SEQ ID NO: 5225 - RNA, 1473 nt, Artificial Sequence
  derived and/or modified protein sequence (opt4) from LASV(LASV246-NIG-2010;Clade II)__AIT17658__GPCstabilized
augggccagaucaucaccuucuuccaggaggugccccacgugaucgaggaggugaugaacaucgugcugaucgcccugagccugcuggccauccugaagggcguguacaacguggccaccugcggccuguucggccuggugagcuuccugcugcugugcggcagaagcugcagcaucaccuacaagggcguguacgagcugcagacccuggagcuggacauggccaaccugaacaugaccaugccccugagcugcaccaagaacaacagccaccacuacaucauggugggcaacgagaccggccuggagcugacccugaccaacaccagcaucaucaaccacaaguucugcaaccugagcgacgcccacaagaagaaccuguacgaccacgcccugaugagcaucaucagcaccuuccaccugagcauccccaacuucaaccaguacgaggccaugagcugcgacuucaacggcggcaagaucagcgugcaguacaaccugagccacaccuacgccggcgacgccgccgaccacugcggcaccaucgccaacggcgugcugcagaccuucaugagaauggccuggggcggcagcuacaucgcccuggacagcggcugcggcagcugggacugcaucaugaccagcuaccaguaccugaucauccagaacaccaccugggaggaccacugccaguucagcagacccagccccaugggcuaccugggccugcugagccagagaaccagagacaucuacaucagcagaagacgccggggcaccuucaccuggacccugagcgacagcgagggcaacgagacccccggcggcuacugccugaccagauggaugcugaucgaggccgagcugaagugcuucggcaacaccgccguggccaagugcaacgagaagcacgacgaggaguucugcgacaugcugagacuguucgacuucaacaagcaggccaucagaagacugaagacccccgcccagaugagcauccagcugaucaacaaggccgugaacgcccugaucaacgaccagcugaucaugaagaaccaccugagagacaucaugugcauccccuacugcaacuacagcaaguacugguaccugaaccacaccaucaccggcaagaccagccugcccagaugcuggcuggugagcaacggcagcuaccugaacgagacccacuucagcgacgacaucgagcagcaggccgacaacaugaucaccgagcugcugcagaaggaguacaucgacagacagggcaagaccccccugggccugguggaccuguucguguucagcaccagcuucuaccugaucagcaucuuccugcaccuggugaagauccccacccacagacacaucaccggcaagcccugccccaagccccacagacugaaccacaugggcaucugcagcugcggccuguacaagcaccccggcgugcccgugagauggaagagauga

SEQ ID NO: 5226 - RNA, 1473 nt, Artificial Sequence
  derived and/or modified protein sequence (opt4) from LASV(LASV251-NIG-2010;Clade II)__AIT17666__GPCstabilized
augggccagaucgugaccuucuuccaggaggugccccacgugaucgaggaggugaugaacaucgugcugaucgcccugagccugcuggccauccugaagggcaucuacaacguggccaccugcggccuguucggccuggugagcuuccugcugcugugcggcagaagcugcagcaccaccuacaagggcguguacgagcugcagacccuggagcuggacauggccagccugaacaugaccaugccccugagcugcaccaagaacaacagccaccacuacaucauggugggcaacgagaccggccuggagcugacccugaccaacaccagcaucaucaaccacaaguucugcaaccugagcgacgcccacaagaagaaccuguacgaccacgcccugaugagcaucaucagcaccuuccaccugagcauccccaacuucaaccaguacgaggccaugagcugcgacuucaacggcggcaagaucagcgugcaguacaaccugagccacaccuacgccguggacgccgccaaccacugcggcaccaucgccaacggcgugcugcagaccuucaugagaauggccuggggcggcagcuacaucgcccuggacagcggcugcggcagcugggacugcaucaugaccagcuaccaguaccugaucauccagaacaccaccugggaggaccacugccaguucagcagacccagccccaucggcuaccugggccugcugagccagagaaccagagacaucuacaucagcagaagacgccggggcaccuucaccuggacccugagcgacagcgagggcaacgagacccccggcggcuacugccugaccagauggaugcugaucgaggccgagcugaagugcuucggcaacaccgccguggccaagugcaacgagaagcacgacgaggaguucugcgacaugcugagacuguucgacuucaacaagcaggccaucagaagacugaagacccccgcccagaugagcauccagcugaucaacaaggccgugaacgcccugaucaacgaccagcugaucaugaagaaccaccugagagacaucaugugcauccccuacugcaacuacagcaaguacugguaccugaaccacaccgugaccggcaagaccagccugcccagaugcuggcuggugagcaacggcagcuaccugaacgagacccacuucagcgacgacaucgagcagcaggccgacaacaugaucaccgagcugcugcagaaggaguacauggacagacagggcaagaccccccugggccugguggaccuguucguguucagcaccagcuucuaccugaucagcaucuuccugcaccuggugaagauccccacccacagacacaucaccggcaagcccugccccaagccccacagacugaaccacaugggcaucugcagcugcggccuguacaagcaccccggcgugcccgugaaguggaagagauga

SEQ ID NO: 5227 - RNA, 1473 nt, Artificial Sequence
  derived and/or modified protein sequence (opt4) from LASV(LASV253-NIG-2011;Clade II)__AIT17670__GPCstabilized
augggccagaucaucaccuucuuccaggaggugccccacgugaucgaggaggugaugaacaucgugcugaucgcccugagccugcuggccauccugaagggcaucuacaacguggccaccugcggccuguucggccuggugagcuuccugcugcugugcggcagaagcugcagcaccaccuacaagggcguguacgagcugcagacccuggagcuggacauggccagccugaacaugaccaugccccugagcugcaccaagaacaacagccaccacuacaucauggugggcaacgagaccggccuggagcugacccugaccaacaccagcaucaucaaccacaaguucugcaaccugagcgacgcccacaagaagaaccuguacgaccacgcccugaugagcaucaucagcaccuuccaccugagcauccccaacuucaaccaguacgaggccaugagcugcgacuucaacggcggcaagaucagcgugcaguacaaccugagccacaccuacgccguggacgccgccaaccacugcggcaccaucgccaacggcgugcugcagaccuucaugagaauggccuggggcggcagcuacaucgcccuggacagcggcugcggcagcugggacugcaucaugaccagcuaccaguaccugaucauccagaacaccaccugggaggaccacugccaguucagcagacccagccccaucggcuaccugggccugcugagccagagaaccagagacaucuacaucagcagaagacgccggggcaccuucaccuggacccugagcgacagcgagggcaacgagacccccggcggcuacugccugaccagauggaugcugaucgaggccgagcugaagugcuucggcaacaccgccguggccaagugcaacgagaagcacgacgaggaguucugcgacaugcugagacuguucgacuucaacaagcaggccaucagaagacugaaggcccccgcccagaugagcauccagcugaucaacaaggccgugaacgcccugaucaacgaccagcugaucaugaagaaccaccugagagacaucaugugcauccccuacugcaacuacagcaaguacugguaccugaaccacaccgugaccggcagaaccagccugcccagaugcuggcuggugagcaacggcagcuaccugaacgagacccacuucagcgacgacaucgagcagcaggccgacaacaugaucaccgagcugcugcagaaggaguacaucgacagacagggcaagaccccccugggccugguggaccuguucguguucagcaccagcuucuaccugaucagcaucuuccugcaccuggugaagauccccacccacagacacaucaucggcaagcccugccccaagccccacagacugaaccacaugggcaucugcagcugcggccuguacaagcaccccggcgugcccgugaaguggaagagauga

SEQ ID NO: 5228 - RNA, 1473 nt, Artificial Sequence
  derived and/or modified protein sequence (opt4) from LASV(LASV254-NIG-2011;Clade II)__AIT17674__GPCstabilized
augggccagaucaucaccuucuuccaggaggugccccacgugaucgaggaggugaugaacaucgugcugaucgcccugagccugcuggccauccugaagggcaucuacaacguggccaccugcggccuguucggccuggugagcuuccugcugcugugcggcagaagcugcagcaccaccuacaagggcguguacgagcugcagacccuggagcuggacaugaccaaccugaacaugaccaugccccugagcugcaccaagaacaacagccaccacuacaucauggugggcaacgagaccggccuggagcugacccugaccaacaccagcaucaucaaccacaaguucugcaaccugagcgacgcccacaagaagaaccuguacaaccacgcccugaugagcaucaucagcaccuuccaccugagcauccccaacuucaaccaguacgaggccaugagcugcgacuucaacggcggcaagaucagcgugcaguacaaccugagccacagcuacgccguggacgccgccaaccacugcggcaccaucgccaacggcgugcugcagaccuucaugagaauggccuggggcggcagcuacaucgcccuggacagcggcugcggcaacugggacugcaucaugaccagcuaccaguaccugaucauccagaacaccaccugggaggaccacugccaguucagcagacccagccccaucggcuaccugggccugcugagccagagaaccagagacaucuacaucagcagaagacgccggggcaccuucaccuggacccugagcgacagcgagggcaacgagacccccggcggcuacugccugaccagauggaugcugaucgaggccgagcugaagugcuucggcaacaccgccguggccaagugcaacgagaagcacgacgaggaguucugcgacaugcugagacuguucgacuucaacaagcaggccaucagaagacugaagacccccgcccaggccaacauccagcugaucaacaaggccgugaacgcccugaucaacgaccagcugaucaugaagaaccaccugagagacaucaugugcauccccuacugcaacuacagcaaguacugguaccugaaccacaccgugaccggcaagaccagccugcccagaugcuggcuggugagcaacggcagcuaccugaacgagacccacuucagcgacgacaucgagcagcaggccgacaacaugaucaccgagcugcugcagaaggaguacauggacagacagggcaagaccccccugggccugguggaccuguucguguucagcaccagcuucuaccugaucagcaucuuccugcaccuggugaagauccccacccacagacacgugaucggcaagcccugccccaagccccacagacugaaccacaugggcaucugcagcugcggccuguacaagcaccccggcgugcccgugaaguggaagagauga

SEQ ID NO: 5229 - RNA, 1473 nt, Artificial Sequence
  derived and/or modified protein sequence (opt4) from LASV(LASV256-NIG-2010;Clade II)__AIT17678__GPCstabilized
augggccagaucaucaccuucuuccaggaggugccccacgugaucgaggaggugaugaacaucgugcugaucacccugagccugcuggccauccugaagggcaucuacaacaucgccaccugcggccuguucggccuggugagcuuccugcugcugugcggcagaagcugcagcaccaccuacaagggcguguacgagcugcagacccuggagcuggacaugaccagccugaacaugaccaugccccugagcugcaccaagaacaacagccaccacuacaucauggugggcaacgagaccggccuggagcugacccugaccaacaccagcaucaucaaccacaaguucugcaaccugagcgacgcccacaagaagaaccuguacgaccacgcccugaugagcaucaucagcaccuuccaccugagcauccccaacuucaaccaguacgaggccaugagcugcgacuucaacggcggcaagaucagcgugcaguacaaccugagccacaccuacgccguggacgccgccaaccacugcggcaccaucgccaacggcgugcugcagaccuucaugagaauggccuggggcggcagcuacaucgcccuggacagcggcugcggcagcugggacugcaucaugaccagcuaccaguaccugaucauccagaacaccaccugggaggaccacugccaguucagcagacccagccccaucggcuaccugggccugcugagccagagaaccagagacaucuacaucagcagaagacgccggggcaccuucaccuggacccugagcgacagcgagggcaacgagacccccggcggcuacugccugaccagauggaugcugaucgaggccgagcugaagugcuucggcaacaccgccguggccaagugcaacgagaagcacgacgaggaguucugcgacaugcugagacuguucgacuucaacaagcaggccaucagaagacugaagacccccgcccagaugagcauccagcugaucaacaaggccgugaacgcccugaucaacgaccagcugaucaugaagaaccaccugagagacaucaugugcauccccuacugcaacuacagcaaguacugguaccugaaccacaccgugaccggcaagaccagccugcccagaugcuggcuggugagcaacggcagcuaccugaacgagacccacuucagcgacgacaucgagcagcaggccgacaacaugaucaccgagcugcugcagaaggaguacaucgacagacagggcaagaccccccugggccugguggaccuguucguguucagcaccagcuucuaccugaucagcaucuuccugcaccuggugaagauccccacccacagacacaucaucggcaagcccugccccaagccccacagacugaaccacaugggcaucugcagcugcggccuguacaagcaccccggcauccccgugaaguggaagagauga

SEQ ID NO: 5230 - RNA, 1473 nt, Artificial Sequence
  derived and/or modified protein sequence (opt4) from LASV(LASV267-NIG-2010;Clade II)__AIT17686__GPCstabilized
augggccagaucaucaccuucuuccaggaggugccccacgugaucgaggaggugaugaacaucgugcugaucgcccugagccugcuggccauccugaagggcaucuacaacguggccaccugcggccuguucggccuggugagcuuccugcugcugugcggcagaagcugcagcaccaccuacaagggcguguacgagcugcagacccuggagcuggacauggccagccugaacaugaccaugccccugagcugcaccaagaacaacagccaccacuacaucauggugggcaacgagaccggccuggagcugacccugaccaacaccagcaucaucaaccacaaguucugcaaccugagcgacgcccacaagaagaaccuguacgaccacgcccugaugagcaucaucagcaccuuccaccugagcauccccaacuucaaccaguacgaggccaugagcugcgacuucaacggcggcaagaucagcgugcaguacaaccugagccacaccuacgccguggacgccgccaaccacugcggcaccaucgccaacggcgugcugcagaccuucaugagaauggccuggggcggcagcuacaucgcccuggacagcagaugcggcagcugggacugcaucaugaccagcuaccaguaccugaucauccagaacaccaccugggaggaccacugccaguucagcagacccagccccaucggcuaccugggccugcugagccagagaaccagagacaucuacaucagcagaagacgccggggcaccuucaccuggacccugagcgacagcgagggcaacgagacccccggcggcuacugccugaccagauggaugcugaucgaggccgagcugaagugcuucggcaacaccgccguggccaagugcaacgagaagcacgacgaggaguucugcgacaugcugagacuguucgacuucaacaagcaggccaucagaagacugaagacccccgcccagaugagcauccagcugaucaacaaggccgugaacgcccugaucaacgaccagcugaucaugaagaaccaccugagagacaucaugugcauccccuacugcaacuacagcaaguacugguaccugaaccacaccgugaccggcaagaccagccugcccagaugcuggcuggugagcaacggcagcuaccugaacgagacccacuucagcgacgacaucgagcagcaggccgacaacaugaucaccgagcugcugcagaaggaguacauggacagacagggcaagaccccccugggccugguggaccuguucguguucagcaccagcuucuaccugaucagcaucuuccugcaccugaucaagauccccacccacagacacgugaucggcaagcccugccccaagccccacagacugaaccacaugggcaucugcagcugcggccuguacaagcaccccggcgugcccgugaaguggaagagauga

SEQ ID NO: 5231 - RNA, 1473 nt, Artificial Sequence
  derived and/or modified protein sequence (opt4) from LASV(LASV271-NIG-2010;Clade II)__AIT17690__GPCstabilized
augggccagaucaucaccuucuuccaggaggugccccacgugaucgaggaggugaugaacaucgugcugaucgcccugagccugcuggccauccugaagggcaucuacaacguggccaccugcggccuguucggccuggugagcuuccugcugcugugcggcagaagcugcagcaccaccuacaagggcguguacgagcugcagacccuggagcuggacauggccagccugaacaugaccaugccccugagcugcaccaagaacaacagccaccacuacaucauggugggcaacgagaccggccuggagcugacccugaccaacaccagcaucaucaaccacaaguucugcaaccugagcgacgcccacaagaagaaccuguacgaccacgcccugaugagcaucaucagcaccuuccaccugagcauccccaacuucaaccaguacgaggccaugagcugcgacuucaacggcggcaagaucagcgugcaguacaaccugagccacgccuacgccguggacgccgccagccacugcggcaccguggccaacggcgugcugcagaccuucaugagaauggccuggggcggcagcuacaucgcccuggacagcggcugcggcagcugggacugcaucaugaccagcuaccaguaccugaucauccagaacaccaccugggaggaccacugccaguucagcagacccagccccaucggcuaccugggccugcugagccagagaaccagagacaucuacaucagcagaagacgccggggcaccuucaccuggacccugagcgacagcgagggcaacgagacccccggcggcuacugccugaccagauggaugcugaucgaggccgagcugaagugcuucggcaacaccgccguggccaagugcaacgagaagcacgacgaggaguucugcgacaugcugagacuguucgacuucaacaagcaggccaucagaagacugaagacccccgcccagaugagcauccagcugaucaacaaggccgugaacgcccugaucaacgaccagcugaucaugaagaaccaccugagagacaucaugugcauccccuacugcaacuacagcaaguacugguaccugaaccacaccgugaccggcagaaccagccugcccagaugcuggcuggugagcaacggcagcuaccugaacgagacccacuucagcgacgacaucgagcagcaggccgacaacaugaucaccgagcugcugcagaaggaguacauggacagacagggcaagaccccccugggccugguggaccuguucguguucagcaccagcuucuaccugaucagcaucuuccugcaccuggugaagauccccacccacagacacgugaucggcaagcccugccccaagccccacagacugaaccacaugggcaucugcagcugcggccuguacaagcaccccggcgugcccgugaaguggaagagauga

SEQ ID NO: 5232 - RNA, 1473 nt, Artificial Sequence
  derived and/or modified protein sequence (opt4) from LASV(LASV274-NIG-2010;Clade II)__AIT17694__GPCstabilized
augggccagaucaucaccuucuuccaggaggugccccacgugaucgaggaggugaugaacaucgugcugaucgcccugagccugcuggccauccugaagggcaucuacaacguggccaccugcggccuguucggccuggugagcuuccugcugcugugcggcagaagcugcagcaccaucuacaagggcguguacgagcugcagacccuggagcuggacauggccagccugaacaugaccaugccccugagcugcaccaagaacaacagccaccacuacaucauggugggcaacgagaccggccuggagcugacccugaccaacaccagcaucaucaaccacaaguucugcaaccugagcgacgcccacaagaagaaccuguacgaccacgcccugaugagcaucaucagcaccuuccaccugagcauccccaacuucaaccaguacgaggccaugagcugcgacuucaacggcggcaagaucagcgugcaguacaaccugagccacaccuacgccguggacgccgccaaccacugcggcaccaucgccaacggcgugcugcagaccuucaugagaauggccuggggcggcagcuacaucgcccuggacagcggcugcggcagcugggacugcaucaugaccagcuaccaguaccugaucauccagaacaccaccugggaggaccacugccaguucagcagacccagccccaucggcuaccugggccugcugagccagagaaccagagacaucuacaucagcagaagacgccggggcaccuucaccuggacccugagcgacagcgagggcaacgagacccccggcggcuacugccugaccagauggaugcugaucgaggccgagcugaagugcuucggcaacaccgccguggccaagugcaacgagaagcacgacgaggaguucugcgacaugcugagacuguucgacuucaacaagcaggccaucagaagacugaagacccccgcccagaugagcauccagcugaucaacaaggccgugaacgcccugaucaacgaccagcugaucaugaagaaccaccugagagacaucaugugcauccccuacugcaacuacagcaaguacugguaccugaaccacaccgugaccggcaagaccagccugcccagaugcuggcuggugagcaacggcagcuaccugaacgagacccacuucagcgacgacaucgagcagcaggccgacaacaugaucaccgagcugcugcagaaggaguacaucgacagacagggcaagaccccccugggccugguggaccuguucguguucagcaccagcuucuaccugaucagcaucuuccugcaccuggugaagauccccacccacagacacguggugggcaagcccugccccaagccccacagacugaaccacaugggcaucugcagcugcggccuguacaagcaccccggcgugcccgugaaguggaagagauga

SEQ ID NO: 5233 - RNA, 1473 nt, Artificial Sequence
  derived and/or modified protein sequence (opt4) from LASV(LASV719-NIG-2009;Clade II)__AIT17704__GPCstabilized
augggccagaucaucaccuucuuccaggaggugccccacgugaucgaggaggugaugaacaucgugcugaucgcccugagccugcuggccauccugaagggcaucuacaacguggccaccugcggccuguucggccuggugagcuuccugcugcugugcggcagaagcugcagcaccaccuacaagggcguguacgagcugcagacccuggagcuggacauggccagccugaacaugaccaugccccugagcugcaccaagaacaacagccaccacuacaucauggugggcaacgagaccggccuggagcugacccugaccaacaccagcaucaucaaccacaaguucugcaaccugagcgacgcccacaagaagaaccuguacgaccacgcccugaugagcaucaucagcaccuuccaccugagcauccccaacuucaaccaguacgaggccaugagcugcgacuucaacggcggcaagaucagcgugcaguacaaccugagccacaccuacgccguggacgccgccaaccacugcggcaccaucgccaacggcgugcugcagaccuucaugagaauggccuggggcggcagcuacaucgcccuggacagcggcugcggcagcugggacugcaucaugaccagcuaccaguaccugaucauccagaacaccaccugggaggaccacugccaguucagcagacccagccccaucggcuaccugggccugcugagccagagaaccagagacaucuacaucagcagaagacgccggggcaccuucaccuggacccugagcgacagcgagggcaacgagacccccggcggcuacugccugaccagauggaugcugaucgaggccgagcugaagugcuucggcaacaccgccguggccaagugcaacgagaagcacgacgaggaguucugcgacaugcugagacuguucgacuucaacaagcaggccaucagaagacugaagacccccgcccagaugagcauccagcugaucaacaaggccgugaacgcccugaucaacgaccagcugaucaugaagaaccaccugagagacaucaugugcauccccuacugcaacuacagcaaguacugguaccugaaccacaccgugaccggcaagaccagccugcccagaugcuggcuggugagcaacggcagcuaccugaacgagacccacuucagcgacgacaucgagcagcaggccgacaacaugaucaccgagcugcugcagaaggaguacaucgacagacagggcaagaccccccugggccugguggaccuguucguguucagcaccagcuucuaccugaucagcaucuuccugcaccuggugaagauccccacccacagacacgugaucggcaagcccugccccaagccccacagacugaaccacaugggcaucugcagcugcggccuguacaagcaccccggcgugcccgugaaguggaagagauga

SEQ ID NO: 5234 - RNA, 1473 nt, Artificial Sequence
  derived and/or modified protein sequence (opt4) from LASV(LASV738-NIG-2009;Clade II)__AIT17712__GPCstabilized
augggccagaucaucaccuucuuccaggaggugccccacgugaucgaggaggugaugaacaucgugcugaucgcccugagccugcuggccauccugaagggcaucuacaacguggccaccugcggccuguucggccuggugagcuuccugcugcugugcggcagaagcugcagcaccaccuacaagggcguguacgagcugcagacccuggagcuggacauggccagccugaacaugaccaugccccugagcugcaccaagaacaacagccaccacuacaucauggugggcaacgagaccggccuggagcugacccugaccaacaccagcaucaucaaccacaaguucugcaaccugagcgacgcccacaagaagaaccuguacgaccacgcccugaugagcaucaucagcaccuuccaccugagcauccccaacuucaaccaguacgaggccaugagcugcgacuucaacggcggcaagaucagcgugcaguacaaccugagccacaccuacgccguggacgccgccaaccacugcggcaccaucgccaacggcgugcugcagaccuucaugagaauggccuggggcggcagcuacaucgcccuggacagcggcugcggcgccugggacugcaucaugaccagcuaccaguaccugaucauccagaacaccaccugggaggaccacugccaguucagcagacccagccccaucggcuaccugggccugcugagccagagaaccagagacaucuacaucagcagaagacgccggggcaccuucaccuggacccugagcgacagcgagggcaacgagacccccggcggcuacugccugaccagauggaugcugaucgaggccgagcugaagugcuucggcaacaccgccguggccaagugcaacgagaagcacgacgaggaguucugcgacaugcugagacuguucgacuucaacaagcaggccaucaugagacugaagacccccgcccagaugagcauccagcugaucaacaaggccgugaacgcccugaucaacgaccagcugaucaugaagaaccaccugagagacaucaugugcauccccuacugcaacuacagcaaguacugguaccugaaccacaccgugaccggcaagaccagccugcccagaugcuggcuggugagcaacggcagcuaccugaacgagacccacuucagcgacgacaucgagcagcaggccgacaacaugaucaccgagaugcugcagaaggaguacaucgacagacagggcaagaccccccugggccugguggaccuguucguguucagcaccagcuucuaccugaucagcaucuuccugcaccuggugaagauccccacccacagacacgugaucggcaagcccugccccaagccccacagacugaaccacaugggcaucugcagcugcggccuguacaagcaccccggcgugcccgugagauggaagagauga
